United States Patent Application Publication US 2024/0131193 A1 - sequence listing, part 13

SEQ ID NO: 24330 - DNA, 513 bp, synthetic construct
  source 1..513: mol_type = other DNA; note = Synthetic coding sequence
atggccccccccgtgcggtactgcatccccggcgagcggctgtgcaatctggaagaaggatcacctggcagcggtacctacaccagacacggctacattttctcttccctggccggatgcctgatgaagtcttctgagaacggagccgtttctagcatcaactcacggtttgcgaaagtgcacatcctctatgtgggcagtatgccccttaagaactccttcagagggaccatccgtaaggaggacgtgagggccaccgagaaggacaaagtggagatttacaagagtttcagacccggggatattgtgctcgcgaaagtcattagcctgggcgacgcccagtctaactacttgcttaccactgcagaaaatgaattgggagtggtcgtggcacactctgaaagcggaatacagatggtgcctatttcatggtgcgagatgcagtgcccaaaaactcacaccaaggagtttcgcaaggtcgcgcgcgtccagcccgagttcttgcagacctag

SEQ ID NO: 24331 - DNA, 537 bp, synthetic construct
  source 1..537: mol_type = other DNA; note = Synthetic coding sequence
atggccccccccgtgcggtactgcatccccggcgagcggctgtgcaacctggaggagggcagccccggctccggcacgtacactaggcacgggtatatcttttcaagcctggctggctgtctgatgaagagtagcgaaaacggcgcattaccagtggtgagcgtagtacgggaaactgagagtcaactgcttcccgatgtgggggcaatagtcacctgcaaggtttcttctataaacagcagattcgctaaagtgcacattttgtacgtcggctcaatgccactgaaaaactccttccgcggcactatccggaaagaggacgtccgggccacagaaaaggataaaattagcttaggtgatgcgcagtccaactacttacttacaacggcagaaaatgagctcggcgttgtcgtggcccacagtgagtcaggtattcaaatggtccctatatcttggtgtgagatgcagtgtcctaaaacacataccaaggagttccgaaaagtggcccgtgtccagcctgaattcctgcagacgtag

SEQ ID NO: 24332 - DNA, 2811 bp, synthetic construct
  source 1..2811: mol_type = other DNA; note = Synthetic coding sequence
atggccgccgcccgggacccccccgaggtgagcctgcgggaggccacccagcgcaagttacgtcggttttcagaacttcgcgggaagctggtggcccggggcgagttttgggacattgttgcaatcaccgccgcggatgagaagcaggagctcgcatacaaccagcagctgtcagagaaactcaagagaaaagagctgccacttggtgtccaataccatgtctttgtcgatccagccggggcaaaaatcggaaacggtgggtctacgctgtgtgctttgcagtgccttgaaaagctatatggagacaagtggaactcttttacaatcctcctaattcactcggatgaatggaaaaagaaggtgtcggagtcatatgtaataactatagagcgactcgaggacgatctgcaaatcaaagagaaggaacttaccgagctccgaaacatatttggttctgatgaggcgtttagtaaagtgaatctgaactacaggacagagaacggtctctccttactacacctatgctgtatttgtggcggaaagaagagtcacatccgaaccctgatgttgaaggggctccgaccctctagactgacccgaaacgggttcaccgccctccacctggccgtctacaaagacaacgctgaactgatcacatctctcttacattctggagctgacatccagcaagtcggctatgggggcctcacagcgctccatatcgccaccatagccggtcaccttgaggccgctgacgtacttctgcagcatggggcaaacgtgaatatccaggatgccgtcttcttcactcctctacacattgccgcctattacggacacgaacaggtgactcgattattgttaaagtttggggcagatgtgaatgtgtccggcgaagtaggcgataggccactccaccttgcttctgctaagggcttccttaatatcgccaaactactaatggaagagggctccaaggcagatgtgaacgcacaggacaatgaggatcacgtgcccttgcatttttgctcgaggttcggtcaccacgatattgtgaaatatctcttgcagagcgatctggaagtgcaaccccatgttgtaaatatttacggcgacacgccccttcatttggcgtgctacaatggcaagttcgaagtggctaaagagattatccaaatttccgggacagagagtttaacaaaagaaaacatcttcagtgagaccgcatttcacagtgcgtgcacgtacggcaaaagcattgacctagttaaattcttgttagaccagaatgttataaacatcaaccatcaaggacgcgatgggcatactggccttcatagtgcctgttaccatgggcatattcgcttggttcaatttctgctggataacggtgcagatatgaacctcgtcgcctgtgatcccagtcgctcaagtggggaaaaagatgaacagacttgcctgatgtgggcctacgagaagggacacgatgcaattgtgactcttttaaagcattacaagcggccccaagatgagctgccttgcaacgaatactctcagccgggtggagatggcagctacgtttccgtgcctagccctttaggcaaaataaagagtatgactaaggaaaaagctgacattttgttactcagggctggcctgccttctcactttcacctccaactgagtgaaatcgagttccacgaaattatcggatccggtagctttggaaaggtctataagggcagatgtcgcaataaaatcgtcgccattaagcggtatcgcgctaatacctactgctcgaaatcagacgttgacatgttctgtcgggaggtgtcaattctctgccagctcaaccacccttgtgtgatacagtttgtcggagcttgtctcaacgacccaagccagttcgctatcgtgactcagtatataagcggaggcagtctgttcagcctgctccacgaacagaaacgtatattggacctccagagcaaactaattatcgctgtggatgtggctaagggaatggagtacctccacaatctaacccagcccattattcatagagatctgaactcccataacattctgctgtatgaagacgggcacgctgttgtggcagatttcggggaatccagatttctgcaatcccttgatgaggacaacatgacgaagcagccggggaacttgcgttggatggcccccgaagtgtttacccagtgcacaaggtacaccattaaggccgacgtatttagctatgccttgtgtctgtgggaaatcctcaccggagaaatacccttcgcgcacctaaaacccgccgccgccgcagctgacatggcttatcatcacatcagaccgcccattggctattcaatacctaaacccatcagctccttgctgatacgcggctggaatgcatgtccagagggacgaccggagttcagcgaggtggtcatgaaactggaagaatgcctgtgcaacatagaactcatgtctcccgcatcctcgaactcatccggaagtctgtccccctcctcatccagcgactgtctggtgaatcggggaggacccgggcggagtcacgtggctgcgttgagaagccgctttgaacttgagtacgctttgaacgcccggtcatatgctgctctatcgcagtctgccgggcagtactcttctcagggactcagcctggaggagatgaaaagaagtctccagtacactcctatcgataagtacggatatgtgtccgatcctatgtcttcaatgcattttcactcgtgtcggaatagttcttcgtttgaggactcctcttag

SEQ ID NO: 24333 - DNA, 510 bp, synthetic construct
  source 1..510: mol_type = other DNA; note = Synthetic coding sequence
atggccgccgcccgggacccccccgaggtgagcctgcgggaggccacacagcgaaaactgcgaagattttctgagctgagaggcaagctagtggcacgaggcgagttttgggatattgtagccatcaccgccgctgacgaaaagcaggagctagcgtacaatcagcagctgagcgagaagcttaagcggaaggagcttcctctgggcgtgcagtatcacgtgttcgtcgatcctgccggggcaaagattggaaacggtggaagcacattgtgtgcattgcagtgccttgaaaagctctatggagacaagtggaactccttcacaatactcctgatccactctgtcagtttccagatctaccagaacgccctcgctaagcatcccgtttcttttaaagcctactggattcaggacgttctctggcacctggcccagctgtggagcatcccggactggggactgatgttccaattgggcaagactgccctgctggtggtattgacatcctag

SEQ ID NO: 24334 - DNA, 1785 bp, synthetic construct
  source 1..1785: mol_type = other DNA; note = Synthetic coding sequence
atggccgccgcccgggacccccccgaggtgagcctgcgggaggccacacagagaaagttgcgcaggttctccgagttgcgagggaaactcgttgcaaggggtgaattttgggacattgtggccattaccgctgcggacgaaaagcaggaattggcctataaccagcaattgtccgagaaactgaaaaggaaggaactcccgctgggtgtgcagtaccacgtgtttgtggatcctgcaggagcaaaaatcggcaacgggggtagcactctgtgcgcactgcagtgtctggaaaagctgtacggtgataagtggaacagtttcaccattttgctaatccattccggcggatactctcagagattgcctaatgctagcgccttggggaaaattttcacagcattgccactgggtaaccctatttaccagatgctggaacttaaattggctatgtacatcgattttccactgaacatgaacccagggattctggtcacctgcgctgatgacatcgagctttacagtataggcgagttcgagtttatacggtttgataagcctggattcacggcactggctcacccaagtagcctcactataggtaccactcacggcgtcttcgtgctggatccttttgacgaccttaaacacagggacctcgaataccgctcctgccaccgctttctccataaaccctccatagagaaaatgtatcagtttaacgccgtatgccggcctggtaacttctgccagcaagactttgccgggggagatatcgccgatcttaaactggatagcgactacgtttatacagacagtctgttctacatggaccacaaatccgcgaagatgctgctcgccttttacgaaaaaattggcaccttatcttgcgagattgatgcctacggagacttcttgcaggccttgggaccaggagcgacggtagaatacactcgcaacacgtccaacgttattaaggaagagtccgagctggtggaaatgagacagcgtatttttcacctgttgaaaggaacctccctcaatgtggtcgttctgaacaatagcaagttttatcatatcgggaccaccgaggaatatctgttttatttcacgtctgacaattccctcaagtcagaacttggcctgcagtctattaccttcagcatcttccccgatattcccgagtgctcgggcaagacgagctgtattatacagtcaatcctcgactcaaggtgctctgtcgcgcccggcagcgtcgtggagtactcacgtctcggccccgacgtgtctgtgggtgagaactgtatcattagtggatcctatatcctgactaaagccgcccttccagcacacagtttcgtctgctcactgagcctaaaaatgaataggtgcttgaagtacgccacaatggcgttcggcgtccaggacaacttgaagaaatctgtgaagacccttagcgatattaaactactgcagttcttcggcgtatgttttctgtcctgtctggacgtttggaacctcaaggtgaccgaggagttgttctccggaaataagacttgcctgtctctttggactgctagaatcttccctgtgtgcagtagtctctcagatagcgtgatcacatccttgaaaatgctgaacgccgtaaagaataagtctgcatttagcctcaacagctataaattactgtctattgaagagatgctgatttacaaagacgtcgaagatatgattacgtaccgcgaacagatattcctggaaatctcgctcaagagttcattgatgtag

SEQ ID NO: 24335 - DNA, 588 bp, synthetic construct
  source 1..588: mol_type = other DNA; note = Synthetic coding sequence
atggccccccccgtgcggtactgcatccccggcgagcggctgtgcaacctcgaggaaggttccccaggctctgggacctacacgaggcacggatacatattttcctcattggcaggttgcttgatgaagtctagcgaaaacggcgcccttcctgtggtttccgttgtaagagagactgaatcgcagcttctccctgacgttggggccatcgtgacatgcaaggtttcatccatcaactcacggttcgcgaaggtccacattttgtacgtggggagtatgccgttgaaaaattcattccggggcactattagaaaagaggacgtgagggctaccgaaaaggacaaggtcgaaatttacaagtcgtttcgcccaggggacattgttctggccaaggtgatatccttaggagatgcccaaagcaattacctcctgactaccgcagaaaatgaactgggtgtcgtagttgcacactccgaaagcggcatacagatggttcccatctcctggtgcgagatgcaatgtccaaagacacacaccaaggaatttaggaaagtggccagggttcagcctgaattccttcagacctag

SEQ ID NO: 24336 - DNA, 1626 bp, synthetic construct
  source 1..1626: mol_type = other DNA; note = Synthetic coding sequence
atgaccggcgagaagatccggagcctgcggcgggaccacaagcccagtaaagaggaaggtgacttactcgaaccaggcgatgaggaagccgctgcagccctcggcggcacgttcacccggagcagaatcggtaagggtgggaaagcttgtcataagatatttagtaaccaccatcacaggctgcagttgaaggcagcgccggcctccagtaatcctcccggtgctcccgcactgccactgcacaactccagcgtcactgcgaattcccaaagtccagccctccttgccggcacgaaccccgtcgcagtagtggcagatggcggatcgtgcccagcccactaccccgtgcatgagtgcgtgttcaagggagatgttagaagattgtcttcgctgattcgcactcacaacattggccagaaggacaaccacgggaatactccactacacctggctgtgatgctcggcaacaaggaatgtgcgcacctcctactggctcacaatgcccctgttaaggtgaaaaacgcacaagggtggtcaccgttagccgaggcgatctcttatggagaccgtcaaatgataaccgctttgctgcggaaactgaagcagcaatccagggagtccgtcgaggagaaacgtcctcgcctgctcaaggccctgaaagaattaggtgatttctatttggaactccattgggacttccagagctgggtgcctctacttagtagaatcctgcctagtgacgcatgcaagatatacaagcaagggattaatatacgtctggacaccacactcatcgactttactgacatgaagtgccaaaggggcgatctgtcgttcatttttaacggcgacgcagcaccctccgagtcatttgttgtactggataatgaacagaaagtgtatcagagaattcaccacgaagagtccgagatggaaactgaggaggaagttgacatcctgatgagctctgatatctattcagccacactgtcgaccaagagcattagcttcactcgcgctcaaaccgggtggttatttcgcgaagataaaacagagcgggtgggtaactttcttgcagacttctacttggttaatgggcttgtgctcgagtcacgaaagaggagggagcacctgtctgaagaagatatattgcgaaataaagcgataatggagtcacttagtaaaggcggtaatattatggagcagaactttgaacctatcagacgacaatccctcacaccccctccacagaataccatcacctgggaggagtacatttcagctgagaacggaaaggctccccatctgggcagggagttggtctgtaaagagtctaagaaaacctttaaagctacaattgcaatgtcgcaggagtttccactgggtatcgagctgctcttaaatgtcctcgaagtggtcgccccttttaagcacttcaataagctgagagaattcgtgcagatgaaactcccccccggcttcccagtcaaactcgacatcccagtgttcccgactataaccgcgaccgtgactttccaagaatttcggtacgacgagtttgatggctctatattcacaattcctgatgattataaggaggacccctcccgatttccggatctttag

SEQ ID NO: 24337 - DNA, 840 bp, synthetic construct
  source 1..840: mol_type = other DNA; note = Synthetic coding sequence
atgccctgccggcgggaggaggaggaggaggccggcgaggaggccgaaggtgaggaggaggaagaggatagcttcctgctgcttcagcagagtgtagctctcgggagctcaggtgaggtggataggttagtcgctcagataggggagacgctgcagttagacgctgcacagcatagtcctgcgtctccttgtggcccgcctggcgcccctttgagggccccaggtcccttggccgcagctgttcccgcagataaggcccgcagtcccgctgtgcctctgctgctccctcccgctctcgccgaaaccgtaggccccgcaccacccggggtgttgcgttgtgctctgggggacaggggtagagtgcggggccgcgccgctccctactgcgtcgctgaattggcaactggtcccagcgccctgagtcctctgcctccgcaagccgacttggatggcccgcctggcgcgggcaagcaggggattccccagccgttgagcgggccttgcagaaggggttggctcagaggggcagccgcaagccgacgactgcagcagagacggggcagtcagcctgagaccagaactggcgatgatgatccacatcgcctcctgcagcagcttgtactgtccggtaatctgattaaagaggccgtgcgacggctgcactctcggagactacagctgagggcgaagctgccccagcggccactgctcgggccactctctgcgccagtgcacgagccccccagcccacggtcaccaagagctgcctgttctgatccaggggccagtggccgggctcagcttaggacaggggatggagttttagttccaggcagctag

SEQ ID NO: 24338 - DNA, 1209 bp, synthetic construct
  source 1..1209: mol_type = other DNA; note = Synthetic coding sequence
atgcccctgcacagcagcctgggcaacaagagcgagaccctgagccagaaaaagaacaataacaacaaagagaagactaaacgcaactcgcgcaatccacccagaaccgctctgaaggaaggaaagatggaggagcttagccaagccctggcttcctcctttagcgtttcccaagacctgaacagcaccgccgccccgcatccaagactgtcgcagtataagtctaagtactcatctctggaacagtccgaacgccggcgaagactgttagaattgcagaaaagcaaacgcctcgactatgtaaatcatgctcgtagactggcagaggacgattggactggaatggagagtgaggaagagaacaagaaagatgacgaagagatggacatcgacactgtgaaaaagttaccaaagcattacgcaaatcagctaatgttgtcggaatggctaatagacgtgccatcagacctgggccaggagtggatcgtggtggtgtgtcccgtaggcaagcgcgctctgatcgtggcctctagggggagtacaagtgcatacactaagtccggttattgtgtcaataggttctcttctctgctgccgggcggcaaccgccggaactccacggcaaaggattataccattctggattgtatttacaatgaggttaaccagacctattacgtgttagatgtcatgtgttggcggggacatcctttctatgactgccagactgactttagattttactggatgcactccaagctccctgaagaggagggactgggggagaagaccaagctcaaccccttcaagttcgtcggccttaagaacttcccctgcaccccagagagtctatgcgacgttcttagcatggatttcccctttgaggtggatgggttactcttttaccataaacaaacccattattctccagggagcacgccattggtcggctggctaagaccctatatggtgagcgatgtcctaggcgtggctgtccccgctggccccctgacaactaaacccgattatgccgggcatcaactccagcagatcatggaacataaaaaatcccaaaaggagggcatgaaggagaagcttacacataaagcctctgagaatgggcactacgaattagagcatttgagcaccccgaaactcaagggttcgagtcacagcccagatcaccccggctgccttatggagaactag

SEQ ID NO: 24339 - DNA, 1107 bp, synthetic construct
  source 1..1107: mol_type = other DNA; note = Synthetic coding sequence
atgagcctgttcggcaccaccagcggcttcggcaccagcggcaccagcatgttcggaagcgccaccacggacaatcacaatcccatgaaagacatcgaagtcacatcatctcccgatgacagtattggctgcctgtcttttagcccaccaacactgccaggaaatttcctgattgctggctcatgggctaatgacgtcagatgctgggaggtacaggacagtggacagactatccccaaagcacaacagatgcataccggacctgttctggacgtctgctggtctgacgatggaagcaaagtatttactgcttcatgtgacaaaaccgccaaaatgtgggatctaagcagtaatcaagctattcagattgcgcaacatgatgcccctgtgaaaaccatacactggataaaggctcccaactactcttgcgtaatgaccgggagttgggataaaacactcaagttctgggacactcggagctcgaatcccatgatggttctccagctccccgagcgatgctactgcgctgatgtcatctaccctatggccgtggtcgccacggcagagcgtggcctcatcgtgtaccagctggaaaatcagcctagtgagttcaggaggatcgagagtccactgaagcaccaacacaggtgcgtggctatcttcaaggacaagcagaacaaacccactggctttgctctcggcagcattgaaggacgggtggccattcactacattaaccctccgaatcctgccaaggataactttacatttaagtgccatagatcaaatggcaccaatacaagcgctccccaggatatatatgctgtgaatggcatagccttccaccccgtgcatggaacacttgctacagtgggaagtgatggccgcttcagcttttgggataaagacgcaaggacaaagctaaaaacaagtgagcagctggatcagccaatttccgcctgctgtttcaaccacaacggaaatatcttcgcatacgcaagttcatacgattggtcaaaggggcacgaattttataaccctcagaagaaaaattatatttttttgcgcaatgcggccgaggagttaaagcctagaaataaaaaatag

SEQ ID NO: 24340 - DNA, 552 bp, synthetic construct
  source 1..552: mol_type = other DNA; note = Synthetic coding sequence
atgcggaagagcagctgcgtggagagcttcgacgaccagcggcggatgtccctccacttacatggggcagattgcgaccctaaaacccagaacgagatgaatatatgcgaggaggaattcgtagagtacaaaaaccgcgacgcaatctcggctctgatgccactatttagcgaagaagaatcttccgacggatccaagcacaataacgggctgcccgatcatatctccgctcagcttcagaatacctacaccttgaaagcctttacggtgggctctaagtgcgtggtgtggtcttctcttaggaacacttggtctaagtgcgaaatactcgagacagccgaagaggggaccagagtgctgaacctgtccaacggaatggaggagatcgttaaccccgaaaacgtgtggaacgggatccccaagttggataaaagccccccggaggctgtgagccagagagtgggtaaggatctgtatttcatgagcgtaggcgacaccactatcaaggagaaggggttcggcggtgatggagatcttacagttgacctgtag

SEQ ID NO: 24341 - DNA, 1821 bp, synthetic construct
  source 1..1821: mol_type = other DNA; note = Synthetic coding sequence
atgcccagcccccagctgctggtgctgttcggcagccagaccggcacagcacaggatgtatcggaacggcttggacgcgaggcaagacgaagacgcctgggatgccgtgtgcaggccttagactcataccccgtggtgaatcttattaacgaacccctagtgatttttgtctgcgccacgacaggtcagggtgatccccccgacaacatgaaaaacttttggagattcatctttcggaaaaatctcccatctaccgccctgtgccaaatggactttgcggtcctgggactcggcgacagcagttacgccaaattcaactttgtagctaaaaagctgcaccgtcggttgttgcagcttgggggatcggcacttctccccgtatgcctcggagacgatcagcatgagctcggcccagacgcagctgttgacccttggcttcgggacctatgggaccgagtgctggggctgtaccccccgccacctggtctcaccgagattccacctggcgtgccactgcccagcaaatttacactgttgttcctccaggaagcaccaagcacagggtctgagggccagagagtggcgcaccctggaagccaagagcctccctctgagtctaagccatttctcgcaccgatgataagcaatcagcgtgtgacgggtccaagccattttcaggacgttaggctcatcgaattcgatatcctgggatcagggatttctttcgctgctggggacgtggttctaattcagccgagcaattcggccgctcacgtgcagcggttctgccaggttcttggtctggacccggaccagctattcatgctgcagcctcgcgagcctgacgtgtccagtcccacccgtctgccacaaccatgctccatgcgccacctcgtcagccactatctggatattgctagtgtgccacgtcgaagcttctttgagctgctggcttgcctatccttgcatgagctagaacgggagaaactactggagtttagctccgcacagggccaagaggagttattcgagtattgtaaccgacctagacgtactatcttagaggttctgtgcgattttccccacaccgcagcggccatcccccctgattaccttctggatttgatccctgtgatacgacctcgcgctttctcgatcgctagcagcctcctcacacatcctagtcgtttacagattttggttgcggttgttcagttccagaccagactgaaggagccacgcaggggcctatgttcttcctggctcgccagcctggatcctgggcagggccctgtccgtgtcccactgtgggtaaggccgggctcactcgccttccccgaaactcctgatactcccgttatcatggttggacccggcaccggtgtggccccattccgggctgccatacaggagagagtcgcgcagggccagacaggcaactttctgttttttggctgcagatggcgcgaccaagacttttactgggaagcagaatggcaagaacttgagaaaagggattgtcttacactcatcccagctttctctcgagagcagccacctgccctgttctccgccttgcaagaacagaaggtctacgtccagcacagactcagagagctgggttccttggtgtgggagctgttagatagacaaggggcttatttctatctggcagggaatgctaagtcaatgccggccgatgtcagcgaggctctgatgagcattttccaagaagaaggaggcctgtgtagcccggatgccgccgcttaccttgctcgactgcagcagacccgtcggtttcaaactgaaacttgggcttag

SEQ ID NO: 24342 - DNA, 420 bp, synthetic construct
  source 1..420: mol_type = other DNA; note = Synthetic coding sequence
atggccgagagcgactgggacaccgtgaccgtgctgcggaagaaggggcctactgctgctcaggccaagtcgaaacaggctattctggccgcccagcgccgcggtgaggacgtcgagaccagtaagaagtgggctgccggccagaataagcagcattccattactaagaataccgcaaagctggaccgcgaaacggaggagctgcaccacgaccgagtgactttagaagtcggcaaggtgatccagcagggcaggcagtccaagggtctcactcaaaaagacctcgcaaccaaaatcaatgagaagccgcaagttatcgctgattatgaaagcggtcgggcaatacccaacaatcaggtgcttgggaagattgagcgggccatcggggagtgtcctagtactctccgtcgggtgcgatag

SEQ ID NO: 24343 - DNA, 426 bp, synthetic construct
  source 1..426: mol_type = other DNA; note = Synthetic coding sequence
atggccgagagcgactgggacaccgtgaccgtgctgcggaagaagggcccaactgccgctcaggccaagtcaaaacaagccatcttggcagcccagcgtaggggggaggacgtcgagacttccaagaaatgggctgccggtcaaaacaagcagcactctatcacgaaaaacacagctaaactggatcgggaaacagaagaactccaccatgaccgggtgactctggaggttggaaaagtaatacagcaaggacgccagagcaagggactcacacagaaggatctggcaactaaaattaatgaaaaaccacaggtcatcgcagactacgaaagcgggagagctatcccgaacaaccaggtgcttggaaagatcgaacgcgccatcgatgtgggcaccagaagcgctagagtcctgagagctcagtag

SEQ ID NO: 24344 - DNA, 150 bp, synthetic construct
  source 1..150: mol_type = other DNA; note = Synthetic coding sequence
atggccacccagcggaagcacctggtgaaggacttcaacccctacattacctgctatatctgtaagggttatcttatcaagccaaccactgtgaccgaatgtctgcatacgagcgcagagagctattggatgagtacatggatgagctag

SEQ ID NO: 24345 - DNA, 960 bp, synthetic construct
  source 1..960: mol_type = other DNA; note = Synthetic coding sequence
atgatggtgctgaaggtggaggagctggtgaccggcaagaagaacgggaatggcgaggccggtgaatttctccccgaagactttagagatggagagtacgaggccgctgtcaccctggaaaaacaggaagacctgaagaccctactggctcatccagttacgttaggagaacagcagtggaaatctgagaagcagcgggaggctgaattgaagaaaaagaaattggaacagcgatccaagcttgagaatctggaggatctagagattattatccagttgaaaaaacggaagaaatatagaaaaacaaaagtgcccgtggtcaaagaaccagaaccagagatcatcaccgaaccagtggacgtgccaacctttctgaaagccgccctagagaataaactcccagtagtggagaagttcctgtctgataaaaacaaccccgatgtgtgtgatgagtataaacggacggccctccaccgcgcttgccttgagggccaccttgcaatcgtggaaaagctgatggaggcaggtgcccagatcgagttcagggacatgctggaaagtaccgcaattcactgggcaagcagaggcggaaatcttgacgtgctgaaacttcttctgaacaagggagcaaagatttccgctcgcgacaaactgttgtccacagcactccacgttgcagtgcggacaggacactatgaatgtgccgaacatctaatcgcttgtgaagcagatttgaatgccaaagatcgcgagggcgacacacctctgcatgatgctgtccgccttaacaggtacaagatgataagactgctcataatgtacggagccgacctgaatattaaaaactgtgctggcaagacacccatggatctggttttgcattggcaaaacggcacaaaagcaattttcgatagcctgcgcgaaaattcttacaagacctctaggattgcgactttctag

SEQ ID NO: 24346 - DNA, 1089 bp, synthetic construct
  source 1..1089: mol_type = other DNA; note = Synthetic coding sequence
atgagcggctaccagcggcggcccggcgccacccccctgagccgggcccgctctctggctatccctgacgatgaccgattcgaggatctggaagaagccaacccttttagctttagggagtttttgaaaactaaaaatcttggtttgtctaaagaggatcctgcatctagaatttacgcaaaagaagctagccggcattctctgggccttgaccataacagcccgccctctcaaacgggtggatatgggcttgaatatcagcagccgttttttgaagacccaactggagccggcgaccttcttgatgaggaggaagatgaggacactggatggtcaggtgcttacttgccatccgctattgaacaaactcacccggaacgggtcccagcggggacttctccttgcagcacctatttaagctttttctcgacaccctcggagctggccgggcccgagagcctcccaagttgggccttatcggatactgattctcgagtgagccccgccagcccagctggctccccaagcgctgactttgccgtccatggcgagtccctcggagatcgccatcttagaacattacagatctcctacgatgcactgaaggacgagaactcaaaactcaggcgcaaacttaacgaagtccaaagtttttccgaagcccaaaccgaaatggtgagaactctcgagagaaaattggaagcaaaaatgattaaagaagaaagcgattatcacgacttggaaagtgtcgttcagcaggttgagcagaacctagagctcatgaccaaaagagccgtgaaggcggagaatcacgtagttaagctcaagcaggagattagtctcctgcaggcccaggtctcaaacttccaacgagagaacgaagcccttaggtgcggtcaaggcgcatccctgaccgtcgtgaagcagaacgccgacgttgccttgcagaatctccgcgttgtgatgaatagcgcacaggcatcgataaaacagctggtgtctggtgcggaaacactgaacctggtggccgaaattctcaagtccatcgataggatttccgaagttaaggacgaggaggaggactcctag

SEQ ID NO: 24347 - DNA, 5463 bp, synthetic construct
  source 1..5463: mol_type = other DNA; note = Synthetic coding sequence
atggagagcaacttcaaccaggagggcgtgccccggcccagctacgtcttttctgcagatcccatcgcccggccatcagaaattaatttcgacggtatcaaactggacctgtctcatgagttctctctagtggcgcctaacaccgaagcaaattccttcgagtccaaagattatctgcaggtctgcctcaggattcgaccatttacccaaagcgaaaaagaactggagagcgaaggatgtgtccacattctcgattcccaaaccgtggtgttaaaagaaccgcagtgcatacttggcagattatccgagaaatccagtgggcagatggcccagaagttctcattttcaaaggtgttcggcccggctacaacccagaaggaatttttccaggggtgtatcatgcagcctgttaaagacctccttaaaggccaatcaagattaattttcacctatgggctaacaaattcaggtaagacttacacattccagggcactgaggagaacattgggattcttccaaggaccctgaacgtgcttttcgacagtctgcaggagcggttatatactaagatgaacttgaaaccccaccgcagccgtgagtatctcagactgtctagtgaacaagagaaggaggaaatcgcctcaaagtccgccctcttgcgccagatcaaggaagtaaccgtgcacaatgactccgacgatactctgtatggtagcctcactaactccttgaacatttctgagttcgaggagtcaatcaaggattatgagcaagccaacctcaacatggcaaattctattaagttcagtgtttgggtttctttcttcgagatttacaatgaatatatctatgacttgttcgtgccagtatcctctaagttccagaagcggaagatgttgcgcctgagccaggatgtgaagggctactcgttcatcaaggatctgcagtggatacaggtgagcgactccaaagaagcttatcggttactgaagctcggtattaagcatcaaagcgtggccttcacgaagttaaacaacgcctctagcaggtcacactctattttcacggttaagatattacagattgaagactccgagatgtcgcgcgtgatccgagtcagcgaactgagtctgtgcgatttggccgggtccgagcgcacaatgaaaactcagaacgaaggtgagaggctgcgggagacaggcaacatcaatacgagcctgttgaccttaggaaagtgtatcaatgtcttaaagaactcagagaaaagtaaattccagcaacacgtcccatttagagaaagcaaattaacccactatttccaatcatttttcaatggcaagggaaaaatctgcatgatcgtcaacattagtcagtgttatttggcatatgatgaaacgctgaatgtgctcaaattcagcgccatcgctcagaaggtttgtgtgcctgacaccctaaatagcagtcaggagaaactcttcggacctgtgaagagctcgcaggatgtgtcactggacagtaattctaattccaagattctaaacgtaaagcgagccacaatcagttgggaaaacagtctggaagacttaatggaagacgaggacttggtggaggagttagaaaatgccgaggaaacacaaaacgtggaaaccaagctgctggacgaggacctggacaaaacactcgaagaaaacaaggccttcatttctcacgaagagaaacgaaagctgctggatttaatagaggatcttaaaaagaaactgatcaacgaaaagaaggagaagcttaccctcgagttcaagattagagaggaggtgacacaggaatttacgcaatattgggcccagagagaggcagactttaaagagacgcttctgcaggagcgcgaaattctcgaggaaaacgcagaacgtagattagccattttcaaggatcttgtggggaaatgtgacacaagagaggaagctgcaaaagacatttgtgctactaaggtggagacggaggagactcacaattatgtcgggttcgaagatatcatagattctcttcaggataacgttgccgacataaaaaaacaggccgagatcgctcatctctacattgcgtctctcccagaccctcaggaggctactgcctgcttagagctgaagttcaatcagataaaagctgagctcgccaaaaccaagggcgagctcataaagactaaggaagaactgaagaaaagggagaacgagtcagattcactaatccaggagctagagactagtaataagaagattatcactcagaatcagaggatcaaagagctgattaatataatcgaccaaaaagaggacactatcaacgagttccagaatctgaagtcccatatggaaaacacctttaagtgtaatgataaagccgatacttcctccctgatcattaacaataagttgatatgtaacgagactgtggaagtgcccaaagattctaagtcgaagatttgtagcgagagaaaaagggtgaacgagaatgagctgcagcaagatgaaccgccggcaaagaaggggtctattcacgtctcctcggccattactgaggaccagaagaaatcagaggaagtccgccctaacattgccgagatagaggatatccgcgtcctacaggagaataatgaagggctccgtgctttcttacttaccatcgagaatgagctgaaaaatgaaaaggaggagaaggccgaattgaataagcagattgtgcactttcagcaagaactgtccctctctgaaaagaaaaacctcacgctctcaaaagaggttcagcaaatccagtccaattatgacatagctattgcagaactccatgtgcagaagtcgaagaatcaagagcaggaggagaagatcatgaaactttctaatgagatcgaaacggcaacacggtccattacgaataatgttagtcagatcaaattgatgcacaccaagatagacgagctgagaaccctggattctgtttcgcagatatctaatatagacctcctgaacctgcgggacctctcaaatggctccgaagaagataaccttcccaacactcagctggacctactgggaaatgattaccttgtttctaagcaggtaaaggaatatcggatccaagagcccaacagggagaacagttttcacagctctattgaggcgatttgggaggagtgtaaggagatagtcaaagcatcgtcgaaaaaatcgcaccagatcgaagagctagagcagcagatcgagaaattacaggccgaggtaaagggatacaaagacgagaacaaccgcctgaaagagaaagagcacaagaaccaggacgatcttctgaaggaaaaagaaactcttatacagcaactcaaagaagagctgcaggaaaagaatgtgacactagacgtccagatccagcatgtcgtggagggtaagagggccctctcggaactcacgcagggtgtcacctgttacaaagctaagatcaaggagttggagactattctggagacccaaaaggtcgaatgttcacatagcgctaagctcgaacaggacattctcgaaaaagaaagcatcattctcaaacttgaacgaaatctgaaagaattccaggaacatcttcaggattccgtgaaaaacaccaaggaccttaatgttaaagaactcaaactgaaagaagagataacccagctcaccaataaccttcaggatatgaagcacctgctgcaactgaaggaagaagaggaagagaccaataggcaggaaactgagaaactgaaagaggagctcagcgcttcgtctgcccggactcagaacctaaaggcggatcttcaacgtaaggaggaggactatgcagatctcaaagagaagctgacggatgctaagaagcagatcaaacaagtgcagaaggaggtgtcagtcatgcgggatgaagataagctcctccggattaagatcaacgagctggaaaaaaagaagaaccagtgtagccaggaattggacatgaagcagagaacaatccaacagttgaaggagcagctcaataatcaaaaggtggaggaggctatccagcagtatgagcgggcctgtaaagacctcaatgtgaaggaaaagattatagaggatatgagaatgacactggaagaacaagagcagacacaggtggaacaagatcaggtgttggaagccaagctcgaggaggtagagcggctggccaccgagcttgagaagtggaaagaaaaatgtaatgatctggagacaaagaacaaccagcgctctaataaggagcatgagaacaatactgacgtgctcggaaagctgacgaacttgcaagatgagctccaggagtccgaacaaaagtataacgctgataggaaaaaatggctcgaagaaaaaatgatgctcattactcaggccaaagaagccgaaaacattcgcaataaggagatgaaaaaatacgccgaggatagggaacgcttttttaaacagcagaatgagatggagattttgacagcccagctgactgaaaaagatagcgatctgcaaaaatggcgggaggaacgggaccaactcgtggcagcccttgagatacaactaaaggctcttatcagctcaaacgtgcagaaagataacgaaatcgagcagctgaaacgcatcatatcagaaacatccaagatagaaacgcaaatcatggatatcaagccaaagcggatttctagtgccgacccggacaaactgcaaaccgaacctctcagtacatccttcgagatttctaggaacaaaatagaagatggttcggtggttcttgatagttgcgaggtctcaaccgaaaatgaccagagcacccggttccccaagcccgagctcgagatccagtttacgccactgcagcccaacaagatggccgtcaaacacccaggctgcaccactccagtgaccgtcaagattccaaaagctcgcaaacggaaaagcaacgagatggaagaggatcttgttaagtgtgaaaataagaagaacgctaccccaagaactaacttgaaatttcctatttcagatgaccggaattccagcgttaagaaggagcagaaagttgccattcgaccttcctctaaaaaaacatatagcctgagatctcaagcctccataatcggggtgaatctcgctaccaagaaaaaggagggcacgctgcagaaatttggagatttcctgcagcacagtcccagtatcctccagtctaaagccaagaagatcatcgagacgatgagcagcagcaagctcagcaatgtggaggccagcaaggagaatgtgagccaacctaagcgcgccaagcgaaagctatacacgtctgaaatatccagccctatcgacatcagtggtcaagtgattctgatggatcagaaaatgaaggagtccgatcaccaaattatcaagaggcgcctgcggaccaagaccgccaaatag

SEQ ID NO: 24348 - DNA, 1485 bp, synthetic construct
  source 1..1485: mol_type = other DNA; note = Synthetic coding sequence
atgaagctgggcaagaagcccatgtacaagcccgtggacccctacagtcgaatgcagtctacatataattacaacatgcgaggcggggcttatcctccgaggtatttttaccccttcccagtgccccctcttctgtaccaggttgagttgagcgtgggaggccaacaattcaatgggaagggcaagacccggcaagcagcaaagcatgacgctgctgcgaaggccctgaggatccttcagaatgaaccccttcccgagcggcttgaagtaaacggccgagaatctgaagaggagaacctaaataagagtgaaattagccaagttttcgaaatcgcactgaaaaggaacctgcccgtcaatttcgaggtggcccgagaatctggccctccacatatgaagaacttcgtcactaaagtctctgtgggtgagttcgtgggcgaaggcgagggtaaaagcaagaagatctcaaagaagaatgccgccattgccgtactggaggaattaaagaagctacctcctctccctgccgtggagcgggtgaagccacggattaagaagaagacgaaacccattgtcaagacttcgccagaatatggccagggaatcaacccgatttctcgcttagcacagatacaacaggcgaaaaaagagaaagaacccgagtacactttgctcaccgaacggggactgccgcgccggagggaattcgtaatgcaagttaaggtcggaaaccatactgcagaagggacaggcaccaacaagaaggttgctaagagaaacgctgcagaaaatatgctagagattctcggatttaaagtccctcaggcgcagcctacaaagccggctcttaagtcagaagagaaaacgcctatcaaaaagcccggggatggacgaaaggtaacctttttcgaaccaggttccggagacgaaaatgggacctccaataaggaggacgagttcagaatgccatacttatcccatcagcaactgccagctggcattctgcctatggtgccggaagtggcacaggctgtgggggttagccaggggcaccacaccaaagattttacacgggcagcacctaatccagctaaggctaccgttacagcaatgattgcaagagagttgctctatggcggaactagccctaccgccgagactatccttaagaataatatctcctcaggacatgtgccacatgggcccctgacacgcccttctgaacagttggactatctgtcgcgagtccagggattccaggtagaatataaagatttcccaaaaaacaataaaaatgagttcgtgtctttgattaattgctctagccagccgccactgataagtcacgggataggaaaggatgtggagtcatgccacgatatggcagcactaaacatactgaagttgcttagcgaacttgaccaacagagtacggagatgcccagaaccggtaacggccccatgtccgtgtgcggtcgctgttag

SEQ ID NO: 24349 - DNA, 1509 bp, synthetic construct
  source 1..1509: mol_type = other DNA; note = Synthetic coding sequence
atgaagctgggcaagaagcccatgtacaagcccgtggacccctactctcggatgcagtctacttataactacaacatgaggggtggcgcgtatcctcccagatatttctacccgttccccgtgccacccctgctgtaccaggtggagttaagcgtgggaggtcagcagtttaacggcaagggcaagacccgacaagccgccaaacacgacgccgcagccaaagctttgcgaatcctgcagaacgagcctctccccgaaaggctggaagtgaatggtcgggagtccgaggaggagaatctgaacaagtcagagatttcacaggtgttcgagatcgccctgaagaggaacctaccagtgaattttgaaagttttccattgaaacaggtagcccgtgaatctggacccccccacatgaagaactttgttactaaggtaagtgtgggggaatttgtaggcgagggcgaagggaaatctaaaaaaattagcaagaaaaatgccgctatcgctgttctggaggagctcaagaaactgccacccttgcctgccgtggagagggttaaaccgcgcatcaagaaaaagacaaagcctatcgtgaagcctcagactagcccagaatacgggcaaggcattaacccgatcagcagattggcacagatccagcaagcaaagaaggagaaagaaccggagtacactctgttgacagagcgcggactgccccggcgccgggaatttgtgatgcaggtgaaagtcgggaaccacaccgccgaaggcacaggcaccaataagaaagttgcaaagcgaaatgcagccgagaatatgttggaaatcctcggatttaaggtgcctcaggcacagcctacgaagcccgcgctgaagtcagaagagaagacacccattaagaagcctggagatggcaggaaggtcactttcttcgaacctggctctggcgatgaaaacggtacgtctaataaggaagatgaattccggatgccttatctgtcccatcagcaacttccagcagggatcctacccatggttccggaagttgcccaggctgtgggagtgtctcagggccaccacaccaaagacttcactcgggcagctcccaatcccgccaaggcaaccgtcactgcaatgatcgcgagagaactcctttatggggggaccagcccgacggcagaaacaatcctgaaaaataatatctcttccggccacgtgccccacggaccacttacccgtcccagcgaacagctcgactatctgtctagggtccagggctttcaggttgagtacaaggacttccctaagaacaataaaaacgagtttgtcagcttaatcaactgtagttcccagccaccgctcattagccatgggatcggtaaagatgttgagagctgccacgacatggcagcccttaatatcctgaaattgctcagtgaacttgaccagcagagcaccgagatgccaaggaccggcaatggtcctatgtctgtatgtggaaggtgttag

SEQ ID NO: 24350 - DNA, 1491 bp, synthetic construct
  source 1..1491: mol_type = other DNA; note = Synthetic coding sequence
atgaagctgggcaagaagcccatgtacaagcccgtggacccctactccagaatgcagtctacctacaactacaatatgcgggggggggcctacccaccacgctatttctacccgttccccgtgcccccccttttatatcaggtggagctatctgtgggaggacagcagttcaacgggaagggcaagacgcggcaagccgcaaagcatgacgccgctgcgaaagctcttagaatcctgcagaacgagccattgcccgagagattggaagtcaatggtcgcgaatctgaagaggaaaatctgaataagagtgagatatctcaggtgttcgaaattgctcttaaacggaatctgcctgtaaacttcgaggtcgctagagaatctggcccaccccacatgaagaatttcgtaaccaaggtctccgttggggaatttgtgggggagggcgaaggcaagtccaagaaaattagtaagaagaatgccgccattgcagttctggaggagttgaagaagcttccaccactgcccgctgtggagagagtcaagccccgaatcaagaaaaagacaaaaccaattgtgaagccccagacctccccggaatatggccagggtattaacccaatctctcgcttggcccaaattcaacaggctaagaaggaaaaggaacctgaatacacactgctgacggaacgcggcctgccgcggcgaagggagtttgtgatgcaggtgaaggttgggaatcatactgctgaaggtaccggcaccaacaaaaaagttgcaaagcggaatgccgcggaaaacatgttggaaatcctaggttttaaggttccacaggcgcaaccgaccaagcctgcgctgaaatcagaggaaaaaacacccattaagaaaccaggagacggccgcaaagtcacttttttcgagccaggatcaggggatgagaacggcacgtctaataaagaggacgaatttcgtatgccttatctctctcaccaacagctccctgctggaatattgcccatggtccccgaggtggcgcaggcggtcggcgtctcacaaggccaccacactaaggatttcactagggccgccccaaatccagcgaaagccacggttaccgccatgattgctagggaactcctgtacggcgggacttcccccactgccgagacaatcctgaagaataacatctcaagtgggcacgtgccccacggccccttaacaaggccatctgagcaattggattatctgtccagagtgcaaggctttcaagtggagtataaagactttcctaaaaataacaagaatgagttcgtaagtctgatcaattgctcatctcagccccctctcatttctcacggcataggcaaggatgtggaaagctgccacgatatggctgcgcttaacattctgaaattgctatccgagttagaccagcagagtaccgagatgcctagaacagggaacggcccgatgtccgtgtgcggtcggtgttag

SEQ ID NO: 24351 - DNA, 1473 bp, synthetic construct
  source 1..1473: mol_type = other DNA; note = Synthetic coding sequence
atgagcgaggtgaccaagaacagcctggagaagatcctgccccagctgaaatgccatttcacgtggaatctgttcaaggaggattccgtctcccgtgacctggaagaccgcgtctgcaatcaaatcgagtttctgaacactgagttcaaggctactatgtacaacctgctggcatacattaaacacctagatgggaacaatgaggccgcgttggaatgtctgcgccaggcagaggaactgatacagcaggagcacgccgaccaggctgaaatcagatcgttggtcacctggggcaactacgcttgggtttactatcacttaggcaggctgagtgatgcacagatctacgtcgacaaggttaagcagacttgcaagaaattttcaaatccctattcaattgaatacagcgaattagactgcgaggaggggtggacgcagttgaagtgcggaagaaatgagcgggccaaggtatgtttcgagaaagccctggaagaaaaaccaaataaccccgagttctctagtggccttgctatcgcgatgtaccacttagacaatcacccagaaaagcagttcagcaccgatgtgctgaaacaggccatagaactatcaccagataaccaatatgtcaaggttctcctcggccttaagcttcagaagatgaataaagaagcggagggcgaacagtttgtagaagaggcattggaaaagagtccgtgccaaactgacgttctgaggtcagccgcaaagttttacaggagaaagggagacctggataaggccatcgaactatttcagcgcgtacttgaatctacaccaaacaatgggtatctgtaccaccagataggttgctgttataaagctaaggtgagacagatgcaaaacacgggcgagtctgaagcgtctggtaacaaggagatgatcgaggcccttaaacagtacgccatggactactccaataaggccctggaaaagggactgaaccctctcaatgcctactcggatctagcggaattcctggagacagaatgttaccagacacctttcaacaaggaggtcccagatgctgagaagcaacagagccaccagcggtactgcaacctacagaaatataacggcaagtctgaagatactgccgtccagcacggcctagaggggcttagtatctccaaaaagtcaacggacaaggaagaaattaaggaccagccccagaatgtcagcgagaatctgcttccacaaaacgctcctaactattggtacttgcagggcttgatccacaagcagaatggcgatctgttgcaggccgctaaatgctacgaaaaggaattgggaaggctgctgcgggatgcaccaagcgggattggatcaatctttctgtcggccagcgaactggaagatggcagcgaggaaatggggcagggcgctgtgagctccagcccccgtgagctcctctctaactccgagcagctgaactag

SEQ ID NO: 24352 - DNA, 1473 bp, synthetic construct
  source 1..1473: mol_type = other DNA; note = Synthetic coding sequence
atgagcgaggtgaccaagaacagcctggagaagatcctgccccagctcaaatgccactttacctggaatctatttaaggaggatagtgtgtcacgcgacctcgaagatcgggtctgcaaccagattgagtttctcaacacagaattcaaggctacgatgtacaacctgcttgcctatataaaacacttggacggcaacaacgaggctgcccttgaatgcttgagacaggctgaggagcttattcagcaggaacatgctgatcaggcagagatcaggtccctggtaacctggggcaattatgcatgggtctactaccaccttggcagattatcagacgcacagatttacgtggataaggtcaagcagacttgcaagaaattctctaatccatattcgattgagtattctgagctcgactgtgaggaaggctggacccagctgaagtgtggccggaacgaacgcgccaaagtgtgttttgaaaaagccctggaggagaaacccaataaccccgagttctctagcgggctggccattgcaatgtatcatctcgataaccaccccgaaaagcagttttcgactgacgtacttaaacaagctatcgagttgtcccctgacaaccagtatgtgaaggtgctgctaggactaaaactgcagaagatgaacaaggaggctgaaggtgagcagttcgtcgaagaggctttggagaagtccccatgccagacagatgtccttcgatccgccgctaaattttatcggaggaagggggacttagacaaggcgattgaactcttccaaagggtgctggaatcaacacccaataatggctacctgtatcatcagattggttgctgttacaaagccaaggtgagacagatgcaaaatactggcgaaagcgaggcctcaggtaataaggaaatgatagaggccttaaagcagtatgcaatggactacagtaacaaggccctcgagaaggggttgaacccactaaacgcttactccgatctggcggaattcctcgagaccgaatgctaccagacacctttcaataaggaggtcccggatgccgagaaacagcagtcacaccagagatactgcaacctgcaaaagtataatggaaagagcgaggacacagcagtgcagcatggccttgaaggtcttagtatcagcaaaaaatctactgataaagaggaaatcaaagaccagcctcagaacgtgtcggaaaatctgctgccccagaatgcccccaattattggtatctgcaagggttgattcacaagcaaaatggggatctcctgcaagcggcaaagtgttacgagaaagagctgggcagactgctcagggatgctccatcaggcattggaagcattttcctcagtgcgagcgagctggaggacgggtcagaggagatgggacagggtgccgtttcaagcagcccaagagaactcctctctaattctgaacaactgaactag

SEQ ID NO: 24353 - DNA, 1509 bp, synthetic construct
  source 1..1509: mol_type = other DNA; note = Synthetic coding sequence
atgaagctgggcaagaagcccatgtacaagcccgtggacccctacagccggatgcagagcacatacaactataacatgcggggaggagcctatccaccaagatacttttaccctttcccggtacccccacttttataccaggtcgaactgtctgttggtggccagcagttcaatggcaagggaaagaccagacaggccgctaagcatgatgccgccgctaaggcgctcagaatcttacagaacgaacccctccccgagagattggaggtcaatggtagggagtcagaggaagagaatctaaataaatctgaaatatcccaggtgtttgagatcgcactgaagcgaaacctgcccgtgaacttcgagagctttccactcaaacaggtagccagagaatctggcccaccgcatatgaagaactttgtaacgaaagtgagtgtgggagaattcgtgggtgaaggtgagggtaaatcaaagaagatctctaaaaagaacgcagcaattgccgtcctcgaggaactgaaaaaattgccgccactcccggctgttgaacgggtgaagccaagaattaagaaaaaaaccaaaccaattgtgaagccacagaccagtcccgagtatggccagggaatcaaccctattagccgtctcgcccagatccagcaggcgaaaaaggagaaagagcctgagtacactctgctgacagagcggggactaccccggaggagagaattcgttatgcaggtgaaagtgggaaaccataccgctgaaggaacaggtactaacaaaaaagtagctaagaggaacgctgcagagaacatgttggagattctcggcttcaaagttccccaggcacagccgaccaaaccagccttgaagagcgaagagaagactcccattaaaaaaccaggcgatggccggaaggtaacatttttcgaacccggctccggcgatgaaaacggaacctctaacaaggaagacgaatttagaatgccttacctttcgcaccagcagctgcctgccggtatcctgccaatggtacctgaggtggcccaggccgtgggagtgagccaggggcaccacactaaggacttcaccagggcagcacctaaccccgcgaaggcaaccgtgacggctatgatcgcccgggagcttctgtacggagggacttccccaacagctgagacaatactaaagaacaacatctcctctgggcatgtccctcacggacccctgacccgacctagcgagcagctggactatcttagtagagtccagggattccaagtggagtataaagacttcccaaaaaataacaagaatgagttcgtgagcttgatcaattgttcatcacagcctccccttataagccacgggattgggaaagacgttgagagttgtcacgacatggctgccttaaatatcctgaaactactttctgaactggaccagcagagcactgaaatgccaagaaccggcaatggaccaatgtctgtttgcgggcgttgttag

SEQ ID NO: 24354 - DNA, 654 bp, synthetic construct
  source 1..654: mol_type = other DNA; note = Synthetic coding sequence
atggccgagggcagccagagcgcccccgaggccggcaacgacatgggtaatgacgacgcaattggcggtaatgtctccaagtatatcgttctgcctaccggctactgtgggcaacccaaaaagggtcacttgatttttgatgcttgttttgagtctggaaacttggggagggtcgaccaggtcagtgagttcgagtatgacctgtttatccgcccggacacctgtaaccctcggtttcgggtttggttcaattttacagtcgaaaacgtcaaggagagccagcgggtgattttcaacatagtcaattttagtaaaaccaagtctctgtatagagatggcatggcccctatggtaaaatctaccagtaggcccaagtggcagagactcccgccaaaaaatgtctactattataggtgcccggaccacaggaagaattacgtaatgtcattcgctttttgcttcgaccgcgaagaggatatctaccagttcgcatactgctatccctacacatacacccggttccaacattacttagatagcctccaaaaacgcaatatggactactttttccgggaacaattggggcagtccgttcagcagcggaaacttgatctacttaccataacttcccccgctggtcggtggagctggtag

SEQ ID NO: 24355 - DNA, 963 bp, synthetic construct
  source 1..963: mol_type = other DNA; note = Synthetic coding sequence
atggccgagggcagccagagcgcccccgaggccggcaacgacatgggcaacgatgatgcaattggggggaatgtgagtaagtatatcgtcttacccacaggctattgtggtcaaccaaagaagggccacctgatctttgatgcctgctttgagagcggaaatctgggtagggtcgatcaggtgagcgagttcgagtatgacctattcattagacctgatacatgtaacccacggttccgcgtgtggttcaattttaccgtagaaaatgtcaaggagtcacaacgggtgatcttcaatatcgtcaacttcagcaagaccaagagtttgtacagggacggtatggccccgatggtcaagagcacgagccgtcctaagtggcaaagattgccccctaaaaatgtgtattattatcgatgccctgatcacagaaagaactacgtcatgtcatttgcgttctgcttcgaccgagaagaagacatatatcagttcgcatactgctacccttacacctacactcgcttccagcattatctggattctctacagaaacgcaatatggactacttctttagagagcagttaggtcagtctgtgcaacaacgcaaattggatctcctgactattacatcgcctgataatctgagggaaggcgctgaacagaaagttgttttcatcacgggccgggtccaccccggtgagactcccagtagtttcgtttgtcagggcatcattgacttcctcgtaagtcagcatcctatcgcctgtgtgttgcgtgaatatcttgttttcaagatcgccccgatgcttaatcccgatggcgtttatctgggcaactaccgatgttcattaatgggtttcgatttaaataggcactggctggatccttccccctgggtccatcctactctgcacggcgtcaagcagctcatcgtgcagatgtataatgaccccgtgtcaaactag

SEQ ID NO: 24356 - DNA, 1512 bp, synthetic construct
  source 1..1512: mol_type = other DNA; note = Synthetic coding sequence
atggccgagggcagccagagcgcccccgaggccggcaacgacatggggaatgacgatgccatcggcgggaacgtgagcaagtatatcgtgctgcctacgggctattgcggtcagcctaaaaaaggtcacctcatctttgacgcttgtttcgaatccggaaacctgggtcgggtggaccaggtgtcagagttcgagtacgatttattcatcaggcctgatacatgtaatccccgcttcagagtgtggtttaatttcactgtggagaatgtgaaggagtctcagagggttattttcaacatcgtcaacttttcaaagaccaagtccctatatagggacgggatggcaccgatggtcaagtctacctcaaggccaaaatggcagagactcccaccaaaaaacgtgtattattataggtgtccagatcacaggaaaaactatgtgatgtcctttgcattttgcttcgacagggaggaggatatctatcagtttgcttattgctacccgtacacctacacccgttttcagcactacctggacagcttacagaagaggaacatggactactttttccgggagcagctgggtcagtccgtgcagcagcggaagctggatctgctcactatcacgagtcccgacaatctgcgcgaaggagctgagcagaaagttgtgtttatcaccggaagagtccatcccggggaaacaccttcttcctttgtgtgccaggggattatcgactttctcgtgtcccaacaccccattgcatgcgtgctgagggaatacctcgtgtttaaaatagcacctatgctcaatccggacggggtgtatctggggaactatcgatgtagtctgatggggttcgacttaaaccgacactggctggatcctagcccttgggtgcatcccacactgcatggggttaagcagctcattgtccaaatgtacaatgatcccaaaacatcccttgagttctatatcgatatccatgcgcatagcacgatgatgaatgggttcatgtatggcaacatattcgaggacgaggagcggttccaacgtcaggctatattccccaaactgctttgtcagaatgctgaagatttttcatacagctccacctctttcaatagagatgcagtgaaggcgggcaccggccgacggtttttggggggactgctagatcacacctcatactgttatacccttgaggtgagcttttattcctatattattagcggcaccactgcagcagtaccttacacggaggaggcatacatgaagctcgggcggaacgtggccagaacctttctggactactacaggttgaacccggtcgttgagaaggtggctattcccatgcccagactgagaaataaggagatcgaagttcagaggagaaaagaaaagagccctccgtacaaacatccgctcctcagaggcccggcaagtaattatcctaattccaagggagacaagaaaagctccgttaaccacaaagaccccagcactccgttttag

SEQ ID NO: 24357 - DNA, 1734 bp, synthetic construct
  source 1..1734: mol_type = other DNA; note = Synthetic coding sequence
atgagccaggtgcaggtgcaggtgcagaaccccagcgccgccctgagcggatcccaaatcttaaacaagaaccaaagcttgctttcccaacccctgatgtcgataccatctacgacttcctcgctcccaagtgagaatgctgggaggcctatccagaattcagctttgccttctgcttccatcacgagtacttctgccgccgccgagtccattactccaactgtggagctcaatgccctgtgcatgaagttgggtaaaaaaccaatgtataagccagtggatccatattcgcggatgcagtcgacatataactacaacatgcggggcggagcctatccccccaggtacttctaccccttcccagttcctcctctgttgtatcaagtggaactgagcgtgggaggacagcagttcaacggaaaggggaaaacccggcaggctgccaaacacgatgctgccgctaaggccctgagaatcttgcagaatgaacccctaccagaacgactggaggtcaacgggagagagagcgaagaagagaacctgaataaatcggaaatcagccaggtgttcgagatcgccctaaagcgaaacctccccgtcaacttcgaagttgctagagaatccgggccaccacatatgaagaattttgtcactaaggtgtctgtaggagaattcgttggagaaggagaagggaagtcgaaaaaaatcagtaagaagaatgcggctattgccgtgctggaggaactgaagaagttacctcccttgcccgcagtcgaaagagtgaagcctaggatcaagaagaagactaagcctatcgttaaaccccagacctcacccgaatatggccaggggataaaccctataagcagacttgcacaaatccagcaagcgaagaaggagaaggagccggaatacacattattgaccgagcgtggccttccgaggcgcagagagttcgtaatgcaggtgaaagtggggaaccataccgctgaagggacgggcaccaacaaaaaagtagcgaagcggaatgcagctgaaaacatgctggagatactaggctttaaggtgccccaggctcagcccaccaagcctgcccttaaatccgaggaaaagactccaattaaaaagcctggcgatggacgcaaggtcactttttttgagccaggatcaggagacgaaaatggtacaagtaataaagaggacgaattccgtatgccctacctgtcccaccaacaactccccgccggcattttgcctatggtccctgaggtggcccaggctgtgggcgtgagccaggggcatcacacgaaggatttcactcgcgctgctccaaaccccgcaaaggcaacagttacagcaatgattgctcgggagctcctctatggggggacctctcctaccgccgagactatcctgaagaacaatatttcctccggccatgtgcctcatggcccattaacaaggccctctgaacagcttgactacttaagccgtgtgcagggctttcaagtcgagtacaaagactttcccaagaataataagaatgagttcgtgagcttaattaactgttcttcccaaccacctctaatcagccacggaataggtaaagatgttgagagctgtcacgatatggccgccctgaatatcctaaagctgctgagtgagctggaccagcagtcgacggagatgcctcggacaggaaatgggcccatgagcgtctgcggtcgctgctag

SEQ ID NO: 24358 - DNA, 852 bp, synthetic construct
  source 1..852: mol_type = other DNA; note = Synthetic coding sequence
atgagcggcgccgtgctgctggagcgggagcggctgaccagcggcacgacttggcacaccgctggattactttggcagctgcggccatcagatgtggaggtggagctccttgctcacacacggagggtagtgagccgggagcttgaggaagaaaccggtctgcacactggatggatccagaacggggggttatttatagcatccaatcggcagcgcttggacgaatacaagaggctcatgtccctgggcaaagcctacggggtggagtcccacgtactaagtcccgccgaaacgaagaccctgtacccactgatgaacgttgatgatctgtatggtaccctgtacgtgccccatgacggcactatggatcccgctggcacctgtaccacactggcaagggccgcgtccgcaagaggggctcaggttatcgagaattgccctgtgacaggcatccgcgtgtggacagacgattttggcgtgcgccgagtcgcaggggtcgaaacgcaacatggatcgattcagactccttgcgtcgtgaactgcgctggagtgtgggccagcgctgtaggtcggatggccggagttaaggtgccattggtcgctatgcaccacgcatacgtggtgactgaaaggatcgagggcatccagaacatgcctaatgtacgtgatcacgacgcttccgtgtacttacggctgcaaggcgatgcgttgagtgttgggggctacgaggcaaaccccatattctgggaggaggctgtgaagtatcggccccgcgcagccggcggcttatgcctgaaaacctccaccgaaaaagtttgcgccgtatggtctgatgatctaaggcgagcttag

SEQ ID NO: 24359 - DNA, 1107 bp, synthetic construct
  source 1..1107: mol_type = other DNA; note = Synthetic coding sequence
atgagctacttcggcaagttctacctggtgggcctggacgcccggaaagcggccgactggctgttcagcgctgatgtatctcgcccgccaggttccacagtgtacacttgcatgctgaatcaccggggcggtacggagtcagatctcactgtctcacgacttgctcccagtcaccaagcctcgcccctcgcccccgccttcgaaggggatggttattacctggccatgggcggcgccgttgctcagcataattggagccacattacaaccgtgctgcaagatcagaaaagtcagtgtcagctgatagatagttccgaggatctgggaatgatctccatacagggcccagcaagccgagcaatcctgcaggaagtcctggacgcggacctgagcaacgaggcctttcccttttcaacccacaaacttctgcgggccgctgggcatctggtccgggcaatgcggctgagttttgtcggagagttaggctgggagctgcacatcccaaaggcttcatgcgtgcccgtctatcgagcagtcatggctgcgggcgctaaacatgggcttatcaatgcaggctatcgcgccattgactctttaagcatcgagaagggctacaggcactggcatgctgacttgcggcctgacgactccccactggaggcgggactggcattcacctgtaagctaaaatcgcccgtgccatttttggggagggaggcactcgagcagcagcgagcggccggcttaaggaggcggttggtgtgttttacaatggaagagcctctgtggacccgcccacatccagctgtaagtggcgcccctgcattcagtaccgcgtcttctagtaaggttccgatgttcggcctcgaagctatatggaggaatgggcaggtggtgggacatgtacggcgcgctgatttcggatttgctattgacaaaaccattgcgtacggatatatccacgaccccagtggcgggccagtgtctttggattttgtcaagtcgggggattacgcccttgaacggatgggagttacctacggcgcacaggcccacctcaaaagcccattcgatcccaataataagagagtgaagggaatctattag

SEQ ID NO: 24360 - DNA, 2757 bp, synthetic construct
  source 1..2757: mol_type = other DNA; note = Synthetic coding sequence
atggccagcctgagccgggccctgcgggtggccgccgcccacccccgtcagagtccgaccagaggaatgggcccgtgcaacctttcctcagctgctggccccaccgccgaaaagagtgtaccctatcagaggactctgaaggaagggcagggaacctccgtagtggcccaaggtccatcacggccattaccttctaccgccaacgtggttgtgattggtggcggatccctgggatgtcagactttataccatctcgccaaattggggatgtcaggagccgtcctgctagagcgagaaaggctgacctcgggaaccacctggcatacggccggcctattatggcagctgcgacccagtgatgtggaggtcgaactgttggcgcataccaggcgcgtggtgtcacgcgagctggaagaggagacggggctgcataccggatggatacagaacggggggctgttcatcgcttccaataggcaacgcctggacgaatataagaggctgatgtccctgggtaaggcctatggagtggaaagtcatgtactatcaccagccgaaacgaagactctgtatccactgatgaacgttgatgatctttatggtacactgtatgttcctcatgatggtacaatggaccccgctggcacctgtaccacgttagcgagagcagcctccgccagaggtgctcaggtcatcgagaattgtcccgttacaggcatccgcgtctggaccgatgacttcggcgtgcgccgagtggctggagtggaaacccagcacggctcaattcagacaccttgtgtggtgaattgcgccggcgtgtgggcgagtgcagttgggagaatggcaggtgtgaaagtgcctctggtggctatgcaccacgcctacgtcgtgacagaacgcatcgagggtatccagaatatgccaaacgtgcgagatcatgacgcttcggtgtatctacgcctccaaggagatgcactgtccgttggcggatacgaggcaaacccaatcttttgggaggaagtgtccgataaattcgcttttggcctattcgacctagattgggaggtcttcacgcaacacatcgagggtgctatcaaccgggtacccgtcctggaaaagacaggcataaagtcaaccgtgtgcggtcccgagtctttcacccccgaccacaagcccttaatgggtgaagcgccagagctgagaggattctttctcgggtgtggatttaatagcgccggcatgatgctcgggggcgggtgtgggcaggagttggctcactggatcatacatggtcgccctgaaaaggacatgcacggctatgatatcaggaggtttcaccattcactgaccgaccacccaaggtggatccgggagcgaagccacgagtcttatgctaagaactacagtgtggtgtttccacacgacgagccccttgctggaagaaatatgcggcgggacccactccacgaagagctcctggggcagggctgtgtgttccaagagcgccacggatgggaacgaccagggtggttccacccacgcggacctgcacctgtgctggagtatgattactacggcgcctacggtagcagagctcacgaggactatgcctatcggcgtctgctggcagatgaatacacatttgccttcccaccacaccatgataccattaagaaggagtgtttggcctgtaggggcgcggcggctgttttcgatatgtcttactttgggaagttttatctcgtcggactggacgcccggaaggccgcggattggctgttttcagcggatgtcagtcgcccccccggaagtaccgtatatacatgcatgctaaaccacaggggcgggaccgagagcgatttgacagtttctagactggctccgagccaccaggcttccccactcgccccagcctttgagggagatggctattaccttgccatgggcggcgcagtggcacagcataactggtcgcacatcaccactgtgctccaggaccagaaatctcaatgccaacttattgactcatccgaggacttggggatgatctcaatccagggtcccgcttccagagccattttgcaggaggttttagatgctgatctgagtaacgaggcctttcccttctcaactcacaagcttctgcgggctgccggccatctggtacgggcaatgcggttatcgttcgtcggggagttgggatgggaactacatattcccaaggcctcttgcgtgcccgtgtaccgagctgtcatggcagcaggcgccaagcacggccttatcaacgctgggtacagggccatcgacagtctttccatcgagaaaggctacaggcactggcatgcagacctgcggcccgatgattctcccttggaagctggcctcgcattcacttgcaagctcaaatctcctgtccccttcttgggtcgggaggctctcgaacagcagagggcagccggcctgcggagacggttggtgtgttttactatggaagacaaggtccccatgttcgggctggaggccatctggcgcaacggccaggtggtcggccacgtccgccgagccgattttgggttcgcaattgacaaaacaattgcttatggctacattcacgacccctccggaggtccagtcagcctcgattttgttaaatccggagactacgcccttgagcgaatgggggtgacctatggcgcacaggctcatctcaaaagccccttcgatcccaacaacaagagggttaagggcatatattag

SEQ ID NO: 24361 - DNA, 720 bp, synthetic construct
  source 1..720: mol_type = other DNA; note = Synthetic coding sequence
atggagggcaccgtggagagccagacccccgacctgcgggacgtggagggtaaggttggccgcaagacccctgaaggcctcctgcggggcctgcgtggggagtgtgaacttggaacctctggcgccctcctcctgcccggcgcaagctccacaggtcacgatctgggtgacaagattatggcactcaagatggagttggcttacctgagggctattgatgttaagatcctccagcaactggtgaccttgaacgaggggattgaagcggtacgttggctcttggaagaaaggggaaccctaacatcacattgctcgtctctgacaagctcacaatactccctgacgggtggttcacctgggaggagtaggagaggaagctgggacagtctcccggatacgagcactaccgaccgactcgacagcgtctccataggctcatttctggataccgtggctccctctgaactggatgaacaggggcccccaggagcaccccggtcggaaatggattgggcaaaggtgatagccggtggtgaacgagccaggacagaggtcgacgttgctgccacccggctcggatctctgcgcgctgtgtggaagcctcccggcgagcgactgcagggagggccacccgagtctccagaagacgagtccgctaaactggggtttgaagcccattggttttgggaacagtgccaggatgacgtgacctttctgtag

SEQ ID NO: 24362 - DNA, 294 bp, synthetic construct
  source 1..294: mol_type = other DNA; note = Synthetic coding sequence
atgagcagcggcaacgccaagatcggccaccccgcccccaacttcaaggccacagctgatgaaggtatttccttccgggggctgttcatcatcgatgacaaaggaatattaaggcagatcaccgtgaacgacctccctgttgggcggagtgtcgacgaaactctgagactggtccaggccttccagtttactgacaagcatggagaggtgtgtccagcagggtggaaaccgggttctgatacaatcaaaccagacgtgcagaagtctaaggaatactttagtaagcagaagtag

SEQ ID NO: 24363 - DNA, 1668 bp, synthetic construct
  source 1..1668: mol_type = other DNA; note = Synthetic coding sequence
atggaccggagcaagcggaacagcatcgccggcttccccccccgggtggaaagattggaggaatttgaaggagggggagggggagaaggcaatgtgagccaggtaggccgggtctggcctagtagctatcgcgccctgatcagcgctttcagtcggctcactcggctagacgactttacctgcgagaaaattggttccgggttcttcagcgaggtattcaaagtaaggcatcgggcgtccgggcaggttatggccctgaagatgaacaccttatccagtaatcgcgcaaacatgctcaaagaggtccagcttatgaaccgcctcagccacccaaacatactgcgttacattaactccggtaatttggaacaactgttagactcaaacctgcacctcccttggactgtccgcgtcaagttggcctacgatatagccgtcggcctgtcctatctccacttcaaggggattttccaccgtgatctgactagtaaaaactgtctgattaagagggatgaaaacggctacagcgccgttgtggcagattttggactggccgagaaaatccctgatgtctcgatgggttcagaaaaacttgcagtcgttggatcccccttttggatggcccctgaggttctgagggacgaaccttacaacgaaaaagcagacgtcttttcatacggcatcatcctgtgcgagatcatagctcgcatccaagctgaccctgactacctgccgcgaactgagaactttggtctggactatgacgcctttcagcatatggtaggggactgtccaccggactttctgcaactgacatttaattgctgtaatatggatcccaagctgcgcccctccttcgtggagatcggcaaaaccctggaggaaattctgagccgtcttcaggaggaagagcaggagagagatcggaaactgcaacccaccgcaagaggactgctggagaaggctcccggggtaaaacgccttagcagcctagatgataaaatcccacataaaagtccttgcccacgccgaacaatctggctctctagatcacagagcgacatcttctctaggaaaccacctcggacagtgtccgtattagacccttactacagacccagggatggtgccgccagaacccctaaggtaaaccctttctctgcaaggcaggacctgatgggcggcaaaattaagttctttgacttaccctctaagtctgtcattagtctggtctttgacctggatgcccctgggcctggcacgatgcccctggcggattggcaggaaccactcgccccaccaatccgaaggtggcggtcactaccaggatcacctgaattcttgcaccaggaagcgtgtcccttcgtgggccgtgaagagtctttgagtgacggccccccacctaggctaagcagcctaaaatatcgggtcaaggaaattccaccttttagagcgtcagcgcttccagccgctcaagcacacgaggccatggattgctctatcctacaagaggagaatgggtttggctcacggccacagggtacgagcccgtgccctgcgggggcctcagaggaaatggaagttgaggagaggccagccggatctacccccgctacatttagtacgagtggcattgggctgcagacacaggggaagcaagacgggtag

SEQ ID NO: 24364 - DNA, 1629 bp, synthetic construct
  source 1..1629: mol_type = other DNA; note = Synthetic coding sequence
atggaccggagcaagcggaacagcatcgccggcttccccccccgggttgagcggctggaagagttcgaggggggcggagggggtgaagggaacgttagccaggtaggccgtgtgtggccaagttcctacagagcactgattagcgccttctcgcggcttacaaggctcgatgatttcacttgtgaaaagataggttccggcttcttcagtgaagtgttcaaggttagacatagagcgagcggacaggtgatggccctgaagatgaatactctgtccagtaaccgagctaacatgctcaaggaggtgcaactcatgaaccggctgagccacccaaacatcctccgcttcatgggtgtatgtgtgcaccagggtcagctgcacgctctgactgaatatatcaattctgggaatctcgagcagctgctagactcaaatctgcacttgccctggaccgtgcgtgtgaaacttgcatacgatatcgccgtcggactcagctacctccattttaagggcatctttcaccgagacctcacgtccaaaaactgtctgatcaagagggacgaaaatggctattcagccgtggtcgcagacttcggtctggctgagaagattcctgatgtgtccatggggtccgagaagcttgccgttgtggggtcccccttttggatggcaccagaagtgctccgggacgaaccctataatgagaaagcagatgttttttcatacggtatcattctatgcgagatcatcgctcgtatccaggccgatcccgattacctgccaagaacagagatggaccccaaattacgcccttccttcgtcgagatagggaaaacgctcgaagaaatcctgtcaaggctccaggaggaagaacaggagagagaccggaagctgcagcctacagcgaggggcctcctggaaaaggcacccggtgtaaaacggttatcctctctggacgacaaaataccacataagtccccctgtccccggagaacgatctggctttccagaagtcagagcgacatcttctcacggaaacctccgcggacggtttcagtgctcgatccctattaccgcccccgcgacggagcagcccgcacacccaaagtgaatccattcagtgccagacaagacctaatgggggggaagatcaaatttttcgacctgccatcaaagtcagttatttctctcgtgttcgacctggatgcacccggccctggcacaatgcctctagccgactggcaagaacccctggcacctcccatccgaagatggcgctctctacccggtagcccagagttcctccatcaggaagcctgcccattcgtgggtcgggaagagagcctgagtgatggacccccaccacggctgtcaagcctgaaatatcgggtcaaagagatcccgccttttagagcttctgcgctccctgctgctcaagcccacgaggccatggactgctctatcctgcaggaagaaaatggctttgggagccgaccccaggggacctccccttgcccagccggagcgagcgaagagatggaggtggaggagcggcctgcgggctcaacacctgcaacctttagtaccagtgggatcggtctccagacacagggaaaacaggacgggtag

SEQ ID NO: 24365 - DNA, 1716 bp, synthetic construct
  source 1..1716: mol_type = other DNA; note = Synthetic coding sequence
atggaccggagcaagcggaacagcatcgccggcttccccccccgggtagagcgccttgaggagtttgagggtggcggcggcggggaagggaatgtgtcacaagttgggagggtctggccaagctcatatcgggccctgatcagtgcatttagcagactcacacgactggatgactttacatgcgagaaaatcgggagcggttttttttcagaggtgtttaaggtgcggcacagagcctctgggcaggtcatggccctaaagatgaacaccttatccagcaaccgagcaaatatgttgaaggaggtgcaactcatgaaccggctctcacacccaaacatcctaaggttcatgggagtctgcgttcaccaagggcagctccatgccttgacagaatatatcaactcaggtaacctggaacagcttctggactctaaccttcatctgccatggacagtccgcgtaaagctcgcatacgacattgccgtgggcctgtcttatctgcattttaaggggattttccatcgggacctgaccagcaaaaattgcttgattaagagggacgagaacggatacagcgccgtcgtagcagactttggcctcgccgagaaaatccccgatgtttctatgggcagcgaaaagcttgcagtggtgggaagccctttctggatggcccccgaagtgcttcgggacgagccgtacaatgaaaaggccgacgtgttcagctatgggataattttatgtgagatcatcgctaggatccaggcggaccctgattaccttcctaggaccgagaactttggtttggattacgatgcgttccagcacatggtgggagattgtccacccgattttctgcaactgacatttaactgttgtaacatggaccctaagctgcgcccttcgtttgttgagatcggcaaaaccttggaagaaatcctgtcacggcttcaggaagaagagcaagagagggacaggaagctgcagcccacagccaggggactgctagagaaagcccctggcgtgaaaaggctgtcttctttggacgacaagattccccataagtccccgtgcccccgcaggactatatggctctccagaagtcaatccgatatctttagtcgcaaaccgccaaggaccgtgtctgtactcgatccttattacaggcccagggatggcgctgccagaacccctaaggtgaacccctttagcgctcgtcaggacctcatgggtggcaagatcaaattttttgatttaccgtccaagtctgtgatttccctcgtcttcgatcttgatgcaccgggaccaggcacaatgcctttggcagattggcaggaacctttagctcctcccattcggcggtggagatcccttcctgggtcccctgaatttttgcaccaggaagcttgtccctttgttggcagagaagagtccctgtctgatgggccccctcctaggctcagtagcctgaagtaccgtgtaaaggaaatcccaccgtttagagcttcagctctgccggccgcccaggcccatgaggccatggactgttccatactgcaggaggagaatgggttcgggtcccgcccccagggcaccagtccctgtcctgccggcgcttccgaggagatggaggtcgaagaaagacctgccggatccactcctgccactttttccacttccggaatcggcctgcaaacgcaggggaagcaagacggatag

SEQ ID NO: 24366 - DNA, 1416 bp, synthetic construct
  source 1..1416: mol_type = other DNA; note = Synthetic coding sequence
atgctgggcagctggggctgctaccggtacgccaagctgttcagctgcagcctgtctacccacgccaggttcatcaaaatcctggatagcgtactgcaccaccttgtgcctgcttgggaccatacactcgggactttcagcgagatcaagcaggtcaagcagttccttctgcttagtaggcagcgcccaggccttgtggctcaatgtctgcgcgattccgagagctctaagccgtccttcatgcctagattgtacatcaacagacggcttgctatggagcaccgggcttgtccctcaagagacccggcctgtaaaaatgctgtctttacgcaggtgtacgaggggttgaagccgagcgataagtatgagaagccactggattaccgctggccgatgaggtacgaccagtggtgggagtgcaaatttatcgccgaggggatcatagaccaagggggcggatttagagatagtctggctgacatgtcagaggaattgtgtcctagctcagcagataccccagtgcctcttccattcttcgtgaggactgcgaaccagggaaatggcaccggggaagccagagatatgtatgtacctaacccatcttgcagagactttgcaaaatatgagtggatcgggcagctgatgggtgcagccttacgtggaaaagaatttctcgtcctggcgctgcccgggtttgtgtggaagcagcttagcggtgaggaggttagttggagcaaagatttccctgccgttgactccgttctggttaagctgctcgaagtgatggaaggcatggataaggagacatttgaatttaagtttggcaaggaactgacttttacaacagtcctgtccgatcagcaggtcgtggaactgattcctggaggagccgggatcgttgtgggctacggagaccgcagccggtttatacagttggtccagaaggccaggctggaggagtctaaggaacaggtggcggcaatgcaggccgggttgctcaaagttgtgcctcaggctgtgttggaccttctgacctggcaggaacttgaaaaaaaggtctgtggggatcccgaggtaacagttgacgcactgaggaagctaacccggttcgaggacttcgagccttcggattcccgggtccagtatttctgggaggccctgaataacttcacaaacgaggacaggtcaaggttcctccggtttgtcacaggacgctccagattgcccgcccggatttacatctatcccgataagcttgggtatgaaacgactgatgccctcccggagagcagtacttgtagttcaacgctgtttttaccacactacgcgtctgcaaaggtatgcgaggagaagcttcggtacgcggcctacaattgcgtagcaatcgacacagatatgagcccttgggaggaatag

SEQ ID NO: 24367 - DNA, 825 bp, synthetic construct
  source 1..825: mol_type = other DNA; note = Synthetic coding sequence
atggccgcccccgaggccgaggtgctgagcagcgccgccgtgcccgaccttgaatggtatgaaaagtccgaagaaacccacgcatcgcagattgaactcttggagacaagctccacacaggaaccgctcaatgcctcagaggcattctgccctcgtgattgtatggtgccggttgtattccccgggcctgtgagccaggagggatgttgccaattcacttgcgaactgctaaaacacattatgtaccagcgacagcaactgcccctgccttacgaacagctgaagcatttttaccgtaagccaagtccccaggcagaggaaatgctgaagaaaaagccacgcgcaactacagaggtgagctcaaggaaatgccagcaggcgcttgcagaactcgaaagcgtgttaagccatttggaggatttcttcgctcgcacactggtgcccagagtgttgattctcctgggtggtaatgcgctgtcaccgaaggaattttatgaactggacttgtcactgttggcaccatattccgtggaccagtcactgtctaccgcggcatgtttacggcggctgtttagagcaatcttcatggcggatgcattctcagaattgcaggcacctcccctgatgggaacagtggtgatggcccagggccacaggaactgcggcgaggactggtttcggcccaagctaaactatagggtcccctcgagaggccataagctgacagtcactttatcctgcggtcgcccctctatccggactaccgcctgggaggattacatctggttccaggcacctgttaccttcaagggatttcgggagtag

SEQ ID NO: 24368 - DNA, 2586 bp, synthetic construct
  source 1..2586: mol_type = other DNA; note = Synthetic coding sequence
atggccggccccggccccggcgccgtgctggagagcccccggcagctgttgggtcgggtgcgcttcctggccgaggcagcacggtctctgcgcgcaggccgacctttacctgctgcgcttgcttttgtgccccgcgaggttctatataagctctataaagatcctgcgggcccctctcgcgtgctccttcctgtgtgggaagctgagggcctagggctgcgagtcggggctgccggacccgcaccaggtacaggcagcggcccactccgcgctgcgcgggattccatcgaactcagaagaggcgcttgcgttcggacaaccggcgaagagctgtgcaatggtcacggattatgggtaaaattgaccaaggagcagctggccgagcacctaggcgattgtggactacaggaagggtggttactggtgtgccggccggccgaaggcggagccaggctcgtgccaattgatactccaaaccatttgcagaggcaacagcagcttttcggcgtggattatcgtcctgtccttaggtgggaacaggtggtcgacttgacatactcgcatcgcttgggctctagaccccagccggcagaggcctatgccgaagctgtacaaagactcctatacgtacctcctacatggacctatgagtgcgacgaagacctgatccatttcttatacgatcacttgggtaaagaggatgagaatttaggctcagttaagcagtacgtggagtccattgatgtctcttcctataccgaggaatttaatgtgagttgtctgaccgattctaatgcggacacatactgggaatctgatggttcccaatgccaacattgggtgcgattaacgatgaagaaaggcacaattgtgaaaaagctgctccttacagtggacaccactgacgacaatttcatgccaaaaagagtggtcgtatacggtggcgaaggagataaccttaagaaactctccgacgtgtctattgatgagaccctgataggtgatgtttgcgtgctggaagacatgacagttcatctgcctatcattgaaattagaatcgttgaatgtcgcgacgatggcattgacgtacggttgaggggtgttaagatcaaatctagcaggcagagggaactgggcctgaacgcagacctgtttcaacctactagcctggttcggtacccaaggctggagggcacagaccctgaagtgctctaccggcgagctgtcttgctgcaacggttcatcaaaatcttggatagcgttctgcatcacctcgttccagcttgggatcataccttggggaccttcagtgaaataaagcaggtcaagcagttccttctgctaagtcgtcaacgtcctggactcgtagcccagtgcctcagggatagcgagtcctccaaaccctccttcatgcctcgcctgtatatcaatcggcgcctggctatggagcatcgggcttgtccaagccgtgatccggcctgcaagaacgcagtgttcacacaagtgtacgaaggtcttaaaccaagcgacaagtacgagaagcccctcgactatcggtggccaatgcgctacgatcagtggtgggagtgtaagttcattgcggaaggaataatcgaccagggcggaggctttcgcgattctctcgccgatatgtctgaagagctttgtcctagcagcgccgacacaccagtcccccttccattctttgtgcggacagcaaatcagggtaacgggaccggagaggcccgcgatatgtatgtcccaaacccttcgtgccgcgactttgccaaatatgagtggatcggacagctgatgggcgctgctctgcgcgggaaggagtttctggtgcttgccttgcccggcttcgtctggaagcagttgagtggtgaagaggtatcctggtccaaagactttcccgccgttgattcagtcctggttaagctgcttgaggtgatggagggaatggacaaagaaacctttgagttcaagttcggcaaagagctgacctttaccaccgtgctcagtgatcagcaagtggttgaacttatacctggcggtgctgggatcgtagtcgggtatggcgaccgaagtcgcttcatccaactcgtgcagaaagcacgcctggaagagagtaaagagcaagtagctgctatgcaggcggggctgctgaaagtcgtcccacaggcggttctggacctcctcacatggcaagaactcgaaaaaaaggtgtgtggcgatccagaggtcactgtcgatgctctgcgcaagctgaccagattcgaggatttcgagccctctgacagtagggttcagtacttctgggaggccttgaataatttcaccaatgaagaccgtagccgtttcctgcggttcgtgactggcaggagcagactgccggctaggatctacatctaccccgataagcttgggtacgagactaccgatgcattgcccgagtctagtacttgctcttcaaccctgtttctgcctcactacgcatccgccaaggtgtgcgaagagaaactccgctatgcggcctacaattgcgtcgctatcgacactgatatgagtccatgggaggaatag

SEQ ID NO: 24369 - DNA, 1197 bp, synthetic construct
  source 1..1197: mol_type = other DNA; note = Synthetic coding sequence
atggagagcgtgctgagcaagtacgaggaccagatcaccatcttcactgattatcttgaagagtatccggatacagatgagcttgtgtggatcctgggcaagcagcacctgctgaaaaccgagaaaagcaagctgctctccgacataagtgcccgcctgtggttcacataccgcaggaaattctccccaatcggagggacaggccccagcagcgacgccggttggggatgtatgttgcgctgtggtcaaatgatgctggcccaagccttgatatgtcgacatctgggacgagattggtcctgggaaaaacagaaagagcaacccaaggagtatcagcgtattctgcaatgtttcctggatcgcaaggactgctgctatagtatccatcaaatggctcagatgggagtgggcgaaggaaagtcgatcggtgaatggttcggtcctaacaccgtcgcgcaggtcctgaagaagctggccctcttcgacgagtggaactcattggccgtgtatgtgtccatggacaacacggtggtgattgaggacatcaagaagatgtgccgagtgctccccctctctgcggatactgcgggcgatagacctccggatagcctaaccgcctccaatcagagcaagggaacatcagcctactgtagtgcatggaagccccttttgctgatcgtccccctgaggctcgggatcaatcagatcaacccagtctatgtagacgcctttaaggaatgctttaaaatgcctcagtccctgggagctttgggcgggaagccgaacaatgcctactatttcattggattcctgggtgatgaactgatcttcttggacccccacacaacacagaccttcgtcgacaccgaggagaacggcactgtgaatgaccaaacttttcactgtctccagtctccacagagaatgaatatccttaacctcgatccttctgtcgcgttgggcttcttctgtaaggaggagaaagacttcgataactggtgttctcttgtgcagaaagaaattctaaaagagaacctgagaatgtttgaactcgtccagaagcatcccagccattggcctccatttgttccaccggctaagcctgaagtgaccaccacaggcgcggagttcatcgacagcactgaacagttggaagagttcgatcttgaagaagacttcgaaatattgtctgtgtag

SEQ ID NO: 24370 - DNA, 1701 bp, synthetic construct
  source 1..1701: mol_type = other DNA; note = Synthetic coding sequence
atggacctgcaccgggccgccttcaagatggagaacagcagctacctcccaaatcctttggcatcccccgctttgatggttctggcttcgactgcggaggcttccagggatgcgagcattccttgtcaacagccacggcctttcggagtcccagtgtctgtagataaagatgtccacattccctttacaaatgggagctatacttttgcctccatgtaccacagacagggaggcgtcccgggaacctttgccaacagagatttcccaccaagtcttctccatctgcacccacagttcgccccaccaaatctggactgcacaccaatctctatgctgaaccatagcggcgtgggggccttccgcccattcgcgagcaccgaagatagagagtcttaccagtctgctttcactcctgcaaagagattgaagaattgtcacgacacagagagccctcatcttcgattttcggatgccgacggaaaagaatatgacttcggaacccaactgccatcgagcagccccggatctctcaaagtagacgatacaggcaagaagatctttgcagttagcggtctgatttctgatagagaagcctcatcttcaccagaggatagaaatgacaggtgcaagaaaaaagcagctgcgctgtttgatagccaggcgccaatttgtcctatttgtcaggtgctgctgaggccctcagaacttcaggagcacatggagcaggagcttgagcagctggcacaactcccttccagtaagaactcactcctgaaagacgcgatggcaccaggaactccaaagagtctgctgctgagcgcttccattaagcgtgagggtgaatcaccaacagcttcccctcatagctccgcaactgatgaccttcaccatagcgaccggtatcaaacttttttgagagtcagagccaatcgccagacacggctaaacgccaggatcggcaagatgaaacggaggaagcaggacgaagggcagcgggaagggtcatgtatggccgaggatgacgccgtggatatcgagcacgagaacaataatcgctttgaggaatacgagtggtgtggccagaagcggatacgagctacaacattgttggagggcggcttcagaggaagtggatttattatgtgttctggcaaagagaaccccgactctgatgcggatttggatgtggacggagatgatacattagaatatggcaagccacaatacaccgaggccgacgtaataccttgtacaggagaggagcccggagaagccaaggagcgggaagccctgcgtggagccgtgcttaacggtggcccgccatctacgcgtattactcccgaatttagtaaatgggcttctgacgagatgccgtcgacttctaacggcgagtcgagtaaacaggaggccatgcagaagacttgtaaaaacagcgacatcgagaagatcacggaagactccgctgtgacaacgtttgaagccctcaaagcgcgggtccgagaactggaacgacagctgagcaggggtgaccggtataagtgcctaatctgcatggattcatattcaatgccactgacctctatccaatgctggcatgtacactgcgaggaatgttggctcagaaccctcggcgccaagaaactttgccctcagtgtaacactattacagcgcctggagatttgcggcggatctacctatag

SEQ ID NO: 24371 - DNA, 930 bp, synthetic construct
  source 1..930: mol_type = other DNA; note = Synthetic coding sequence
atgccccgggcccggagcggccggcggagccggggcgccggcggccgtgaggaaacgttcctgagagtgagagcgaatcggcaaactaggctgaacgcaaggattgggaagatgaaacggaggaagcaggacgaagggcaggtgtgtcctctctgcaaccgcccgctggccggctcagagcaggaaatgtcaagacacgtggagcactgtttgtcaaagagagaaggatcttgtatggccgaagatgacgctgtagacattgagcacgagaacaataaccgtttcgaagagtatgagtggtgcggccagaagcgcattcgtgccaccaccctgctggagggcggcttccgtggaagtggctttatcatgtgtagcgggaaagagaatccagactctgatgcggatctggacgtcgatggcgacgatacgctcgagtatgggaagcctcagtatacggaagcagacgtgattccttgtacgggcgaggaaccaggcgaagccaaggagagagaagctctccgcggcgctgtattgaacggggggcctccaagtacacgtatcacccccgagttcagcaagtgggcctctgatgcagaaatgcctagtactagcaatggggaaagcagcaagcaggaggcgatgcagaagacgtgcaagaactccgatatcgaaaagattacagaggactctgccgtgaccacatttgaagctctgaaggcccgcgtgcgagagctggagcgccagttatcccgtggtgacagatataagtgcctcatttgtatggactcttactccatgccactcacaagcatccagtgctggcacgtgcactgtgaggagtgctggctgagaacactgggggccaagaaattgtgtccccagtgcaacactatcactgctcccggagacctgagaaggatatatctttag

SEQ ID NO: 24372 - DNA, 1125 bp, synthetic construct
  source 1..1125: mol_type = other DNA; note = Synthetic coding sequence
atggagagcgtgctgagcaagtacgaggaccagatcaccatcttcactgattacttagaggaataccccgacacggacgagctcgtatggatcctcggcaagcagcacctcctgaagacaggggggaccggcccctctagcgacgcggggtggggctgtatgctgcgatgtggacagatgatgctggctcaagcattaatctgtcggcacctgggtagagattggagctgggaaaagcagaaggaacaacccaaggaataccagcgtatccttcaatgtttcctggacagaaaagactgctgctattccatccatcagatggcacaaatgggagtgggtgaaggcaaatctataggcgagtggtttgggcctaacacagtggcacaggtgctgaagaagctggccctattcgacgagtggaacagtctggccgtctatgtgtctatggataatacagtcgtgatcgaggatattaagaaaatgtgcagggtcctcccactctctgctgatacagcgggcgatcgccccccagacagccttaccgctagcaatcagtctaaaggtaccagcgcttattgttctgcatggaaaccactgcttcttatcgttccgctccgtctgggaattaatcagattaatccagtctacgtcgacgcatttaaagagtgcttcaaaatgcctcagtccctgggagcactcggcggcaaaccaaataacgcatattactttattgggtttttgggggatgaattaattttcttggaccctcatacaacccagacttttgtcgacactgaggaaaacgggactgtaaacgaccagacgtttcattgtcttcagtcaccacagcggatgaacatccttaatctggatccatcagtggcattgggatttttctgtaaggaagagaaggactttgataactggtgctctctagtgcagaaggaaatcctgaaggagaatttacgcatgtttgaactggttcaaaagcacccctcacattggcccccctttgtaccgcccgctaaacctgaggtcaccactaccggggcggaattcatcgacagcaccgaacagttggaagagtttgacctggaggaagactttgagatcctttctgtttag

SEQ ID NO: 24373 - DNA, 558 bp, synthetic construct
  source 1..558: mol_type = other DNA; note = Synthetic coding sequence
atggagggctgcgtgagcaacctgatggtgtgcaacctggcctactcggggaaactggaagaactaaaagagagcatactggccgataaaagcctggccaccagaaccgaccaggattctagaacagctttacactgggcgtgcagtgccggacacacagagatagtcgaatttctgctccagctgggcgtccctgtcaatgacaaggacgacgcggcatccaagaaccgacacgaaatcgccgttatgttgcttgagggtggtgccaaccccgacgccaaagatcactacgaggctactgccatgcatcgagccgctgccaaggggaacctaaaaatgattcatattctcttgtactacaaggcaagcaccaatatacaggacacggaaggcaacactcccctgcacctcgcgtgcgacgaggagcgcgtagaagaggcgaagttactcgtgtcccagggggcatccatttacatcgagaacaaggaggagaagaccccactccaggtggccaaaggaggcctgggcctcatcctcaaacggatggtcgagggctag

SEQ ID NO: 24374 - DNA, 333 bp, synthetic construct
  source 1..333: mol_type = other DNA; note = Synthetic coding sequence
atggagggctgcgtgagcaacctgatggtgtgcaacctggcctactcagggaagctcgaggaactgaaggagagtatcctggcagataaatcccttgctactcgcacagaccaggattcccgcactgcccttcactgggcatgctctgcgggtcacactgagattgttgaatttcttcttcagctgggagtgcccgtcaatgacaaagatgatgcggctagtaaaaacaggcacgagatcgcggtcatgttgcttgaagggggcgccaacccagacgccaaagatcactatgaggccactgccatgcacagagcggcagccaaagatacttag

SEQ ID NO: 24375 - DNA, 546 bp, synthetic construct
  source 1..546: mol_type = other DNA; note = Synthetic coding sequence
atggtgctgggcgccggctggggctgggcctaccagctgcacctgctgcaggctttgaagagaaaaccagacctgttcctgtgtgaacggctagacgttaaggcagtgttccagtgtgccgtcctcgctttgaaattccctgaagcacccactgtgaaagcaagttgtggatttttcacagagctgctaccccgctgcggcgaagtggagagtgttggcaaggtagttcaagaagacggaagaatgttgttgatagcagttcttgaagcaataggcggtcaggccagtcgatccctgatggattgctttgctgatatcttgttcgcattgaataagcactgcttctcgttactgagtatgtggatcaaggaagcactccaacctcctggatttccttcagcccgcctcagtccggaacagaaagacacctttagccagcagatcctgcgggaaagggtgaataaaaggcgcgtgaaggagatggtcaaagagtttacactgctctgccgaggactccacggtaccgactatactgccgattattag

SEQ ID NO: 24376 - DNA, 2892 bp, synthetic construct
  source 1..2892: mol_type = other DNA; note = Synthetic coding sequence
atggagcggcgggaggagcagcccggcgccgccggcgccggcgccgccccagcactggatttcactgtggagaacgtggagaaagcccttcaccagctgtactacgatcctaatattgaaaataaaaacctggcccaaaagtggctcatgcaagctcaggtttcccctcaggcatggcatttttcgtggcaattgctccagcctgataaggtgcctgaaatccagtactttggggcaagcgccctgcacattaaaatctcgaggtattggtcggatataccaactgaccagtatgaatccctgaaagcgcaactttttacccaaatcacacggtttgcaagtggaagcaagatcgttctcacccggctctgtgtggccctggccagccttgcactgagcatgatgcccgatgcctggccttgtgcagtagctgacatggtgcgactgtttcaagccgaagattcccccgtggatggacagggtagatgcctcgcactcctcgagctgctgaccgtcctgccggaggagtttcaaacctcgaggctaccacagtaccgaaaaggcctggtaagaacatccctggctgtcgagtgcggagccgtgttccccctactcgagcaattactgcaacaaccttcctctcccagctgcgtcagacagaaagtgctcaagtgtttttcaagttgggttcagctcgaggtgcctctgcaggactgtgaggcccttattcaagccgctttcgcagcactgcaggatagcgagttattcgattcaagtgtcgaagctattgttaacgcgatcagtcagcctgatgctcagaggtacgtgaatacacttctaaagctcatcccactggtgctgggcctgcaagagcaattgcgtcaggccgttcagaacggggatatggaaactagtcacgggatctgcaggattgcagtggccctgggagagaatcactctcgcgcccttttggatcaggtggaacactggcaaagctttttagcccttgtcaacatgattatgttttgtaccgggatccctgggcactatcctgtgaacgagaccacttcctctttgaccctgaccttctggtacacactccaggacgatatattgtcttttgaagccgagaaacaggcggtgtaccagcaggtttaccggcctgtgtactttcaactcgttgacgtacttctacacaaagctcagttcccctcagacgaagagtatggcttctggtcttcagacgaaaaggaacaatttagaatctaccgggtggatatcagcgatacactcatgtacgtctatgagatgctcggcgccgaactcctcagcaacctatatgacaagctgggcaggctgctcaccagtagcgaggagccttacagctggcagcatacagaagcattactgtacgggtttcagagcattgccgagaccattgacgtgaactattccgatgtggtgcctggcctcatcggcctcatccctcgcataagtatcagtaatgtacagcttgcagatacagtgatgtttactataggagcccttagtgaatggttggctgaccaccctgtgatgatcaactcggtactgcccctggtgctgcacgcactcgggaacccagagctcagcgtgtctagtgtttcaaccctcaagaagatttgcagagagtgcaagtacgatttgccaccttacgccgcgaatatagtcgccgtgagccaggacgtcctgatgaagcagatccacaagacatcccagtgtatgtggttgatgcaagccctaggcttcctactatctgcgctccaagtcgaggaaattcttaaaaaccttcacagtttgattagtccgtatatccagcagctggagaagctcgcggaggaaattcctaacccctcaaacaaattggccatcgtccacatcctcggactgctctcaaatctttttaccacccttgatattagccatcacgaggatgatcatgagggcccagagctgcggaagcttccagtgccccaaggtcctaaccccgtggtggtcgtattgcagcaggtatttcaattgattcagaaagtgttgtccaaatggttgaacgacgcccaggtggtcgaggccgtctgcgccattttcgagaaatcagtcaaaacacttctggatgacttcgctccgatggtcccacagctatgtgaaatgctgggtcggatgtacagcaccatcccacaagcatcggctcttgacctgacgcgacagttagtgcacatctttgcccacgaacccgcgcactttcctcccattgaagccctgttcctgttagtgacttctgtgactctgacactattccaacaggggccacgagatcaccccgacatcgtggacagctttatgcaattgcttgcccaagccttgaaaaggaagcccgatctttttctctgtgaacgccttgacgtcaaggcagtgtttcagtgcgctgtcctggcattgaaatttcctgaagccccaaccgtcaaagctagttgtggtttttttaccgagctgttgccaagatgtggggaagtcgagagcgttggaaaagtggtacaagaagatggacgcatgcttctcattgccgtacttgaagcaattggaggccaggcctcaaggtctctgatggactgcttcgccgatattctgtttgcgttaaacaagcactgttttagccttctatccatgtggattaaggaggctctgcagcctccaggctttccttccgctagactcagccctgaacaaaaagatactttttcccaacagatattgcgggagcgtgtgaacaaaaggagggtcaaggagatggttaaggagttcaccctgctgtgtcgcggtcttcatggaactgactatactgctgattattag

SEQ ID NO: 24377 - DNA, 2907 bp, synthetic construct
  source 1..2907: mol_type = other DNA; note = Synthetic coding sequence
atgcggctgctgcggcacaccgagagcgagcagtggttccaccggtttccgctgtgcccctccctgacgttttgggcccccgtggcaatgtggccccaaacccactgcgtcggcgggcgctccagcgggctcactaaatggacctactctttcagtgcatcactccaggacggatcttttccatatgactcagtgccttggcagcagaataccaaccagcctcccggcagcctttctgttgtcacaacagtgtggggggtcaccaacaccagccaatctcaagctgatgtgctcatcccccacgctacatgtcggcctgggccactgctaatcaccgcatgggagccttacggacagtgccagcagccacacgaaagtagacgacagccccacggagttggacacgaccaccaacagccgcgccctcaattgccgaccgtctgtggagccgcggctgccgttctgtcccagggatggcccaggtccgccctccaccccgcagagcatgtgtggcctgctcagctccctcgccaaagagggctgtgggggcagccagcagctgcggccgcggcggccgccgtcgccgccgcagccgctaccgcaacggcaactgcaactgctactgtggccgctctccaggagacacagaacaaggacatcaatcagtacggacccgcccctgtgctactcccggacctgctcaaagatgggctgggcgatgaggaacggggagcgcccattggtatgcagaactccatgaatccagcctcaatggctgccggcatgacaccttctggcatgtccggccctccgatgggtatgaatcagccccggccaccggggatctctcctttcggaacgcacggccagcgcatgccacaacagacatatcctggcccgagaccccagagcctgccaattcagaatatcaagaggccctaccccggtgagcctaattacggtaaccagcaatacggtccgaacagccagttcccaactcagcccgggcagtaccctgctccaaatcccccacgtcctctgacctcccctaactaccctggtcaacgaatgcctagccagcctagctctgggcagtatcctcctcctacagtgaacatgggacaatattacaaaccggagcaattcaacggccagaataacacattctctggctctagctacagtaattactcccaggggaacgttaatcggcccccaagacctgtgcctgttgcaaattatcctcattccccagtaccgggcaaccccactcctccaatgactccaggttcctctattcccccatacctgtcaccttctcaggacgtgaaaccaccattcccacccgatattaaaccaaatatgagcgcgttgccaccaccgccggatcacaacgacgagttgcgactcacattcccagtgagggatggggtggtacttgaaccatttaggttggaacacaacctggcagtctccaaccacgtgttccacttgcgtcccacggtacatcagaccctgatgtggagcgacctcgagctgcagttcaagtgctatcatcatgaagatcgccagatgaatacaaactggcctgctagtgtgcaggtgtcagttaacgccacgccccttaccatcgagagaggggataacaaaacatcacacaagcctctgcatctgaagcatgtatgtcagccaggaaggaataccattcagatcacagtgacagcttgctgttgttcccacctgtttgtcctgcaactggtgcatcggccctctgtgaggagcgtcctccaggggctgctcaagaagcggctgctgcccgcagagcattgcattacaaagaagcgaaacttttcaagcgtggcagcctcaagcggcaatacaaccctgaatggggaagacggcgtggaacagacagccattaaggtcagcctaaaatgtcctatcacattcaggcggatccagcttcctgccagagggcatgactgcaaacatgtgcagtgctttgacctcgagtcttacctgcagctgaattgtgaaaggggcacgtggcgctgcccagtctgtaagaccgcccttcttgagggccttgaagttgaccagtatatgtgggggatactgaatgccatccatagtgaatttgaagaagtgaccattgaccccacgtgtagctggagaccagtgcccatcaaatcggatctgcacattaaagacgacccggatggcatcccaagtaagcggttcaagaccatgtcgccatcccaaatgataatgccaaacgtaatggaaatgattgcagcgttgggccccggtccatccccttatcctctgccgcctccacctgggggcactaacagcaatgactacagcagccagaataattaccagggccacggtaactttgacttcccacacgggaaccccggtggcacatctatgaacgattttatgcacggacccccacagctttcgcaccctcccgacatgccgaacaacatggctgcattagaaaagccgttgagtcatcccatgcaggagactatgccccacgccgggtcttctgatcaacctcacccttcaatacaacagggtctgcacgtgccccacccttcctctcaatccggaccacctcttcaccattccggagctccacctccgccaccttcacagccacccaggcaaccacctcaggccgcaccaagctcccatccgcattctgatctgaccttcaatccaagtagcgcgcttgaaggacaggccggagcccagggcgcctccgacatgccggagcccagcctggacctgctgcctgagcttaccaacccagacgaacttctaagttacctagacccacccgatctccccagcaacagcaacgacgacctgcttagcttgttcgaaaataactag

SEQ ID NO: 24378 - DNA, 603 bp, synthetic construct
  source 1..603: mol_type = other DNA; note = Synthetic coding sequence
atggccatggagatgcggctgcccgtggcccggaagcccctgagcgaacgtctaggcagagatacgaagaagcacctggtcgtcccgggtgacacaatcacgaccgatactggctttatgaggggccacgggacttacatgggcgaagagaaactcatagctagtgtggctggctctgtggagagagttaataaactcatttgcgtgaaggcccttaagacccggtacatcggcgaggtgggggatattgttgtagggagaataaccgaagtgcaacagaagaggtggaaggtggaaactaattccaggctggattcagtcctcctcctaagctcaatgaacctgcctggcggggagttgagacgtagatccgccgaagatgagctggccatgcgaggattcttgcaggagggagacctcattagcgcagaagttcaggcagtcttcagtgatggtgccgtgagtctgcacacacgcagcctgaagtacggcaagacccatttccacgacttaccgtgcggggcgtcagtcattctcggcaataacggattcatctggatctaccccacacctgagcacaaggaggaagaggcgggaggatag

SEQ ID NO: 24379 - DNA, 792 bp, synthetic construct
  source 1..792: mol_type = other DNA; note = Synthetic coding sequence
atggccatggagatgcggctgcccgtggcccggaagcccctgagcgaacggctcggccgggacaccaagaaacatctcgtggttcccggcgacaccattaccactgataccggcttcatgaggggccatggcacctacatgggcgaggagaaactcatcgcaagcgtggccggctccgtcgaaagggtgaataaattaatctgtgttaaggccttgaaaacacgatacattggtgaggttggggacattgtagtggggcgtattacagaacgacgccgcagtgccgaggacgaacttgctatgaggggatttctgcaagaaggcgacctaatttccgcagaagtgcaggccgttttctctgacggcgcagtgtcgctccacacacggtctcttaaatacggcaagctgggccaaggggtgctggtacaagttagtccctccctggtgaagagacagaaaacccatttccacgatttgccttgtggagcatcagtgattcttgggaataatggctttatatggatctacccaacacccgaacacaaggaggaggaagctggagggtttattgctaatctcgaacccgtatcattagccgatcgagaggtgatctctcgattgaggaactgcattatctctctggtcacgcagcggatgatgttgtacgacacgtcaatcttgtattgctacgaggctagtttgccccatcagatcaaagatatcctgaagccagagataatggaggagatcgttatggaaactagacagagacttctggagcaagaagggtag

SEQ ID NO: 24380 - DNA, 858 bp, synthetic construct
  source 1..858: mol_type = other DNA; note = Synthetic coding sequence
atggccatggagatgcggctgcccgtggcccggaagcccctgagcgagaggttaggccgcgataccaaaaagcacttggtcgtgcctggagatacgatcaccactgataccgggttcatgcggggacacggaacttacatgggcgaggaaaaactcatcgccagtgtggctggaagcgtagaaagggtcaacaagctgatttgtgtgaaggcgctgaagaccagatatatcggtgaagtgggagatatagtggtgggcaggattaccgaggttcagcagaaacgatggaaggtcgaaactaattccagattagattctgttctcctgctgagcagcatgaatcttccaggtggtgagttgagaaggagatctgccgaggacgagctcgctatgcgtggattcctgcaggagggtgacttgatctctgccgaagtgcaagctgtgttctccgatggggcagtgagtcttcacaccaggtctctgaaatacgggaaggtgagcccatcccttgttaaacggcagaagacccatttccatgacttaccttgcggggcgtcagtgatattaggcaacaacggttttatttggatctaccccacacccgagcacaaagaggaggaggccgggggttttatcgctaacttggagcctgttagtctcgccgatagagaggtaattagtaggctccgcaattgcattatttctttggtcacacagaggatgatgctgtacgacaccagcatcctgtattgctatgaggcctcccttcctcaccagatcaaggacattctcaagcctgagattatggaggaaatcgtaatggagacccgccagcggctgttagaacaggagggatag

SEQ ID NO: 24381 - DNA, 882 bp, synthetic construct
  source 1..882: mol_type = other DNA; note = Synthetic coding sequence
atggccatggagatgcggctgcccgtggcccggaagcccctgagcgagagactggggcgagacaccaaaaagcatctagtggtcccaggagataccattacaaccgatactggtttcatgcgtggccatgggacatatatgggggaagaaaagctaattgcatcagttgcgggctccgtggagcgtgtgaacaagttgatctgtgtaaaagcactcaaaactcggtacatcggggaagtgggggatatcgtggtgggtcgcataactgaagttcagcagaagcggtggaaggtggaaacgaactctcggttagactccgtgttgttgctatccagcatgaacctacccggtggcgaactccggcgcaggtctgcggaagatgagctcgcaatgaggggcttcctccaagaaggcgacctaatcagcgcagaggttcaggcagttttcagtgatggcgccgtttccctgcataccaggtctctgaaatatggcaagctggggcagggtgtgctggtccaggtgtctccaagtctggtcaagagacagaagacacattttcatgacctgccgtgtggggcttcagtcatactgggaaataacgggtttatctggatctacccaacccctgagcataaggaagaggaggcagggggctttattgctaacctcgaaccagtgtctctcgccgatcgggaggtgatcagccggctgcgaaactgcatcattagtctcgtcactcagcgcatgatgctgtatgataccagcatactctattgctacgaagccagcttaccacatcagattaaggatatcttgaagcccgaaatcatggaggagattgttatggagacaagacagagactcctggaacaggaaggctag

SEQ ID NO: 24382 - DNA, 3195 bp, synthetic construct
  source 1..3195: mol_type = other DNA; note = Synthetic coding sequence
atggccagcgagagcgagaccctgaaccccagcgcccggatcatgactttttatcccacgatggaggaattcagaaacttcagccggtatattgcctacattgaatcccagggagcacatagagccggcctggccaaggtcgtgccacctaaagagtggaaacctagggcatcttacgacgacattgacgacctggtcatcccagctccaatccagcagcttgtgactggacagtccgggctgtttacacagtacaatatccagaaaaaggctatgactgtcagggagtttagaaagatagccaactcggacaagtactgcacccctaggtatagtgaatttgaggaactggaacgcaagtactggaaaaatctgacttttaacccgccaatctacggagccgatgtgaacggcacactgtatgagaagcacgttgatgagtggaatatcggaaggcttcggaccatactggatctggtcgagaaggaatcaggcatcaccatagagggagttaatacgccttacctttatttcggtatgtggaagaccagcttcgcttggcacaccgaagatatggacctctactcaattaactacttgcactttggcgagcccaagtcttggtattctgtgccgccggaacacggcaagcgcctggagcgactggccaaaggcttctttcccgggagcgcccagagttgcgaagctttcctgcgtcataaaatgacattgatttcccctcttatgctgaaaaagtacggaatcccgttcgataaagtcactcaggaagccggtgaattcatgattacattcccctatgggtatcacgctggattcaaccacggcttcaattgtgctgaatctacgaatttcgcgactaggcgatggatcgaatatggaaagcaggccgttctgtgctcatgccggaaggatatggtgaagatttcgatggatgtgttcgtgcgcaaattccaacctgagcggtacaagctgtggaaggccgggaaagataacaccgttatcgaccatacactgcctacccctgaggcagccgaattcttgaaggaaagcgaattgcccccacgcgctgggaacgaggaggagtgtcctgaggaagacatggagggcgtcgaggatggcgaggagggggacctaaagacttccttagctaaacatcgaatcggcaccaaacggcatcgagtgtgtctcgagattccacaagaggtatctcagtcagagttgtttcccaaggaggatctctcctccgagcagtatgaaatgactgaatgccccgctgctctcgctcccgtcagacctacgcactcctcagtgcgccaagtcgaggacggcctcacatttcccgattactcagatagcacagaggtaaagtttgaggagttgaaaaatgtcaagctcgaagaagaagatgaggaggaggagcaagcagcagccgctctggacctgagcgttaatccggcgagcgtgggaggtcgtttggttttctccgggagcaaaaagaagagttccagcagcctgggctctggcagttctcgtgattccatttcttccgatagcgagactagcgaacccttgtcctgccgtgcccaaggacagaccggtgtccttaccgttcattcctatgccaagggggacgggagagtcaccgtgggcgagccctgtaccagaaagaagggctctgctgctaggagtttcagcgagagggaactggcagaagtggccgacgagtatatgttcagcctggaagaaaataaaaaatcgaagggccgccgccaacccctgagtaagcttccgagacaccatcccttagtcctacaggaatgtgtttccgacgacgagactagcgagcagctgactcctgaggaggaagctgaggaaactgaggcttgggctaagcccctcagtcagctttggcaaaatagaccacccaacttcgaggccgagaaagagttcaatgagacgatggcacagcaggcaccccactgtgccgtctgcatgattttccaaacataccaccaggtggagtttggagggttcaaccagaattgcggcaacgcatcagacctcgctcctcaaaaacagcgtacaaagcctttaatcccagaaatgtgctttaccagtacaggatgtagcacagacattaatctgagtaccccctatctggaagaggatgggaccagtatcctagtatcctgtaagaaatgttccgtaagagtgcatgcctcctgctatggcgtgccacctgctaaggcatcagaggactggatgtgctcacgttgcagtgccaatgctctggaggaggactgttgtctctgtagtctgcgtggaggagctctccagagggccaacgacgaccgctgggtgcatgtgagttgcgctgttgccattctcgaggcacgcttcgtaaatatcgcagaacgttcccctgtcgacgtgtccaaaatcccgctccctcgctttaagcttaagtgtatcttttgcaagaagcgccgaaagcgcactgccggctgctgcgtgcagtgttcccatggccgctgtcctacggctttccatgtgagctgcgcccaggccgcaggagtgatgatgcagccagatgattggcctttcgtggtttttattacttgttttagacacaaaattcccaatttggagagagcaaagggcgccttgcagagcataacagccggacagaaggttatttctaagcacaaaaacggtaggttttatcagtgcgaagtggttagactgaccaccgaaacgttttatgaggtgaactttgacgatggatctttctctgacaacctctaccccgaggatatcgtttctcaggactgcttgcaatttgggcctcctgctgagggcgaggttgtgcaggtgcgatggaccgatggacaggtatatggagccaagtttgtggcttcccaccctattcagatgtaccaggtagagtttgaagacggtagtcaactggtcgtgaagcgagatgacgtgtatacactggacgaagagctgccaaaaagagtgaagagcagactgagtgtggcctccgacatgagattcaacgagatcttcaccgagaaggaggtcaaacaggaaaaaaaacggcagcgcgtgatcaattcgagataccgagaggactacattgagcctgccctctatagagccattatggaatag

SEQ ID NO: 24383 - DNA, 2745 bp, synthetic construct
  source 1..2745: mol_type = other DNA; note = Synthetic coding sequence
atgggcgacagccgggacctgtgcccccacctggacagcatcggcgaagtcaccaaggaggatctgcttctcaagagtaaaggtacctgtcagtcttgtggcgttaccggaccaaatctctgggcatgtctgcaagtggcgtgtccttacgtcggctgtggagaatcattcgccgaccacagcacgatccatgctcaggccaagaaacacaacctcactgttaatctgacgacgttcagactatggtgctatgcatgcgagaaggaggtgtttttggagcaaagattggctgctcccttgctggggtctagttcgaaattcagtgagcaggattctccccccccttcccaccctctaaaggccgtcccaatcgccgtcgccgacgagggggagtccgaatccgaggacgacgatcttaaaccaagaggcctgacaggcatgaagaatttagggaacagctgctacatgaatgctgctcttcaggccttatccaactgccctcctctcacacaatttttcctggaatgtggggggctagtgcggaccgacaagaaacctgctctgtgtaagagctaccagaaactcgtgtctgaggtctggcataagaagcgtccgtcatatgtcgtgccaacttctttatctcatgggataaagctcgtaaatcccatgttcaggggctacgcccaacaggacactcaagaattccttcggtgcttgatggatcagcttcatgaggaactaaaagaacccgtcgtggcaactgtggcactcactgaggcaagagattccgactcttccgatactgacgagaagcgagagggtgacaggtcaccttccgaagacgagttcctgagctgtgactcctcctctgatcggggcgaaggtgatggacagggcaggggaggtggtagcagccaggccgaaacagaactcctgattcctgacgaagcagggcgggccatctccgagaaagaacgaatgaaggatcgcaagtttagctggggccaacagcgcacaaactccgagcaagttgacgaggacgccgatgtcgacacagctatggctgctctggatgaccaacccgccgaagcccagcctccttcgccccgatcttcgtcaccatgtaggacccccgaaccagataatgacgcacacttgcgttccagctcacggccatgtagtccggtccatcaccatgaggggcatgccaaattgtccagctccccaccaagggcctctcctgttaggatggccccaagctatgtgttgaaaaaggcccaggtgctgagcgccggctcaaggcgtagaaaggaacagagataccgttctgtaatctccgacattttcgatgggtccatcctgtcgctggtacaatgtctcacatgtgatcgcgtttccaccacagtggagacgttccaggaccttagcctgccgataccgggcaaagaagatctggccaaacttcatagcgccatttaccagaatgtaccggcaaagccaggcgcttgcggggacagttacgcagcacagggttggctcgcatttatcgtagaatacatccgacgctttgtcgtttcatgcaccccctcttggttttggggtccagttgtcacactggaagactgcctagctgcattcttcgccgccgacgaattgaagggagataatatgtatagctgtgagagatgcaaaaagctcaggaatggcgtgaagtactgtaaagtgctccggctgccagaaatcttgtgcatccaccttaaacgtttcagacacgaggttatgtatagctttaaaatcaatagccatgtttccttccctttggagggtctagacctgagaccctttcttgccaaagagtgtacctcgcagattactacctatgatttactttcagtgatctgccatcatgggacagcagggtcaggtcactatatagcttactgccaaaatgtgattaacgggcaatggtacgaatttgacgaccagtatgttaccgaggtgcacgagaccgtggtgcagaatgctgagggttatgttctgttctatcgcaagtcctctgaagaagccatgcgcgaaagacagcaggtcgtgtcactcgccgcgatgagagagccttccctgctgcggttctacgtctcgagagagtggctgaacaagttcaatacctttgcagaaccgggtccgatcaccaaccaaactttcttgtgttcccacggcggcattcccccccacaagtaccattacatcgatgatctggtcgtgatcctgccccagaatgtctgggagcacctttataaccggttcggaggcgggccagccgtcaaccacttgtacgtatgttcaatctgccaggtcgaaatcgaagcacttgctaaacgtcgtcggatagagattgataccttcattaaactgaataaggccttccaggctgaggagtctcccggcgtgatatactgcatcagcatgcagtggtttcgcgagtgggaagccttcgtgaaaggtaaggacaacgaacccccgggtcccatagataatagcaggattgctcaggttaaaggatctggtcatgttcagctcaagcagggtgcagactacggccaaatatccgaggagacttggacatatcttaacagcctgtatgggggcggccccgaaatcgccataaggcagagcgtggcacaacccttaggtccagagaatctgcatggggaacaaaaaattgaggcagaaacgcgcgcagtgtag

SEQ ID NO: 24384 - DNA, 1215 bp, synthetic construct
  source 1..1215: mol_type = other DNA; note = Synthetic coding sequence
atggacttcaacatgaagaagctggccagcgacgccggcatcttcttcactcgagcggtgcagtttaccgaggagaagtttgggcaggctgaaaagaccgaacttgacgcacatttcgagaatctgctcgcaagggccgacagcacaaagaactggacggagaagattctccggcaaacagaagtcctcctccagcctaatccatctgcgagagtggaagaatttctctatgagaagctggataggaaagtccccagtagagtgaccaacggggaattgctcgcccagtacatggccgatgccgcctctgagctgggtccgaccaccccttatggcaaaacactgatcaaggtggctgaagcggagaagcagctgggagccgcggaacgcgattttatacataccgcttctatctcattcctgacccccctccgcaacttcctggagggggactggaaaactattagtaaggaacggagactgctccaaaatcggcggctcgatctggatgcctgtaaggccaggttgaaaaaagccaaggcggcagaggctaaagccacttgcgaaggagatacagtgccggacttccaagagacccggccgagaaattacattctcagcgcctccgcctccgccctgtggaacgacgaagtggacaaggccgagcaggagcttagggtggcccagacggagtttgacaggcaggcggaggtcacccgactgctgttagagggtatcagcagtacacacgtgaaccatctgcgatgcctgcatgaattcgttaaatcccagacgacctactatgcccaatgttaccgacacatgctggatctgcagaagcagctcggatcctctcaaggggctatttttcccggcacatttgttggaaccacagaacccgcatcgccacctttgagcagcactagccccaccaccgccgctgcgacaatgcccgtggtgcctagtgttgcatctctggcgcctccaggcgaagcttccctgtgtctggaagaagtggcgcctcctgcctcgggaactcgcaaagcacgagtactgtacgattatgaagccgccgacagctccgagctcgccttgctggccgatgaacttatcaccgtatactcccttccaggaatggatcccgattggctgatcggagaaagaggaaacaaaaagggaaaggtgcctgtgacttatctggaactcttatcatag

SEQ ID NO: 24385 - DNA, 1188 bp, synthetic construct
  source 1..1188: mol_type = other DNA; note = Synthetic coding sequence
atggacttcaacatgaagaagctggccagcgacgccggcatcttcttcacgcgggccgtccagttcacagaggaaaaattcggccaggccgagaaaacggagctggacgctcacttcgagaatctgctcgctcgagccgattcgacaaagaattggacagaaaaaatactgaggcagacagaggtgttgttgcagcccaacccaagcgccagggtcgaagagtttctatacgagaagctggacagaaaagtaccttcacgcgttaccaacggcgaattgctggcccaatatatggcagatgctgctagcgaactaggcccaaccaccccatacggaaaaactcttatcaaggttgcagaggctgagaagcagctgggggctgccgaaagggacttcattcataccgcctctatctcctttcttacacctctccgaaacttcttggagggcgattggaagactatttccaaggagcggcgcttactgcaaaatcgtcgcttagacctagacgcgtgtaaggccagattgaagaaggctaaagccgctgaagccaaggcgacgacagtccccgacttccaggagacccgccctagaaactacatcctttcagcttctgccagcgcgctgtggaatgacgaggttgacaaggccgagcaagagttgcgtgtggctcagaccgagttcgaccgccaggcagaagtgaccagacttcttcttgagggaatcagctcgacccacgtgaaccacttaaggtgcctgcacgaatttgtcaagtcccagactacttattatgcacagtgttaccgacacatgctggacctccagaaacagctcgggcgatttcctggcacctttgtgggaaccactgagcctgcatcgcctcctctgtcgtctacatctccaacgacagccgctgctacaatgcctgtggtgccatcagtggcttcccttgccccaccaggagaggcttctctgtgtctggaggaggtggctcccccagccagcggaactcggaaggctagggttctctacgattacgaggcggccgattcctcagagctggcattgctcgccgacgagctcatcactgtttattcattgccaggcatggaccctgactggttgatcggggagcgtggcaataagaagggaaaagttccggtaacttacttagagctcctgagctag

SEQ ID NO: 24386 - DNA, 1188 bp, synthetic construct
  source 1..1188: mol_type = other DNA; note = Synthetic coding sequence
atggacttcaacatgaagaagctggccagcgacgccggcatcttctttactagggccgtgcagtttactgaggaaaagtttggccaggctgagaagactgagcttgacgcccattttgaaaatctacttgcgcgcgcggactcgactaagaactggaccgagaagattttaagacaaaccgaggtattactgcagccaaatccctcagcccgcgttgaagaatttctgtatgaaaagcttgacagaaaggttcctagtagagtgactaacggggaactcctggcacagtacatggctgacgccgcatcagaactgggcccaacaaccccatacggcaaaaccctgattaaagttgcagaggccgaaaagcagctaggcgctgccgagcgggacttcatccatacagcttctatctcctttctgaccccactgcgcaactttttggagggcgattggaagaccatcagcaaggaacgcagattactgcagaatcgcaggcttgatctggacgcgtgtaaggcccggctgaaaaaagcaaaagcagccgaagctaaagcaactacagtccccgactttcaggagacccgcccccgcaattacatcctgagcgcatctgcctcagccctttggaacgacgaggtggacaaagctgagcaagaactccgagtggctcagacagaatttgataggcaggccgaggttacacgcctactcttagaagggatctccagtacccacgtgaatcatctgcgctgtctgcatgagttcgttaaatctcaaacaacttattatgcccaatgttatcgtcacatgctcgacctacaaaagcaactgggaaggttccccggcacattcgtcggcacaaccgagcctgcctcccccccactttctagcacgtccccaaccacagcagccgccacgatgccggtggtcccctccgtcgctagccttgctccaccaggagaagcgagcttgtgcctggaagaggttgcccccccagccagcggaacgcggaaagcccgggtcctgtacgactacgaggccgcggatagttcagaattagcgctgttggccgacgagctgatcacagtgtactctctgccaggtatggatcccgactggctgattggcgagagggggaacaagaagggaaaggtgccagtcacctatctcgaactactcagctag

SEQ ID NO: 24387 - DNA, 615 bp, synthetic construct
  source 1..615: mol_type = other DNA; note = Synthetic coding sequence
atgagctggacctgcccccggtgccagcagcccgtgttcttcgccgagaaggttagttctttagggaagaactggcaccgattttgtctgaaatgtgagcggtgtcactcaattctctcccccggcggacacgcagagcataatggacggccctactgtcacaagccctgctacggagcactcttcggccctcggggcgttaacattggtggggtcggatcctacttgtacaaccccccaaccccaagtcccggctgtaccacaccattgtccccctcatcattcagcccaccaagacctaggacaggtttgccacaggggaaaaagtccccacctcacatgaaaacatttaccggcgagacctcgctctgccccggatgtggagaacccgtgtactttgccgaaaaagtgatgagccttggtaggaactggcaccgcccctgccttcgatgccaacggtgtcacaagacattgactgctgggagccatgccgaacatgacggggtgccctattgccacgtgccctgctacggatacctctttgggcctaagggtgttaatatcggcgatgtgggctgttatatatatgatcctgtgaagatcaagtttaagtag

SEQ ID NO: 24388 - DNA, 1221 bp, synthetic construct
  source 1..1221: mol_type = other DNA; note = Synthetic coding sequence
atggagagcctgcggggctacacccacagcgacatcggctaccggtcattggctgtaggagaggacatagaagaggtgaacgatgagaagctcactgttacaagcctgatggcacgcgggggggaggacgaggaaaacacacgctcaaaaccagagtacggcaccgaagctgagaataacgtcggtaccgagggcagtgtcccttccgatgaccaagatcgggaggggggcggcggtcatgagcccgaacagcaacaggaagaaccccctctgacaaaaccagagcagcagcaggaagaacctccacttctcgagctcaagcaggaacaggaggaaccaccccagacaactgtcgaagggccacagcccgcagagggaccccagaccgcagagggaccccagccacccgaacggaagcggaggcgtcggactgccttcacgcagttccagctgcaggagctggagaatttctttgacgagtcccagtaccccgatgtggtggctcgtgagaggctggctgccaggttaaatcttactgaagaccgggtacaggtgtggttccaaaacagacgcgcaaaatggaaacggaaccagagagtcctcatgttaaggaatacggccactgccgatctggctcaccctctggatatgtttctcggaggggcttattatgccgcgcccgcgcttgaccctgcgctgtgtgtgcatctagtaccccagctgccccgtccaccagttctgcccgtgcctccaatgccaccgaggcctccaatggtaccaatgcccccgagacctcccatcgcaccgatgccccctatggcacccgtcccgcccggatccaggatggcccctgtgccgccgggcccaaggatggctcctgtgcccccttggccaccaatggcacccgtgcccccttggcccccgatggccccagtgccgaccggccctcccatggcgcccgtgccaccgggaccacctatggcaagagtgcctccaggtccccctatggctcgtgtgccacccggtccaccgatggcccctttgcccccaggcccacccatggccccactgccacccggccctccaatggctccactgcctcctggcccccctatggctccactaccaccgcggtcacatgtgccccacaccgggctggcccccgtccatattacatgggcaccggttatcaacagttactatgcttgcccgttcttctag

SEQ ID NO: 24389 - DNA, 873 bp, synthetic construct
  source 1..873: mol_type = other DNA; note = Synthetic coding sequence
atgagccccagcgccaagaagcggcccaagaacagccgggtgagcaagatgcaagacgagaaactgcgggacgaaaccgagcaaccagtgagtaaagtgattgaaagaaaccggctgcgcacagtgcttaaaaacctgtctctcttaaaattactgaagagttccaaccgaagaattcaagaactccataagttagcgaaacggtgttggcattctctgctttctgtccccaagattctgcggatatcgagcggcgagaactcagcttgtaataagaccaaacaaaacaatgaggaattccaggagatcggatgctccgaaaaagaactgaaatccaaaaaactcgaatctacaggcgaccctaagaaaaaagagtacaaggagtggaagagtcaggtccagtctggaatgaggaacaaggagaaaacctctctcgctgctatgccacgaaaagaaaaacacatagagccagaggtaccaagaacatccagggacgactctctgaaccctggggtgcaaggaagacagcccctgacagaaggtcctagggttatttttatcaagccctacaggaatcgcacgccaatgggacacatgaagcaactggatgtggctgatcaatggatttggttcgaggggttacccacaaggattcacctgcctgcccctagggtgatgtgcaggtccagtaccctgcgttgggtcaagcgtagatgcacacgcttttgcagcgcctcccttgaaatgccaatgtggcacccctacaaggtggacgttacttggaccagggccagaggggcttctagaggttggcgctctaggcaccagctcaagggccggaacgggtggcgtaactcacgcgtttataagtag

SEQ ID NO: 24390 - DNA, 1644 bp, synthetic construct
  source 1..1644: mol_type = other DNA; note = Synthetic coding sequence
atggccggcaccaagaacaagacccgggcccaggccaagaccgagaagaaagcagcgatccaggctaaggctggggccgagagagaggccactggtgtggtgcgtccagttgctaagactcgggccaaggccaaggccaaaacaggtagtaagacagatgccgtcgcagagatgaaagcggtcagcaagaataaagttgtcgcagaaacaaaagaaggggccctgagtgagcctaaaacactcggaaaggctatgggggatttcacccccaaggcaggcaacgaatctacttcaagcacctgtaagaacgaggccggcactgatgcatggttttgggctggagaggaggcgaccatcaacagctggttttggaacggcgaagaggctggtaactctttttccaccaaaaatgacaagcctgaaatcggcgcacaggtttgcgccgaagagcttgaacctgctgcaggggcggactgcaaaccacgatcaggcgctgaagaagaggaggaggaaaatgtgattgggaattggttctgggagggggatgacacgtctttcgaccccaacccaaagccggtgtcccggatcgtgaagccacaacctgtatacgaaatcaacgagaagaatcgaccaaaggactggagcgaagtgaccatttggcccaacgcccccgcagtgacaccggccgtgctcggattccgaagccaagctcccagcgaggcgagccctccctcctacatcgtgttagctagcgcagaagagaacgcttgcagccttcccgttgccactgcatgccggcctagtcggaacacacgatcgtgcagtcagccaattcctgagtgtcggttcgattcggacccttgcatccagactatagacgagatacgacggcagatcaggatccgggaagtgaacgggatcaagccttttgcttgcccctgcaagatggaatgttacatggacagcgaggagtttgagaagctagtgtcacttctgaagtccactacagaccctctgatacacaagatcgcccggattgccatgggcgtgcataacgtgcacccttttgcgcaggaattcatcaatgaggtgggtgtcgtgacgctgatagagtccctgctgtcttttcccagtcccgagatgcgtaagaagacggttattaccctaaatccaccttccggggacgagcgccagaggaagatcgagctgcacgtgaagcacatgtgcaaggagacaatgtcattccctctgaatagtcccggccaacagtccggcttgaagatactcggccagcttactaccgattttgtgcaccactacatcgtggcaaattatttttccgaacttttccacctcctgtcttccggcaattgtaaaacaaggaatctcgtgttgaaattgctgctcaatatgtccgaaaaccctacagctgcacgggatatgatcaatatgaaagcacttgctgcactcaaactgatctttaaccagaaagaggcaaaagccaatttagtctccggcgtcgctatcttcatcaacataaaggaacatattaggaaaggctcgatcgtggtggtggaccatcttagctataatacactgatggctattttcagggaagtgaaggaaatcatagagacaatgtag

SEQ ID NO: 24391 - DNA, 1881 bp, synthetic construct
  source 1..1881: mol_type = other DNA; note = Synthetic coding sequence
atgtgcagcaccctgaagaagtgcggcacctaccggaccgaggtggctgagtgtcatgaccatggtagtactttccagggccgcaagaaagggggttcatcgtttcgggataatttcgacaagaggtcttgtcactacgagcacggtggttatgaaaggcctccctctcactgtcaagagaatgacggttcagtggaaatgcgtgacgttcacaaggatcagcagctgagacatactccatacagtatacggtgcgaaagacggatgaaatggcactccgaagatgagattcgaattactacatggcggaacaggaagccgcccgaacgaaagatgagccagaacacacaggatggatacacccgcaattggttcaaggtgactatcccttatggtatcaaatacgataaggcttggctgatgaactctattcaaagtcactgttccgacaggtttacccccgttgatttccactacgttcgaaatcgcgcgtgtttcttcgtccaggacgcctctgccgcttcagctcttaaggacgtttcatataaaatatacgatgatgagaaccaaaagatctgcatttttgtaaatcactcaacagctccatacagcgtcaagaataaactgaaacctggtcagatggaaatgctgaaacttaccatgaataagcggtacaatgtctctcagcaagcgcttgacctgcagaacctgagattcgaccctgatttgatggggcgtgatatcgacatcattctcaataggcgtaattgtatggccgcaacactaaaaattattgagcggaatttccctgaactactatctttgaatctctgtaacaacaaactatatcagttggatggactgagcgacatcaccgaaaaggcccctaaggtcaagactttaaacctgagcaaaaacaaactcgagtcagcctgggagttaggtaaagtgaaggggctgaagctcgaggaactgtggctggaaggcaatcccctgtgttcgaccttctcagaccaaagcgcatatgtttcagcaattcgcgactgttttcccaaattgctccggctggacggaagggagctatctgccccggtgatcgtggatatcgatagtagcgagaccatgaagccctgtaaagaaaattttactggtagtgagaccctcaaacacctggtgctgcaatttttgcagcagtactattctatttacgatagcggcgacagacagggtttgctcggggcataccacgacgaggcctgtttttccttagccatccctttcgatcctaaagattctgccccctcatcactctgtaagtattttgaggatagccggaatatgaaaacactgaaggacccatacttaaagggcgagctcttaagaagaactaagcgcgacatcgtagattccctgtccgccctcccgaagacacagcacgatctgagcagcatcctcgttgacgtctggtgccagacagaacgaatgttatgttttagtgttaatggtgtgttcaaggaagtggaggggcaaagccaaggtagtgttttggcattcaccagaacatttattgcgacgcccggcagcagcagtagcttgtgtattgtgaacgacgagctcttcgtcagagacgcaagtccccaggaaacacaatcagctttctctattcccgtgtcaactttgtcgtcttcaagcgaaccctcattatctcaagaacaacaggagatggtgcaagcctttagcgcacaaagcggcatgaaactcgagtggtcacagaagtgcctgcaggataacgagtggaactacacacgggcggggcaagccttcactatgttacagaccgaaggcaagatccctgcagaggcttttaagcagattagctag

SEQ ID NO: 24392 - DNA, 1881 bp, synthetic construct
  source 1..1881: mol_type = other DNA; note = Synthetic coding sequence
atgtgcagcaccctgaagaagtgcggcacctaccggaccgaggtggcggagtgccacgaccacggttctacattccaggggcgtaagaaaggcggaagtagctttagggacaatttcgacaagagatcatgtcactatgaacacggcggctatgaacggccacccagccactgtcaggaaaatgacggtagcgtggaaatgagagacgtgcataaggatcagcagcttagacataccccctattcaattagatgtgagcgtagaatgaagtggcactcagaagatgaaataaggatcacgacatggaggaaccgtaaaccgccagaacggaagatgtcacaaaatacgcaagacggctatacaaggaactggtttaaggtgactattccctacggcattaaatatgacaaagcctggctgatgaatagtatccaaagccattgcagcgataggttcactccagtagatttccactacgtcaggaacagagcttgtttcttcgttcaggacgcatcagccgcctctgcactcaaggatgtgagctataaaatctacgatgatgaaaaccagaaaatctgcatcttcgttaatcactcgactgccccatatagcgttaagaataaactcaaacccgggcagatggaaatgctcaagctgactatgaataagaggtataacgtgagtcagcaagcattggatcttcagaacctccgattcgatcccgatcttatgggcagagacatagatataatcttgaaccgcagaaactgcatggcggcaacgctgaaaataatagaacgcaattttcctgagctcctaagtctgaacctgtgcaataacaaactgtatcagctggacggcttaagtgacataactgagaaagcaccgaaggtcaaaacactcaacctgtccaagaacaaactcgaatccgcctgggagctgggcaaagtcaagggtctgaaactggaagaactgtggctggaagggaaccctctatgctctaccttctcagatcaatctgcatatgtgtccgccatccgggattgctttccaaagctgttgagactcgacggcagagaactgagcgcccctgtaatagtggatatcgatagcagcgaaactatgaagccatgtaaagaaaatttcaccggatccgagacattaaagcacctggtgctgcagttccttcagcagtattattcgatatacgacagcggagatcgacaaggactccttggagcctaccacgatgaagcctgcttcagcctggccatcccgttcgatccgaaggactccgcaccaagttcactatgcaagtattttgaagactctcgcaacatgaaaacactgaaagacccctacctcaaaggggagcttcttaggagaaccaaacgcgatattgtcgatagcctgagcgcacttccaaaaacacaacacgaccttagttctatcctagtggacgtctggtgtcaaactgagaggatgttgtgcttctcagtgaacggcgtgtttaaagaggttgaagggcagtctcagggttctgtcctcgcgtttaccaggaccttcattgcaacccccgggagctccagctcattgtgcatcgtaaacgacgaattatttgtccgggacgctagtccacaggaaacccagagcgccttttccatccctgttagtaccctctcctcttcttctgagccatcactgtctcaggagcagcaggaaatggtgcaagccttttcagcgcaatctggcatgaaactggagtggtctcagaagtgtctgcaggacaatgagtggaattataccagggcgggccaggctttcacaatgctgcaaaccgaaggcaaaattcccgctgaagcatttaagcagatcagctag

SEQ ID NO: 24393 - DNA, 1230 bp, synthetic construct
  source 1..1230: mol_type = other DNA; note = Synthetic coding sequence
atgaagtggcacagcgaggacgagatccggatcaccacctggcggaaccgaaagccccccgaacggaagatgtcacagaatacacaggatgggtatacgcgaaactggttcaaagtgaccattccgtacggaatcaaatacgataaggcctggcttatgaattctattcagagccactgttctgataggtttacacctgtcgatttccattacgtaagaaaccgcgcctgtttcttcgtgcaggacgccagtgccgcaagcgctctcaaagacgtctcttacaagatctacgacgacgagaatcagaaaatctgtatcttcgtcaaccactcaaccgctccttatagcgtcaagaataagctgaagcccggccagatggaaatgctgaagttaactatgaataagcggtacaatgtgagtcagcaagccttggacctccaaaatttacggttcgatccggacctcatgggtcgcgatattgacattatcctgaatcgtcggaactgcatggcggccaccctgaagattatagagaggaattttcccgagttgctatccttaaacttatgcaacaataagctctaccaactcgacggactttcagacataaccgagaaagcccccaaagtaaaaacccttaacctctctaagaataagcttgagtctgcatgggaactcggtaaagtgaaaggattgaaacttgaggagctctggctcgagggtaaccctttgtgcagcacattcagcgaccagtccgcatacgtgtctgccattcgtgattgtttccctaagctcttgcgactcgacggtcgggaattatctgccccagttatcgttgatatagattcatcagaaacgatgaaaccatgtaaagaaaactttacgggttcggaaaccctgaagcatctggtattgcagttcctacagcagtactatagtatatatgatagcggtgatagacaggggctgctgggtgcataccacgacgaagcctgcttctcactcgctatccctttcgaccctaaagactccgctccttcctcactgtgtaagtacttcgaggactctcgcaacatgaagactctcaaagatccttacctcaagggcgagttgctccggagaactaagagagatatcgtggatagcctatccgcactgcccaaaacccagcatgatctcagcagcatcctcgtcgacgtgtggtgtcagactgtgccatctggccagtag

SEQ ID NO: 24394 - DNA, 1326 bp, synthetic construct
  source 1..1326: mol_type = other DNA; note = Synthetic coding sequence
atggccagcgtggccgccgcccgggccgtgcccgtgggcagcggcctgcgaggattacaaaggaccttacctcttgtggtgattctgggcgcaacaggcaccggaaagtctacattggccctgcagttagggcagaggctgggcggggagattgtctccgccgattctatgcaggtgtatgaagggctggatattattactaataaggtgtccgcacaagagcagcgaatttgcaggcatcacatgatttctttcgtggatcccctcgtcaccaattacactgtggttgacttcagaaaccgcgctacggctctaatcgaggatatttttgctagagacaagatacctatcgtcgtcggagggactaattactacatagaatcgctgctttggaaagtgctggttaatacaaagccccaagagatggggacagagaaagtcatcgaccgcaaagtggagctggaaaaggaggatgggctcgtcctgcataagagattgagccaggtagatccagagatggctgctaaactgcaccctcacgataagcgaaaggtcgcccggtctctacaggtcttcgaggagactggcataagtcattccgagttcttgcatagacagcacaccgaagaaggcgggggaccactggggggcccactgaagttctccaatccctgcattctctggctgcacgctgatcaggccgtcttagacgagcgcttggataagagagtcgacgatatgctggccgccgggctgctggaggagctgcgagatttccaccgacggtataaccagaagaatgtgagtgaaaacagtcaggattaccagcatgggatcttccagtcaattgggtttaaagaatttcatgaatacttgattactgagggcaaatgtacacttgagacatccaatcagttgctcaaaaagggccctggtcctattgtgccacccgtctatggcctggaggtgtccgacgtcagcaagtgggaggagtctgttctggagcccgcccttgagatcgtgcagagctttatccaaggtcacaaacctacggctactcccatcaagatgccttataacgaagcggagaacaaacgcagctatcacctgtgtgacctctgcgaccgaatcattattggcgaccgagagtgggccgctcatatcaaaagcaaatcccacttaaatcagctgaaaaaaagacgccggttggacagtgatgccgtcaataccatcgaatcccagagtgtgtcgcccgatcacaataaggaacccaaggagaaaggcagtcccgggcaaaacgatcaggaactcaagtgttccgtttag

SEQ ID NO: 24395 - DNA, 1158 bp, synthetic construct
  source 1..1158: mol_type = other DNA; note = Synthetic coding sequence
atggccagcgtggccgccgcccgggccgtgcccgtgggcagcggcctgagggggctgcagaggacacttcccctggtcgttatcttgggagctacgggaactggaaagagtaccttggctctgcagctgggtcagcgacttggaggagagatagtatccgcagactctatgcagccccaggagatgggaaccgaaaaggtgatcgacaggaaagtggagctggagaaggaagacggcctggttctgcacaaacggcttagtcaggtggatccggaaatggctgccaaacttcacccacatgacaaacgtaaggtggctcgcagtctgcaggtgtttgaagagactggaatctctcacagcgagttcctgcacagacagcataccgaagaggggggcgggcctctgggggggccgctgaaattcagtaacccatgcattctgtggcttcacgccgatcaggcagacgaaagactggataagcgggtcgacgatatgctggccgcagggcttctggaggaacttagggacttccatcgacgctacaaccaaaagaacgtgtcagagaacagccaggattaccaacacggtatctttcagtcaattgggttcaaggagtttcacgaataccttattactgagggcaagtgcactctggagacctccaaccagctgctaaagaagggcatcgaggccttgaagcaggtgactaaaagatacgccagaaagcagaaccgatgggtaaagaacaggttcctgtctaggccaggtcccatcgtgcctcccgtttatggcctggaagtgtccgacgtcagcaagtgggaggaatctgtgctggagcctgccttggaaatcgtgcagtccttcatccaagggcacaaacccactgccaccccaattaagatgccgtacaacgaagcagagaataagagatcttatcacctctgtgacctttgcgacagaatcattatcggcgacagagaatgggctgcccatatcaagtctaagtcccaccttaatcagttgaaaaaaagacgccgcctggactcagatgctgttaatacgattgaatcacagtccgtgtcccccgaccataacaaagagccaaaagagaagggatctcctggacaaaacgaccaggaactaaagtgcagcgtctag

SEQ ID NO: 24396 - DNA, 987 bp, synthetic construct
  source 1..987: mol_type = other DNA; note = Synthetic coding sequence
atgaagcggcccaaggagcccagcggcagcgacggcgagagcgacgggcccatcgacgtcgggcaggaagggcagctgtcccagatggcaagacccctgagcactcctagcagttcacaaatgcaggccaggaagaaacaccggggcattattgaaaaaaggcggagggacaggataaattcttctctgtctgagctcaggcggttggtaccgacagctttcgagaagcaggggagttctaagctggagaaagcagaagtgcttcagatgaccgtggatcatctaaaaatgcttcacgccactggcgggacgggcttctttgacgcccgcgcactcgccgtggactttcgcagcatcggatttcgcgagtgcttgacagaggtaattcgttatttaggggtgctcgagggaccctccagtcgggcagacccggttagaatcaggctgctgagtcacctgaacagttatgccgcagagatggaaccttctcccacccctactggtcccttagcattccccgcttggccctggtccttctttcattcttgtcccggtctcccagcattaagcaaccagttggcgatcctgggtagagtgccatctcccgttttgcctggcgtctcatcccccgcctaccctattccagccctgaggacagctcctctccgaagggccactgggattatattgcccgctagaaggaatgtgctgccttcgcggggtgcttcatccacccgccgagcgcgaccactggaacggcccgctacacccgtccccgttgccccttcatctcgcgcagctcggagttcacatattgcacctctgctacagtcgagctctccaacaccacctggtccaaccggctccgcagcatacgtcgcagtgccaacgcccaacagctcctctcctggaccggcaggccgacctgcgggggctatgctgtaccattcctgggtgagcgaaatcactgaaatcggggcattctag

SEQ ID NO: 24397 - DNA, 2262 bp, synthetic construct
  source 1..2262: mol_type = other DNA; note = Synthetic coding sequence
atggagaccttcgagcccatcagccaggagcccctgagccaggcctcatatgataaagctcctgatcccgtaccagaattacaagacagtttctacgctgaactgcaacgtgctgaaagcctccaggagaagagcattaaggaagccaagaccaagtgccgaacaatcgcttctttactgacagcagcaccgaatcctcacagtaagggggtgcttatgtttaagaaacggcgccagagagccaagaaatacactctggtctcatttggtgccgctgcaggcacgggggctgaggaggaggatggggtgccccctacatccgaatccgagctggacgaggaagcattcagcgacgccaggtcattaactaaccagtccgactgggattccccttacctggacatggagctggcccgcgccgggagtagagctagtgaggggcagggctccggactcgggggccagctgagcgaggtatcaggccggggcgtccaattatttgaacagcagcggcagcgagccgactcaagtactcaggagctcgccagagtcgagccagctgcaatgcttaacggcgagggcctccaatcccctccaagggcccagtccgccccaccagaggccgccgtgctacctccctcccccctcccagctcccgtggcgtctccacgaccattccagccaggaggcggtgctcctaccccggcaccgtccatatttaacaggtctgcaaggcccttcaccccaggacttcaagggcagagacccacaacaacttcggttatatttcggcctttggctccaaagcgggccaacgactcgctgggtggactcagtcccgctcccccgcccttcctgagcagccagggacctacaccactaccgtcctttacctcaggggtcccttctcatgctcctgtgtcaggcagtccttccacccctcgatcgagcgggcctgtcaccgcgacatcgtctctgtacatacccgccccctccaggcctgtcacacctggcggcgccccagaaccccccgccccgccttcagcggcggccatgacgagcacagcatccatcttcctgagcgcacccctgcgaccaagtgcccgccccgaggcccctgctccaggacctggcgcaccggaaccgccttcggcacgtgagcagagaatctcggtacccgccgcacgcaccggcatcttgcaagaggcaaggaggagaggcacccgcaagcagatgttcaggcccggtaaagaggagacgaaaaatagtcccaacccagaactcctatcccttgtgcaaaatctcgatgaaaagccccgagcggggggggctgagagcggacccgaggaggatgctttgtcccttggagcagaagcttgtaatttcatgcagcccgtcggagcccgctcttataaaacccttccacatgtgacgccgaagacccctccaccaatggcacccaaaactcccccacctatgaccccaaagacaccaccacccgtggcccccaagccccccagtcgtggtctgttagacgggctcgtgaacggcgccgcctcttctgccgggatacctgaacctccacgattgcagggacggggtggcgagctctttgccaagcgtcagagccgcgccgataggtacgtcgtggagggaacacctggccccggtctggggcctaggccaaggtcgcccagccctactccttcgctgcctccctcctggaaatactcacctaatatcagagcccctccacccattgcatacaatcctcttctgtctccattcttccctcaggccgcccggacactgcctaaagcacaatctcaaggcccacgggctacacctaagcagggcatcaaggccctggactttatgcgacaccagccctaccagctgaagactgctatgttctgctttgatgaggtgccccccactccaggacctattgcgtctggctcccctaaaacagcccgcgtgcaggagatcaggcggttttccacacctgccccccaaccaaccgcagagccacttgctccaaccgtcctggcccctagagcagccactactctggacgagcccatctggcggaccgagttagcatcagctccggtccccagcccagctccccctccagaggcgccacggggacttggcgcctccccttccagctgcggcttccaggttgctcgaccacgcttctcagcgacacgtacgggccttcaggcccacgtatggagacccggcgctggtcaccagtag

SEQ ID NO: 24398 - DNA, 1041 bp, synthetic construct
  source 1..1041: mol_type = other DNA; note = Synthetic coding sequence
atggagagcgtgagctgcagcgccgccgccgtgcggaccggcgacatggaatcccaaagagatctgtccctggtgcccgagagactgcagcgtagggaacaggagagacagctggaggtggaaagaagaaaacagaagcgtcaaaatcaggaagtggaaaaggagaatagccacttcttcgttgccaccttcgtccgcgagcgcgctgccgtggaggaattgctcgagagagccgaatcagtagagaggctagaggaggctgcttcaagactgcaggggctgcagaaattaataaatgatagtgttttcttcttagcggcatacgacctgagacagggccaggaagcactggcacgtctgcaagcggccctggccgagcgcagacgggggctgcagccaaaaaaaagatttgcctttaagaccagaggcaaggacgctgccagttccaccaaggtcgacgccgctcccggtatccctcccgccgtagaatctatccaggacagccccctccctaaaaaagcagagggagatctcggccccagctgggtttgcggcttctccaatctggagagccaagtgctggagaaaagggcatctgagctgcaccagcgcgatgtgttgttgaccgagctgtccaattgcaccgtccgactttacggaaatcccaacacgcttagactgacaaaggcacacagctgcaaactgttgtgtgggcctgtgagcaccagcgtctttctggaggattgctcagactgtgttctggccgtggcatgtcagcagctgaggatccattcaacaaaggatacccgcatctttctgcaggtgacaagtcgtgccattgtagaagattgtagcggcatccaattcgctccttatacttggagctatccggaaatagataaagacttcgagtcttccggactggacagaagtaaaaataactggaacgatgtcgacgacttcaattggcttgctcgagacatggcttctccaaactggagcattctgccagaggaagagcgcaacatccagtgggactag

SEQ ID NO: 24399 - DNA, 1569 bp, synthetic construct
  source 1..1569: mol_type = other DNA; note = Synthetic coding sequence
atgagcccccagaagcgggtgaagaacgtgcaggcccagaaccggacatcccaggggagttccagttttcagaccaccctgtccgcttggaaagtgaaacaggatccgagcaattccaaaaatattagtaagcatggacaaaacaacccagtgggggattacgagcacgcagacgaccaggccgaggaggacgcattgcagatggctgtgggatatttcgagaagggaccgatcaaggccagccaaaacaaagataagactctagaaaaacacttgaagacagtggaaaatgtggcttggaaaaacggtctcgcgtcagaagagatcgacatcctgctgaacatcgctctgagcgggaagtttggaaacgcagtcaacactcgtattctgaaatgcatgatccccgccacggttatctcggaagattccgtggtgaaggcagtctcatggctatgcgtcggaaagtgcagtggtagcaccaaggtcctgttttatagatggctagtggcaatgttcgatttcattgatagaaaagagcagatcaatctcttgtacgggttcttctttgccagccttcaggatgacgcactgtgcccttacgtgtgtcacttactgtatctgcttaccaaaaaggagaatgtgaaacctttcagggtacgcaagctgcttgacttgcaagcgaaaatgggcatgcagccccacctgcaggccctgctgagcctgtataaattttttgcgcccgctctcatttccgtatccttgccagtcagaaagaagatatactttaagaactccgaaaacctatggaagaccgcactgttagccgtaaaacagaggaatcgggggccctctcccgagcctttgaaactgatgctggggcccgcgaacgtgaggccgttgaagaggaagtggaattccttgtccgtgatcccagtgcttaatagtagttcatatacgaaggagtgcgggaagaaggaaatgagtctatccgattgtcttaacagaagcggctcgttccctttagaacagcttcagagcttcccacaactcctccagaatatccactgcttggagctgccaagtcaaatgggctcggtgctgaacaacagccttctactgcactatatcaattgcgttcgggacgaacctgtgctgctgcggttttactactggctgtctcagactctgcaggaggagtgtatctggtataaagtaaataattacgaacatggaaaggaatttactaatttccttgatacgattattcgcgcggagtgttttctccaggaagggttctatagctgcgaggcctttttgtataaaagtctgccactctgggacggtctttgctgtagatcccagtttctccaactggtctcctggattccgtttagttctttttctgaagtgaaacccctgttgttcgaccatcttgctcagctctttttcacgagtactatctacttcaagtgttccgtcttacagtcgttaaaagagctgttacagaactggctactgtggctgtctatggacatccacatgaagccagtcaccaatagccctctatag

SEQ ID NO: 24400 - DNA, 2271 bp, synthetic construct
  source 1..2271: mol_type = other DNA; note = Synthetic coding sequence
atgagcccccagaagcgggtgaagaacgtgcaggcccagaaccggaccagtcagggctcatcttctttccagactacattatccgcctggaaggtgaagcaagacccatccaatagcaaaaacatatcgaaacacgggcaaaataaccccgtgggcgattatgaacatgctgatgatcaggcggaggaagatgcactgcagatggccgtgggttactttgagaaagggcctatcaaagcctcacaaaacaaggataaaacgctggaaaagcacctcaagactgtggagaatgtggcttggaaaaacggcctcgccagcgaggagattgacatacttttaaacatagcactgtcagggaagtttggaaatgctgtgaacacccgaatcctgaagtgcatgatcccagcaacagtcatttctgaggactcagtggtgaaagccgtcagctggttgtgcgttggaaaatgcagcgggagcactaaagttctgttctatcggtggctcgtggcgatgttcgattttatagaccggaaagagcagataaaccttctctatgggttcttcttcgcgagcctgcaggatgatgccctgtgtccttatgtttgtcatctcttatatttgctcaccaaaaaggagaatgtgaagccgtttagagtgagaaaactgctggatcttcaggccaagatgggcatgcagccgcacctacaggccctgttatcattgtacaaattcttcgcaccagcactcatttccgtcagcctccccgtacgcaagaagatttattttaaaaatagtgagaatctgtggaagacggccctgctggcagtgaagcaaagaaatcgaggaccatcccccgagccacttaaattgatgttgggccctgccaacgttcggcccctgaagcgcaaatggaatagtctgagcgtgattcccgttctaaattccagcagctatactaaagaatgtggcaaaaaagagatgagcctgagtgactgcctgaataggagcggaagcttcccccttgagcaattacagtcatttccccagctgctccagaatatccattgcttggagctgcccagccagatgggtagcgtactcaacaattccttactgctccactatataaactgtgtgagagatgaacctgtgttactgcgattctattactggttatcccaaaccctgcaggaggagtgtatctggtacaaggtcaacaactacgagcatgggaaggagttcactaactttcttgacacgatcatccgggccgagtgcttcctccaggaagggttctattcctgcgaggctttcctctacaagtctttgcctctgtgggatggactctgctgtcgcagccagtttctgcagcttgtttcctggatccccttcagctccttctccgaggtgaagcctctgctctttgaccatctggcacaactgttctttacttccaccatttattttaagtgtagtgttctgcagtcacttaaagaacttcttcagaactggctgctctggctctctatggatatccatatgaagccagtaaccaacagccccttggagaccaccttggggggctcaatgaacagtgtttccaagttgatccactatgttgggtggctgtctaccacggccatgcgactagaatctaataatacatttttgctccactttattttagatttctatgagaaggtctgcgatatctacatcaattataatctcccccttgttgttctgtttccgccagggattttttatagtgcactgttgagcctggacacatctatactcaaccagctgtgtttcattatgcacagatacaggaagaacttgacagccgctaaaaaaaatgagttggtccagaagactaagagtgagttcaatttttcaagcaagacgtatcaagagttcaatcactaccttacctccatggttgggtgcctctggacatcgaagccgtttggaaagggtatttacatagacccggagatcctggagaagacaggggtggcagagtacaaaaattcgttaaacgttgtgcaccatccgagcttcctgtcatatgctgtgtctttcctcctgcaggaaagccccgaagaaagaaccgtcaatgtgtcatccatccgcggcaagaagtggagctggtacctcgattacctgttcagtcagggccttcagggactaaaactcttcatccggtccagcgtccaccattcttctatcccaagggcggagggtatcaactgcaataatcagtattag

SEQ ID NO: 24401 - DNA, 933 bp, synthetic construct
  source 1..933: mol_type = other DNA; note = Synthetic coding sequence
atggccgacgccgccgccaccgccggcgccggcggcagcggcacccgcagtgggagtaaacagagcacaaaccccgccgataactatcacttagccagaagaagaactctgcaagtggtggtttcctccctcctgaccgaggcggggttcgaaagcgccgagaaagccagtgtggaaactttgacagaaatgctgcagtcctacatctctgaaattggccgaagcgctaaaagttactgtgagcacaccgccaggacacagcctacactctctgatatcgtggtcaccctcgtagaaatgggattcaacgtagacaccctgcctgcttatgcaaagcgatcccagcggatggtgattaccgccccacccgtgaccaaccagccagttacccctaaggctctgactgctggacagaatagacctcaccctcctcacatccctagtcatttccccgagtttccagacccacacacatacattaagaccccgacctatcgggagccagtgtcagactatcaagtcttaagggagaaggccgcttcgcaacgtcgcgacgtggagagagctttgactagattcatggcgaaaaccggtgagacccagagcttattcaaagatgatgtttccaccttccctctgatcgccgctcggccttttacaataccttaccttacggcgctcctgccgagcgagttagaaatgcagcagatggaggagactgactcttccgagcaggatgaacaaacagataccgagaacttggctctgcatatcagtatggaagattccggagctgagaaagagaatacgagtgtgctccagcaaaatccatctctgtcgggcagtaggaatggagaagagaatattatcgataacccgtatctccggccagtcaaaaaaccaaagatccgtcgcaaaaagtcccttagctag

SEQ ID NO: 24402 - DNA, 1935 bp, synthetic construct
  source 1..1935: mol_type = other DNA; note = Synthetic coding sequence
atggaggagaccatgaagctggccaccatggaggacaccgtggagtactgcttgttcttgatcccggatgagtctcgtgattccgacaaacataaggaaatcctccaaaaatatatcgagcgtataatcacgcggtttgctcccatgctcgttccctatatatggcagaaccaacccttcaacctgaaatacaaaccaggcaaaggcggtgtaccagcgcatatgttcggcgtgactaagttcggcgacaacatcgaggatgaatggtttatcgtatacgtgatcaagcagatcaccaaggaattccctgagctggttgccaggatcgaggacaatgatggagaatttttgctgattgaggctgccgacttccttcccaagtggctcgatccagaaaattccactaatcgggtgtttttctgccatggcgagctatgcattatcccagctccccgcaagagtggggctgagagttggttgccgacaacaccacctaccatcccccaggctctgaatatcatcaccgcacacagtgaaaagatcctggccagtgaaagcattcgggccgccgtcaacaggcgcatacgtggctacccggagaagattcaggcttctcttcacagagctcactgtttccttccagcgggcattgtggcggtcctcaagcaacgcccacgcctggtcgctgcggccgtgcaggccttttatctgcgcgatcctatcgatctgcgcgcctgccgggtcttcaaaacattcttgcctgagacaagaattatgacttctgtgaccttcacgaaatgcctgtacgcccagctcgtgcagcagcggttcgttcccgatcgacgctctggttaccggctgcccccacctagcgatccccaatatcgcgcacacgaactgggtatgaagctcgcccacggttttgagatactctgttccaagtgcagtccccattttagcgattgtaagaagtctctcgttacggcctccccactctgggcaagctttctggagagcttgaaaaaaaatgactattttaagggtctgattgaaggatccgctcagtaccgcgagcgacttgagatggccgagaactacttccaactcagtgtggattggcctgaatcctcacttgctatgtctccgggagaagagattctcacattactccagactatcccctttgacatcgaggacctcaagaaggaggcagcaaatctgcctcctgaagatgatgaccagtggttagacctctcgcccgaccagctggaccagttactgcaggaggcagtcggcaagaaggagagcgagtctgtcagcaaggaggaaaaggaacagaactatgatttaaccgaggtgagcgagtccatgaaggcctttatcagcaaggtttcaacacacaaaggcgcggaactccccagggagccctccgaagctcccatcacgtttgacgccgatagcttcctgaactacttcgataagatcttgggtccgagacctaatgagtcggattccgatgacctagacgacgaggatttcgagtgtcttgacagcgacgacgatctcgattttgaaacccatgaaccaggcgaagaggcttccctgaagggcactctagataacttgaaatcatatatggcgcagatggatcaggaactggctcacacttgtatttcaaaatccttcacaactcgaaaccaggtggaacccgtcagccagaccactgacaacaattcagatgaagaggattctggtacaggcgaatccgtaatggcccctgtcgatgtcgacttgaacctcgtctctaatattctcgaatcgtactcttctcaggccggtctagcgggaccagcgagcaaccttctccagtccatgggggtacagctccccgataacaccgaccaccggccaacatctaaacccacaaagaattag

SEQ ID NO: 24403 - DNA, 2163 bp, synthetic construct
  source 1..2163: mol_type = other DNA; note = Synthetic coding sequence
atgagcgtgagcggcaagaaggagttcgacgtgaagcagatcctgcgcctccggtggagatggttcagtcacccgttccagggctctacaaatactggcagctgcctacagcaggaaggctatgagcatcgaggtacccctgtacagggaaggctcaagtcgcacagtcgagacagaaacgggctgaagaaatcaaatagcccagtgcatcacaatattttggcccctgttccagggcctgcaccggctcaccagagagccgtgcagaacctgcagcagcacaacctaattgtccactttcaggccaacgaggatacacccaaaagcgttcccgagaagaacctttttaaggaggcctgcgagaaacgggcccaggatttggagatgatggcagatgacaacatcgaagactcaacggcacgtctggacacccagcactccgaagacatgaatgcaacccggtccgaggaacagtttcacgtaataaaccatgccgaacagacgctgagaaagatggaaaattatcttaaagagaagcagttgtgtgacgtgctcctgatagcaggtcacttgcggatcccagcccatagactggtcctgtctgccgttagcgattattttgctgccatgttcaccaatgacgtcttggaagctaaacaggaggaggtgcgaatggagggggtggacccaaacgcactgaattctttagtccagtacgcttacactggcgtactccaattaaaagaagacaccatcgagtcattactcgcggcagcatgtctgctccagctgacccaggtgatagacgtatgttctaatttcctcattaagcagctacatcctagtaactgccttggaatccgtagctttggcgatgcccagggctgcaccgagctcttgaatgtcgcccacaagtacaccatggagcacttcattgaggtgataaaaaaccaggaattcctgctccttcctgccaacgagatctcaaaactcttgtgcagtgacgacattaatgtgcccgatgaagaaacaatttttcacgccctgatgcagtgggtggggcacgatgtccagaacagacaaggagagctgggcatgctcctcagttacatccggctgccgctactgccaccacaacttttagccgacctggagaccagtagtatgttcactggcgacctggaatgccagaagctcctgatggaggcaatgaagtaccacctgctgccagagaggagaagcatgatgcagtcaccacgtacaaagccacggaagtccactgtgggggcgctgtatgccgtgggcgggatggatgccatgaaaggaactacaacaatcgaaaaatacgacttgaggacaaactcgtggctgcacatcgggactatgaatggcagacgcttgcagtttggagtggcagtgatagacaataagctctacgttgtgggtggtagagacggcttgaagacgctgaataccgttgaatgtttcaacccagtggggaagatctggacagtgatgccccccatgtctacacatagacatgggctcggagtggctaccctggaagggcctatgtacgctgtaggagggcacgatggttggtcctatctgaacacagttgaacgctgggaccctgagggacgccagtggaactacgtggcctccatgagcaccccgcgcagcaccgtgggagttgtggcgcttaacaacaagctatacgcgattggtggacgggatggatcctcgtgtctgaaaagcatggaatatttcgacccacacaccaacaaatggtctctctgtgctcccatgtctaagaggcggggaggtgtgggcgtggctacatataacgggttcctttatgtcgtcggggggcacgatgcacctgcttccaatcattgcagtagactgtcggattgtgtagaacggtatgatcccaaaggcgatagctggtccaccgtggctccgctaagcgtgcctagagacgcagtcgccgtatgtcctctgggcgataagctgtatgtggtaggcggttatgacgggcatacatacttgaacactgtggaaagctacgatgctcagcgaaacgagtggaaggaaagcatgcaagaactgttgcagaatttctataccacccagaaattaaaagaaaccctggggcactag

SEQ ID NO: 24404 - DNA, 2157 bp, synthetic construct
  source 1..2157: mol_type = other DNA; note = Synthetic coding sequence
atgagcgtgagcggcaagaaggagttcgacgtgaagcagatcctgagactgcgttggagatggtttagtcatccgttccagggaagtactaatactgggagttgccttcaacaagaggggtatgagcacaggggcacccccgtgcagggcagactgaagagccattcacgggacaggaatggactaaaaaagagtaatagccccgtgcatcataacatacttgcaccagtccccgggcctgctcccgctcaccagagggccgttcagaatctgcagcaacataacctcattgtccatttccaggcgaacgaggacactccaaagagcgtgccggaaaagaatctttttaaagaagcctgcgagaaacgcgctcaagacttggaaatgatggccgacgacaacattgaagactcaacggcacggttggacacccagcattcagaggatatgaacgctactcgcagcgaagaacaattccacgtgattaatcacgccgagcaaacactgcggaagatggagaactacttgaaggaaaaacagttgtgtgacgtcctcctgatagcagggcatctccggatccccgcccacaggctcgtgctgagcgctgtgagcgattacttcgcggctatgttcacaaacgacgtgttggaagccaagcaggaagaggttagaatggaaggcgtggacccgaatgcattaaacagcctcgtgcagtatgcgtatactggcgtgttgcagttgaaggaagataccatcgagtccctccttgcagcagcatgcctcctgcaactgacccaagtgatagatgtatgctctaactttctcataaaacagctgcacccctcaaattgtctgggcattaggtcatttggcgatgcccaaggctgtaccgagctgctgaatgtggcccataagtacaccatggagcacttcatagaagtcattaaaaaccaagagttcttgctgttgccagccaatgaaatttctaagctgctttgctcagatgacattaacgtacccgacgaagaaacaatcttccatgcgctcatgcaatgggtggggcatgacgtgcagaaccggcagggggagctcgggatgctgttatcttatattaggcttcctctacttccaccccagctactggccgaccttgagaccagctccatgtttaccggcgatctggagtgtcagaaattactaatggaggccatgaagtaccacctgctacctgaacgtaggagcatgatgcagagcccgcggacaaagccccggaaatccactgtgggagccctgtatgccgtgggcggcatggatgcaatgaaaggcaccacgaccatcgaaaagtatgatctcaggacgaattcctggcttcatatcgggaccatgaatggcaggcggctgcaattcggcgtagcggtgatagacaataagctctacgtcgttggcggccgcgatgggctgaaaactcttaatacagtcgaatgctttaaccccgtcggaaaaatatggaccgtcatgcccccgatgtcaacacataggcacggcctaggggtcgcaaccctcgagggtccaatgtatgcggtaggcggccacgatggctggtcctaccttaatactgtcgagagatgggaccctgaaggccggcagtggaattacgtagcatctatgtctacacccaggtcgactgtgggggtagtggccttgaacaacaagctatacgctattggcggtcgcgatggaagttcgtgtcttaagtctatggaatactttgatccacacaccaacaaatggagcctttgcgcccctatgtccaagcggcggggtggagtcggcgtcgctacatataatggcttcctgtatgtcgtgggaggccacgatgccccggctagcaaccactgcagtagactgtcggattgcgtcgagcgatatgatccgaagggagactcttggagcaccgtggcccctctgtccgtaccccgtgacgccgtggccgtctgtcccctgggagacaagctctacgtggttggcggatatgatggtcacacgtatctgaacaccgtggagtcatacgacgctcagaggaatgagtggaaagaagaggttccagtgaacattggacgggccggcgcatgcgttgtcgtcgtaaagttgccctag

SEQ ID NO: 24405 - DNA, 1134 bp, synthetic construct
  source 1..1134: mol_type = other DNA; note = Synthetic coding sequence
atgaacggccccgtgagccccaagagcaaggcccggcccagcagcccaagtacatcctggcacaggcccgcttccccttgtccaagcccaggccccggacacaccctacctccaaagccaccttcacctaggggaacaaccgcaagtcccaaaggtagagtacggcgaaaggaggaggctaaagaaagtccatcagcagctggcccagaagataagtcacagtctaagcgccgcgcctcgaatgagaaagagtccgccgccccagcgtctcctgcacctagccccgcccccagcccaactccggcccccccacagaaggaacaaccacccgccgagacaccaacggctcccgcgccaccagtgacaccttccaagcctatggctggcaccactgaccgcgaggaggccacccgcctactggccgaaaagcgccggcaggctagggagcagcgtgagcgcgaagagcaagaaaggcggttacaagctgagagggacaaaagaatgagagaggaacagctggccagagaggctgaggccagagcggagcgcgaagccgaggctcgccggagagaagaacaggaggctagggaaaaagcacaggcggaacaagaggagcaggagcgcctgcagaaacaaaaggaggaagccgaagcgcgaagcagagaagaggccgaacgccaaaggttggagcgtgaaaagcactttcagcagcaagagcaagaaagacaggagagaagaaaaaggcttgaagagattatgaaacgcacaagaaagtccgaagtttctgagacaaagaaacaggattccaaagaagctaatgccaacggttcatcacctgagccagttaaagccgtggaggcccggtcccctggcctccaaaaagaagctgttcagaaggaagagcccattccccaggagccccagtggtcactccccagcaaagagctcccagcttcactggtaaacggtctgcagcctctccctgctcatcaggagaacggcttttcaaccaatgggccctcaggagacaaatcactgagtcgcactcctgagaccctcttgccttttgcggaggccgaagcctttctgaagaaggccgttgtgcagtctcctcaggtcaccgaggtgttgtag

SEQ ID NO: 24406 - DNA, 2427 bp, synthetic construct
  source 1..2427: mol_type = other DNA; note = Synthetic coding sequence
atggagagcggcccccgggccgagctgggcgccggcgccccccccgccgttgttgccaggactccccccgaacctagaccctccccagagggagatccttctccgccccccccaccaatgagcgcgttggtaccggacacacctccggatactcctccagccatgaagaacgctacctcctccaagcaactccctctggagcccgaatctccatctggccaggtcggtccccgccccgcaccaccacaggaagagtcgccatccagtgaggccaaaagtcggggccccacccctcctgcgatgggaccacgagatgcacgtcctcccaggaggtcctctcaacctagcccaaccgctgtgcctgcgtccgactcccccccaaccaagcaggaagtgaagaaagccggcgaaagacacaagctggccaaggaaagacgcgaagagagggccaagtacctggcggccaagaaagccgtctggctggaaaaggaagagaaggccaaagccctgcgggagaagcaactgcaggaacggcggaggcgactcgaggagcaaagactgaaagcagaacagagaagagccgctttggaagaacggcagcggcaaaagcttgaaaagaacaaagagcgctatgaggccgccattcagagatccgtgaagaaaacctgggctgaaatcaggcagcagcgctggtcttgggccggcgccttgcaccattcaagccccggtcataagacatctggaagcagatgttcagtctccgctgtaaatctgccaaaacatgtggattccattatcaacaaacgccttagcaagtcttctgctacactttggaactcgccaagcaggaaccgttcactacagctgagtgcctgggaatcctctatagttgatcggctgatgactccaaccctcagtttcctcgccaggtcccgaagcgccgtcacactgccgcggaatggcagggatcaggccgttcccgtctgtcctaggagcgcttctgcttccccattgacgccctgtagtgtcacacgctcagtccaccggtgcgctcccgctggagaaagaggcgagaggcggaaaccaaatgccggtggaagccctgccccagtgagacggagaccagaagccagtcccgtgcaaaagaaagaaaagaaggacaaagaacgcgaaaacgagaaggagaaatccgctctcgcgagggagcgatctctcaaaaaaaggcaatccttacctgcatcgcccagggctcgcctcagcgccagcacagcttccgaactgagccccaagtccaaagctcgcccttcctcaccttcaacatcctggcatcggccagctagcccttgtccctcacccggtccgggacacacccttcctcccaaacccccatctccacgaggaaccacagccagccctaagggccgcgtcaggcgaaaggaggaagctaaggagtctccttccgccgcaggccccgaggacaagtcacagtccaaaaggagagcttctaacgaaaaagagtcagctgcgcctgcttcccctgcacccagcccagccccaagtccgactcccgcaccacctcagaaagaacaaccccccgcggaaaccccaaccgatgcagcagtactgacatcaccccctgcccctgcaccccctgtgacaccaagcaaaccaatggccggcactactgaccgcgaggaagctacgaggctgctggcggagaagcgacgacaggcccgtgagcaacgtgaaagagaagagcaggagaggcggcttcaggctgaaagggataagcgcatgcgggaggagcaactggcccgagaagcagaggcccgcgctgagagggaggccgaagcgagacgtcgagaggagcaagaggctcgcgagaaagcccaggctgaacaagaggaacaggaaagacttcaaaagcagaaagaagaagcagaggcaaggagcagggaagaggcagagcggcagaggctcgaaagagagaagcattttcaacaacaagagcaggagaggcaggaacgaaggaaacgtctcgaagaaatcatgaaacggacaaggaagtcagaagtcagcgagactaagaagcaggatagcaaggaggccaatgcaaacggcagctctcccgagcctgtcaaagctgtggaggccagatcaccaggtcttcaaaaagaagcggttcaaaaggaggaaccgatacctcaggagcctcagtggtctctgccctctaaagaactgcctgctagtctggtaaatgggctccagccacttccagcacaccaggagaacggattctcaacgaacggtccttccggggacaagagcctctccaggaccccagaaaccttactgcccttcgcggaggccgaggcttttctgaagaaagccgttgtccagtcgccacaggtgacagaagtgttgtag

SEQ ID NO: 24407 - DNA, 2526 bp, synthetic construct
  source 1..2526: mol_type = other DNA; note = Synthetic coding sequence
atggagagcggcccccgggccgagctgggcgccggcgccccccccgctgtggtggcgcgaaccccacccgagccccgaccttctccagaaggcgatccctcccctccaccaccaccgatgtcagcgctggtacccgacaccccgcccgacactccacccgccatgaagaatgctacgagcagcaaacagctgcctctggagccagaatctccatctggacaggtaggccctcgccccgcacctccccaggaagaaagcccttcgtcggaggcgaagtcccgcggtcctacaccgcccgccatgggacctagagatgcacgccccccaaggcgaagcagccaaccgtcccctactgccgttcctgcctcagattcacctcccactaaacaagaagtcaagaaagctggcgagcgacataaattggctaaggagcgccgcgaggagagagccaagtatttggctgcaaagaaggctgtctggttggaaaaggaagagaaagctaaggcgctgcgggaaaagcagctgcaggagcgacgtcgaagactggaagaacagaggctcaaggccgagcagcgccgagcagccctcgaggagcgccagcgccagaagcttgagaaaaacaaggagagatatgaagctgcgattcagagaagcgtgaaaaaaacgtgggctgagataagacagcaaaggtggtcttgggcgggagcgttgcatcactcaagcccgggccataagacgagtgggagcaggtgctccgtaagcgccgtcaatcttccaaagcacgtggatagcatcatcaataagaggctgagtaagtccagcgccacgctgtggaactcaccatcacgtaacagatctctgcagctgtcagcatgggagtcaagtattgttgaccggctgatgaccccgaccctgagctttctcgcgcgatccaggtctgccgtgacgctaccccgcaacggccgggaccagggccggggttgtgatcctggcagaggaccaacgtggggcagagccggggcgtctctcgcccgcgggcctcagcctgacagaactcacccttcggcagcagtgccagtttgccccaggtcagcaagcgcgtcccccctcactccgtgctcggtgacgcgaagcgtccatcggtgtgcccccgcaggggaaagaggcgagcggagaaagcctaatgccggaggtagcccggccccagtccgacggcgccctgaggccagtcctgttcagaaaaaggagaagaaagataaggaacgcgaaaatgagaaggagaagtcggctctcgcccgcgaaaggagtctcaaaaaaaggcagtcactgccggcctcccccagggcaaggctaagcgcatcaaccgcctctgagctctcacccaagagcaaggctaggccttcatcaccatcaacatcctggcatcgacccgcttctccctgccctagtcccggacccggccacaccctccccccaaaacctccttcacctcggggcacgaccgcaagccccaagggccgagttcggcggaaggaagaggctaaggagtcaccttctgccgctggtcctgaggataaatctcagagcaagagacgggcctccaatgagaaggagagcgccgctcccgcttccccagcaccgtccccagcccctagcccaactcctgcgcctccacagaaagaacagcccccagcagagacacctaccgacgcggccgtgctgacatccccccctgcgcccgctccgcccgtgacacccagtaaaccaatggcgggaacgacggacagagaggaggctacacgcttgcttgctgaaaaaagaagacaagcaagagaacagagggagcgcgaagagcaggaacgccggctgcaggccgaacgagataagagaatgcgagaagagcagctggcgcgcgaagccgaagctagagccgaacgagaagcagaggccaggagacgagaggaacaagaagcacgtgaaaaggcgcaggccgaacaggaggagcaggagcggctgcagaaacaaaaggaagaggctgaggcacgcagccgggaggaagccgagcgacagcgcctggagcgtgagaagcattttcagcagcaggagcaggagagacaggaaaggagaaagcgcttggaggagattatgaagcggacccggaaaagcgaggtttctgagaccaaacagaaacaggattcgaaggaggcgaacgcaaatggcagttcccccgaacccgttaaggctgtggaggcacggagcccaggcctacaaaaggaggcggtccaaaaggaggagcctatcccgcaggagccccagtggtcactgcccagtaaggaactcccggccagccttgttaacggcctgcagcctcttcctgctcatcaagaaaacggattttcaaccaacggtcccagcggtgacaagtcactaagtcgcacaccggaaacattactgccctttgcggaggcagaagcttttctgaaaaaggctgttgtgcagtcaccccaggtgacggaggtgttgtag

SEQ ID NO: 24408 - DNA, 495 bp, synthetic construct
  source 1..495: mol_type = other DNA; note = Synthetic coding sequence
aacctgcccaagcacgtggacagcatcatcaacaagcggcagcggttggagcgcgaaaagcactttcagcagcaggagcaggaacgacaggaacgtcgtaaacgactggaggagataatgaaacgcaccaggaaatctgaagtatctgagacaaaaaagcaggactctaaagaagcaaatgcaaacggaagtagccctgaaccagtgaaggctgtggaagcccgatctcctgggctgcagaaggaagccgtacagaaggaagaacccatcccgcaggagccgcagtggtccttaccttccaaagagttgcccgcctctctcgtgaatggtctccaacctctgccagcacaccaagagaatggctttagcactaacgggcccagcggtgataagtcattatccagaaccccggaaaccttactccctttcgcggaagcagaggcctttctaaagaaagcagtggtgcagtccccacaggtaacagaggtgctttag

SEQ ID NO: 24409 - DNA, 345 bp, synthetic construct
  source 1..345: mol_type = other DNA; note = Synthetic coding sequence
atggtgatccgggtgtacatcgccagcagcagcggcagcaccgccatcaagaaaaagcagcaggatgtccttggctttttagaagctaataagattggattcgaagaaaaggatatcgcggcaaacgaggagaataggaagtggatgcgcgaaaatgttcccgagaacagtcgacccgcgacaggctatccactccccccacagatcttcaatgaaagccagtacagaggtgactatgacgcttttttcgaagcccgcgagaacaacgccgtctatgcatttctagggctgacagctccccctgggtcaaaagaagctgaggttcaggctaaacagcaggcttag

SEQ ID NO: 24410 - DNA, 537 bp, synthetic construct
  source 1..537: mol_type = other DNA; note = Synthetic coding sequence
atgagcggcttcagcaccgaggagcgggccgcccccttcagcctggagtatcgcgtgttcttaaaaaacgaaaagggtcagtatatcagcccctttcacgatatcccaatctatgctgataaggacgtgtttcatatggttgtcgaagtccctcgatggtctaatgctaagatggaaatcgcaaccaaggaccctctgaatcccattaagcaggacgtgaaaaagggcaagttaaggtacgtggccaatctctttccatacaagggatacatctggaactatggggccatcccccagacatgggaagaccctggacacaatgataagcacacgggctgttgcggtgataatgaccctatcgacgtgtgcgagatagggtcgaaggtttgcgcccgcggtgagatcatcggtgtgaaggtccttggcatcctggcgatgattgacgagggcgagacggattggaaggtcatagcgatcaatgttgatgatcccgatgctgctaattataatgtatgcaattccgtggttattctgtag

SEQ ID NO: 24411 - DNA, 870 bp, synthetic construct
  source 1..870: mol_type = other DNA; note = Synthetic coding sequence
atgagcggcttcagcaccgaggagcgggccgcccccttcagcctggagtaccgtgttttcctgaagaacgaaaaaggccaatacataagcccttttcatgacattccaatttatgctgataaggatgtgttccacatggtggttgaagtgcctaggtggtcaaacgcgaagatggagatagcaacaaaggatcctctgaatcccataaaacaggatgtaaagaaaggcaaactgcggtatgtggctaacttgttcccttacaagggctatatttggaactatggggcaatccctcagacatgggaagacccagggcacaacgataaacatactggttgctgtggggacaatgaccctatcgatgtgtgcgagattggctcaaaggtttgcgcccggggagaaatcattggggtcaaagtactgggcatactggcaatgatcgatgagggcgagaccgactggaaggtgatcgccatcaatgtggacgatcccgatgccgctaactacaatgacattaatgacgtgaagaggctaaagcccggctatctcgaggcaacagtcgattggttccgacggtataaagtgcccgatgggaaaccggaaaatgagttcgctttcaatgctgagtttaaggataaagacttcgctatagatatcattaagtccacgcacgatcactggaaggccttagtaacaaagaaaactaatgggaaggggatttcttgtatgaacaccactctgagtgagtcaccattcaagtgcgatcccgatgcagctcgtgccatcgtagacgcgctgccaccgccctgcgaatcagcctgtaccgtcccaactgatgtcgataagtggtttcaccatcagaagaactag

SEQ ID NO: 24412 - DNA, 2103 bp, synthetic construct
  source 1..2103: mol_type = other DNA; note = Synthetic coding sequence
atgaccgagcggtgcagcctgtggagcgccctgagcgccgccgcctgttgtttctataggggctcgtttgtacagttttccaaggagaagtacatcctcgacagtagtccagagaaactgcacaaggagctcgaggaggagctcaagctctcgagtaccgatttgcgctcacatgcctggtaccacggccggatacctagggaggtgagtgagacccttgttcagcgcaacggcgattttcttatcagggattcacttacaagtttgggcgactatgtgctgacatgcaggtggagaaaccaagctctgcactttaaaatcaacaaagtggtggttaaggccggggaaagttatacacatattcagtacctgttcgagcaggagagctttgaccatgtacccgccctggtgagataccacgtcggctctcggaaggcagtttctgagcagagtggcgccatcatctattgcccagtgaatcgtaccttcccactgcgctatcttgaggcctcctacgggctagggcagggatcctccaaacctgccagccccgtttctccgtctggtcccaaggggtcccatatgaaaagacggtccgtaactatgacggatggcctgaccgctgacaaagttactcgctctgatggctgccctacgtcaacatctctcccacgcccccgcgactcaatcaggagttgcgccttgtcgatggatcagatacccgaccttcattccccgatgagtccgatctctgaaagcccatctagcccagcttattcaaccgtgacacgggtccatgccgctccagccgcccctagtgccactgccctacccgcatcgcctgtcgcacgaaggtcgtcggaacctcaattatgtccgggtagcgctcccaagactcatggtgagagtgataaggggccacacacatccccctcacacacactggggaaagccagcccatcacctagcctcagtagctacagtgatccagattcaggacattactgtcaactgcagccaccagtgaggggatctagggagtgggccgctaccgagacatcctctcagcaggcaaggtcgtatggcgagagactcaaggaactgagcgaaaatggtgcgccagaaggagattggggcaagacctttaccgtgcctatcgttgaagtgacatcttcctttaacccagcaacatttcagagccttttaatcccccgcgacaatcgaccgctggaagtcggcctattacggaaagtgaaggagttgttagccgaagtggatgcccggactctggctagacatgtgacaaaggtagactgtctggtcgcacggatcctgggcgtaaccaaagagatgcagacattaatgggagtgagatgggggatggaactgttgacgctaccacacggacgacagttaaggctcgaccttctggagaggttccacaccatgagcataatgctggcagtggacatactgggatgcaccggctctgccgaggaacgcgccgccctgctccacaagactatccagcttgcagcagagctcaggggaacaatgggcaacatgtttagcttcgcagcagtcatgggagccctcgacatggcacagatttctagactcgaacaaacatgggtcacacttaggcagcggcacactgaaggcgccatcctctacgagaagaaactgaaacccttcctgaaatccctgaacgaaggaaaagagggaccacctcttagcaatactaccttcccccatgtgctgccgctgatcaccctcctggaatgtgactccgctcccccggaaggcccagaaccgtggggtagcaccgagcacggcgtggaggtggttctcgcccacttggaggccgccaggaccgtagcacatcacggaggcctgtatcatactaatgccgaggttaagctgcaggggttccaggcacgtcctgagcttcttgaggtgtttagtaccgaatttcagatgcggctgctgtggggtagccaaggcgcctctagctctcaagctagaagatatgagaaattcgacaaggtcttgacagccctgagccacaaattggagcccgccgttcgatctagcgaattgtag

SEQ ID NO: 24413 - DNA, 2379 bp, synthetic construct
  source 1..2379: mol_type = other DNA; note = Synthetic coding sequence
atggcccccgccctgcccagcccccacaaggccgtggcccggcccgagctgctactcgatacagcagcgcattccggtaaattacgcgcaccagatggaggggagggggcagaatgcgccggccataatggcgggcctagctggggagtcgggcagggccaatcccaggagccatcccggcaaggcataccccaggccccttggctggtgtcctggcagaggcgagggtttcccccctcgagcttctgccctggcccattaagaaccgagaagttgcgggccggccgctgtccgctcctgctttgcggtggtgctgctggagaacctgaagctggaagtgattacgtcaagttttctaaagagaagtacattttggattcaagcccagagaagctgcacaaggagttagaagaagagctcaagctgtcctctactgacctccgctcccacgcctggtaccatggccgcattccccgagaagtttccgaaacactggtccagagaaacggcgacttcctgatacgcgattcactcacatccctgggcgattatgttctgacttgtaggtggagaaatcaggccctgcactttaaaatcaacaaagtagtcgtcaaagcgggggaaagttacacccatatacagtacctgttcgaacaagaatctttcgatcacgtgcccgccctcgtgaggtaccacgtaggctcgcgaaaggccgtgtccgaacagagtggcgctataatatactgtccggtcaaccgcacttttccactgcggtacctagaggcttcctacgggttggggcagggctctagtaagcccgctagccctgtgtccccgtctggaccaaagggtagccatatgaaacgtcgctcagtcaccatgaccgacggcctaactgctgacaaagtgacccgatcggacgggtgtcctacctcgacttccttaccccggccaagggattctattaggtcctgcgccctgtcaatggaccaaattccagacctgcacagtcccatgagcccgatctccgagtccccttccagccctgcttattcaaccgtgactcgcgtgcatgcagcccccgcagctccaagcgccaccgccctgcccgcatcccctgttgcacgcagatctagcgagccccaactgtgccctggtagcgcgccaaagacccatggcgagtcagataagggaccccacacgtccccaagtcatacactgggtaaggcctcgccatccccgtctctgagttcatactctgacccagattctgggcactactgccagctgcagcctcctgtgcggggctcaagggaatgggctgcgactgagacatcctctcaacaggcccgctcatacggtgagagactcaaggagctgagtgagaacggagcccccgagggcgactggggcaagaccttcacggtcccaatcgtagaggtaacctcttcttttaacccggccacatttcagtctctcctaatccctagagataaccgccctctcgaggtgggactgctcaggaaggtcaaggaactgttggccgaggtcgacgccagaacgctggcccggcacgttacaaaagttgactgcttagtcgcccggatcttgggtgtgactaaggaaatgcagaccctgatgggggttaggtggggaatggaattgttgacattgccacatggccgccagcttcgtctggatttgctggagcgtttccacactatgtctatcatgttggccgtggacatcctcggttgcacagggtctgccgaggagagggcagccctgctgcacaagactattcaactggccgccgagcttcggggaacaatgggcaacatgttctctttcgctgcagtcatgggggccctggatatggcccagatctcgcggttagagcagacttgggtgacgttaaggcagcggcacactgagggggccatcctatatgaaaagaagttgaagcccttcctgaagtccctaaatgagggcaaggaaggccctcccttgagtaatacgacattcccacatgtgcttccactaattaccctgttagaatgcgacagtgctccccctgaggggccagagccctggggcagcacggagcatggcgtcgaagtagtcctcgcccacctggaggctgctcgaaccgttgcccatcacggaggtttgtatcataccaacgccgaggtcaagctgcaagggtttcaggcccgccccgagctactcgaagtgtttagcacagaatttcaaatgcgcctgctgtggggttcccagggagcatcatcgtctcaggcccgtagatatgaaaagtttgataaagtgcttacagccctgtcccataaactggaaccggccgtccggtcttccgaattgtag

SEQ ID NO: 24414 - DNA, 2112 bp, synthetic construct
  source 1..2112: mol_type = other DNA; note = Synthetic coding sequence
atgaccgccgtgggccggcggtgccccgccctgggcagccggggcgcagccggggagcctgaagcgggtagtgactatgtgaaatttagtaaagaaaaatacatcttggatagttcccccgaaaagctccataaagaactggaagaagaactgaaactgtcatcaacagatctgagaagccacgcttggtatcatggccgcattccccgggaggtgtcagaaacgctggttcagcgcaatggcgacttccttattagagattccttaactagtctgggggactatgtgctcacttgcagatggaggaaccaagccctgcatttcaagattaataaggtggtcgtgaaggctggtgaatcatatacccatatccagtacttgttcgagcaggaatcttttgatcatgtgcccgccctcgttcggtatcatgtgggaagtcgaaaagccgtgagtgagcagagcggggcaatcatctactgccctgtcaaccgcaccttccccctgagatatctcgaggcatcctacggcctaggccagggcagcagcaaacccgcatcacccgtctctccatctggccctaagggcagccacatgaagcgacggtctgtgacaatgacagacggactcacagctgataaagtcacacgcagcgatggttgtcccactagtacaagcctgcctcgtccacgtgactctatccgatcctgtgcccttagcatggaccagatccccgacctacattcccctatgtcccccatctctgagtcccccagtagtcccgcgtactccaccgtgactcgagttcacgcggcccccgccgctccatccgcgaccgccctgcccgcttctcctgtggcgagacgctctagtgagccccagctttgccctgggtctgccccaaagacccacggggaatctgacaaaggcccccacacttcgccctcccacaccttgggcaaagcaagcccgagtcctagcctgagctcatactccgatcccgactcagggcattactgccagcttcagcctccagtaagaggctctcgcgaatgggctgccacagagacatccagccagcaagccagatcctacggggagcggttgaaagagctgagcgaaaatggcgcccctgagggggactggggcaagacatttacagtgcctatcgtggaagtaacctcttcatttaaccccgcaaccttccagtcattgcttattccaagggataacagaccgcttgaagtgggccttctcagaaaagtaaaagaactcctggcggaggttgacgcacgcacacttgcgagacacgttacaaaagtggactgtctggtagcacgtattctgggggtgaccaaagagatgcagaccttaatgggcgtgagatggggcatggaactcctgactctgccccacggacgacagttaagactggatctcctggaaagattccacactatgtctatcatgctggctgtggacattctgggatgcacgggtagcgctgaggaacgcgctgcgctgctgcacaagacaatccagctggccgccgaactgagaggcaccatgggaaacatgttctcctttgctgctgtgatgggcgccctggacatggcacagatcagccgcctggaacaaacctgggtgacactgcgacagcgccatactgagggcgcgatcctgtacgaaaagaaattgaaacctttccttaagtctctcaacgaaggaaaggagggcccccccctgtctaacaccactttccctcacgtgctgccactcatcaccctcctggagtgtgatagcgctccgcctgagggccctgagccatggggttccacggaacacggcgtggaagtggtcctggctcatctcgaggcagctcgcaccgtggctcatcacggcggtctgtatcacaccaacgcagaagtgaaacttcaggggtttcaggctagacctgagcttctggaagtctttagcacggaatttcagatgcgactcctctgggggagccagggggcttcctcatctcaagctaggcggtatgagaagttcgacaaggtcctgacggcccttagtcacaagttggagccagcagtacggagtagcgaactgtag

SEQ ID NO: 24415 - DNA, 1869 bp, synthetic construct
  source 1..1869: mol_type = other DNA; note = Synthetic coding sequence
atggaccagctgccccagaagaacctgctgcggctgcaccccgccggctctgccggatgttctaccggggtggaatcctcttcaatggacggcttctggatggaagtggaacagattcaacaacgcgatgaactgagagaggaagactcaggcggtaacgaggggcagctgcccgaggagggcgaagccgaatcacagtggctccaagatactggactttcaggtcttttgggcggtctgggactggacggagaccatcaagagctgctctcgacactaacacagactcaagtggcagccgtctgcagaagactggatatttatgcacggtctgttaggagacagcacaagacaccggtgagagacgtacgggacgtattcggggttttcaactccggcaagatgtcctccgagaatggggattcaggcatgaagggggcgcagctgagttctggggcaagcaaattccctcctgctgcggagccagggggcctgcaagagcaggctggccgagaggaggcctttaatatggactccgcttactctgagcaggcagccgtcttgctccagcgatccaggccaagccgaggcgggaccagcgcttggggaaagtgctccctgcctaaattcactgtgcccaaggggcggcttggcgtcacaagaatcggagatttgagtctccaggatatgcggaaagtcccatctctggcattgattgagctgacagcactctgtgacatcctgggactggaccttaagcgatctaaagcagggaaatggaaagccgctgagactcgcctgtttggcgttcctctggatagtctgctcgaggcagatcacaaggtgctcccctcaacccaggtccccttggtgcttcaagccctgctgtcttgtctggagaaaaggggtctcgacatggaggggattctcagggtcccaggctctcaggcgagagtgaaaggcttggagcagaagctcgagcgcgatttttacgccggtctcttctcttgggacgaagtccaccacaatgacgctagcgatctgcttaaacgctttatccggaaactgcccacacccctactgacagccgaatacctgcctgccttcgctgtggtgccaaatatcccaaacctgaaacagagactgcaggtccttcacctactgattctgattctgcctgagcctaatagaaatgcgctgaaagcactactggaattcctcaggaaggtcgtcgctcgtgagcagcacaataagatgacattgaggaacgtaagcactgtgatggctcctaacctgtttctacaccagggaagacccccaaagctcccaaaaggcaaggaaaagcagcttgccgaaggagcagctgaggtagtgcagattatggtgcactaccaggatctactgtggacggtggcatcgtttctggtcgctcaagtgcgaaagctgaatgattcgtcctctagaagaccacagctatgcgacgcgggcctgaagacatggttgagacgcatgcacgctgaccgggataaggccggcgacggactggaagctactcccaaggtggccaagatccaggtggtctggccgatcaaagatcctctcaaagttcccctgaccccctccacaaaggtcgcacacgtgttgagacagttcaccgagcatctctccccaggctcgaagggccaggaagacagcgaagatatggatagcctgctcctccaccaccggagcatggaaagtgctaatatcctactgtacgaagtaggtggcaatatcaacgaacaccgtctggaccctgatgcatacctgctggacttgtacagagccaatcctcacggagagtgggtcctcaagcaaaatccaacatag

SEQ ID NO: 24416 - DNA, 846 bp, synthetic construct
  source 1..846: mol_type = other DNA; note = Synthetic coding sequence
atggccaccgagctgcagtgccccgacagcatgccctgccacaaccaacaagtgaacagtgcttccacccccagtccggagcaactccggccaggcgacttaattctcgaccacgccggtgggaaccgagcctccagagccaaggtcatcctcttgacgggctacgcccacagctcccttcccgccgagctggattctggggcatgtggaggcagtagcctgaactctgaaggcaattcaggctcgggcgattctagctcttacgacgctcccgctggaaactccttcctcgaggattgcgagctaagccggcagatcggtgcgcagttgaagcttctgcccatgaatgatcagatccgggagttacagactatcatacgagataaaaccgcaagccggggcgactttatgttttctgccgaccggctaatcaggctcgtggtcgaggaaggcctgaatcaattaccgtacaaggagtgcatggtgacaactcccaccgggtacaagtatgagggcgtgaagttcgagaagggtaattgtggagtctccattatgcgctcaggagaagctatggagcaaggcctcagagactgttgccggagcattaggatcggaaagattctcatacagtctgatgaggagacacagcgtgcaaaagtatactacgctaagtttccgccggacatctataggcgcaaggtactgttgatgtatccaattcttagcactggcaatactgttattgaagccgtgaaagtcctaatcgagcacggagttcagcctagcgttattattctcttgtcactgttttcaacaccacacggggaattttccatgcgtcagtag

SEQ ID NO: 24417 - DNA, 930 bp, synthetic construct
  source 1..930: mol_type = other DNA; note = Synthetic coding sequence
atggccaccgagctgcagtgccccgacagcatgccctgccacaaccagcaggtgaacagcgcctccaccccttctccagaacagcttcgaccaggtgatctgatactcgaccatgctggcggcaaccgcgcctctagggcaaaggtgatactgctgacaggatacgctcactcctcactgcctgcagagttggattccggtgcctgtggtgggtctagtctgaatagtgagggtaattctgggtctggcgactcttcttcctatgacgcacctgctggcaattcctttttagaggactgtgaattgtcacggcagataggagcccagctgaaattactgccaatgaacgaccagatcagagaattgcagactatcatacgggataagacagcctcaaggggcgatttcatgttcagcgcggatagactgatccggctggttgtcgaggagggccttaatcagctgccttataaagagtgtatggtcactaccccaacagggtataagtatgaaggcgtcaagttcgaaaagggcaactgcggagtgagtattatgcggagcggcgaggcaatggaacaaggtctgagagattgttgccgctctattcgcattggaaagattctcattcagtccgatgaggaaacccagcgcgcaaaagtgtattatgcgaagtttcctcccgatatctataggaggaaggttctccttatgtaccccatactgagtacaggcaatactgtcatcgaagctgtaaaggtgctgattgagcatggtgtgcaaccgtccgtgatcattctgctgtcattgttcagcaccccccatggggcaaaatcgataattcaagagttccccgagattaccatcctcactactgaggtgcacccagtcgcccccactcactttggccaaaagtacttcgggaccgattag

SEQ ID NO: 24418 - DNA, 633 bp, synthetic construct
  source 1..633: mol_type = other DNA; note = Synthetic coding sequence
atggtgagcggcagcgagcagaagttcctgatcggcctgggcaagtcacaaatctatacatgggacgggcgtcaatcggacaggtggatcaaattggaccttaaaacagaactaccacgggacacactcttgtccgtggaaattgtgcatgaacttaagggggagggtaaggctcaaagaaagatctctgcaattcacatcctggatgtgttggtgctgaatgggacagatgtccgggagcagcatttcaaccagcgcatacaacttgctgagaagtttgttaaagccgtcagcaaaccaagcaggcccgacatgaatccgatccgcgtgaaggaggtctatagactggaagagatggagaaaatttttgtccgattggaaatgaaaatcataaagggcagttcagggactccaaaactgtcctacactggacgtgacgataggcactttgttccgatgggactatacattgtgcggaccgtgaatgaaccatggaccatgggcttcagtaagagcttcaagaaaaaatttttttacaataaaaaaaccaaagactctacatttgacctgccagccgattccatcgccccttttcacctaccctctctcgcatgtctgtccaaaatggattag

SEQ ID NO: 24419 - DNA, 1119 bp, synthetic construct
  source 1..1119: mol_type = other DNA; note = Synthetic coding sequence
atgaagcggcggaccgaccccgagtgcaccgcccccatcaagaagcagaaaaaaagagtcgcagaactagcactgagcctgtccagcacctctgatgatgaaccaccatcatctgtaagccacggagctaaagcttctacaacatctctgtctggtagtgattcagaaacagagggcaagcagcactcatctgactcgtttgatgacgccttcaaagcagactctttggtcgagggaacctcttccagatactcgatgtataactccgtgtctcagaagctgatggcaaagatggggttcagagagggcgaagggttgggcaagtacagccagggccgcaaagatatcgtggaagcatcctcccagaaaggccgccgggggctgggactcactctgagaggattcgatcaggaacttaacgtggattggcgggacgagcctgaaccgtctgcctgtgagcaggtatcttggtttccagaatgcaccaccgaaattcctgacacgcaggagatgagcgactggatggtagtggggaaacgtaagatgataattgaagacgagaccgaattctgcggtgaagagctcctacatagtgtccttcaatgcaaaaaacccctagtcaaggatagagaggcagagctcctttacttcgccgacgtctgtgccggccccggtggcttcagtgaatatgtcttatggcgcaagaagtggcacgccaaagggttcggcatgactctcaagggccctaatgacttcaagctggaagatttctacagcgctagctccgagctcttcgagccttactacggcgaaggcggcatagacggcgacggggacattactcggcctgaaaatataagcgcttttcgcaactttgtgttggataataccgaccgtaaaggtgtgcatttcttgatggccgatggtggcttcagtgtcgaaggacaggaaaatctccaggaaatcctatctaaacagttgctcctgtgtcaatttcttatggctctgtctattgtacgcaccggcgggcacttcatctgcaagaccttcgatctgttcacccctttctccgtgggattagtctaccttctctactgctgctttgagcgtgtttgctag

SEQ ID NO: 24420 - DNA, 615 bp, synthetic construct
  source 1..615: mol_type = other DNA; note = Synthetic coding sequence
atggccggctacctgagcgagagcgacttcgtgatggtggaggaggggttcagcacaagagatctgctcaaagaactgactctcggggcttcacaggcaaccacagacgaggtggctgcattttttgtggctgatcttggcgcaattgtccgtaaacacttctgctttctgaagtgcctgccacgcgtgaggcccttttacgccgtgaagtgtaactcctcaccaggcgtacttaaggtgctcgcgcaactgggcctagggttctcctgtgctaataaaatcgctagcgtaataaattcagcactggacctgtacttccccgagggctgtggagtggatatttttgctgagttgggcagatactacgtgacgagtgccttcacagtcgctgtgtccattatcgccaaaaaggaagtcctgctagatcaaccaggacgggaggaggagaacggcagcacatccaagacaatcgtgtaccatctcgacgagggtgtgtacggaatttttaatagcgtactgttcgacaatatctgccccacccccattctgcaaaaatccaagaaccactcgccctgttatatgtctctggagagtatccacttcattgctgtgtag

SEQ ID NO: 24421 - DNA, 1443 bp, synthetic construct
  source 1..1443: mol_type = other DNA; note = Synthetic coding sequence
atggccggctacctgagcgagagcgacttcgtgatggtggaggaggggttcagcacccgtgacctgctgaaagagctgacattaggcgcttcacaagctaccaccgacgaggtggcagctttttttgtggcggacctgggagctatagtgaggaagcacttctgtttcctgaagtgcctcccccgggtgagacctttttatgctgtgaaatgcaattcttcgcctggcgtcctgaaagtgctggcccagcttggattaggatttagctgtgcaaataaagctgaaatggaattagtacaacacatcggcataccagcaagtaagatcatatgtgccaatccctgtaaacagatcgcccaaatcaagtacgcggccaaacatggcatccagcttctcagtttcgacaatgagatggagttagcaaaggtcgttaaatctcatccctctgctaagatggttttgtgcatcgccaccgatgactcccattccttgtcgtgtctgtcattgaagtttggagtgtctctgaagtcctgcagacacctcctcgaaaatgctaagaaacaccatgtggaggtcgtaggagtctcttttcatatcggctctggctgccctgatcctcaagcgtatgcccagtctatcgccgacgcaagactggtttttgaaatgggtaccgaactgggacataagatgcatgtgctggacctggggggaggctttcctggcacggagggagccaaagtcaggttcgaggaaatcgcaagtgtcattaatagcgcattagacctctactttccagaagggtgtggagtagacatattcgctgaactcggccgatattacgttacctcagctttcacagtcgccgtgtctataatcgctaagaaagaggtgctcttggatcagcccggccgcgaagcgccccttccacctccccacatcgccacttgtgccgcctctgaaccaagtccccccgctgaggaaaacggatctacgagcaagactattgtttatcacttggatgaaggagtatatggcatttttaatagcgtgttgtttgacaacatatgtcctacccctatcttgcagaaaaaaccctcaaccgaacagcccctgtacagcagctcgctctgggggccggctgtagacggatgcgattgcgtcgccgaaggcctctggttgcctcagctgcacgtgggcgactggcttgtgtttgacaatatgggagcctacactgttggtatggggagcccattttggggtacccaggcctgccatattacctacgcaatgtcacgggtggcctgggaagcactgcgccgccaactcatggcggctgagcaggaagacgatgtggaaggcgtctgtaagccactcagttgcggctgggagatcacggacaccctatgtgttggccctgtgttcacacctgcatccatcatgtag

SEQ ID NO: 24422 - DNA, 1383 bp, synthetic construct
  source 1..1383: mol_type = other DNA; note = Synthetic coding sequence
atggccggctacctgagcgagagcgacttcgtgatggtggaggagggtttttctactagggaccttctcaaggaactgacactgggcgcgtctcaggccacgactgacgaggtggcggccttcttcgtggcagatctgggagccatagtgagaaagcacttctgttttctcaaatgtttgccacgcgtacgtcccttttacgctgtcaagtgtaattcctccccaggcgtgttaaaagtgctggcacagctcggcctaggctttagctgcgcaaacaaggctgagatggaactcgtccagcacatcggtatcccagcttccaagatcatatgtgctaatccctgtaagcagatagcccagatcaagtacgcggctaagcacggaatccagctgctcagcttcgataacgaaatggagctggctaaagttgtcaaatctcacccttctgctaagatggttctgtgtatagctacggacgattcccatagtctgagctgcctttctcttaagttcggtgtgtccctgaaaagttgccgccatcttttggaaaatgccaagaaacaccacgtagaggtcgtcggcgtctccttccacataggctctggctgcccggaccctcaggcctacgcacagagtatagccgatgcaaggcttgtattcgaaatgggcactgaattgggccacaagatgcatgtgcttgatctagggggtggttttcctggcaccgagggagccaaagtgaggttcgaagaaattgcttcggtgattaactctgcactagacctgtattttccagaggggtgtggcgtggatatctttgccgagctggggcggtactacgtgacctcagccttcacagtcgcagtcagcattatcgcgaaaaaggaagtattgttggaccagcctggacgcgaagaagaaaatggaagtacgagcaaaaccatcgtttatcacctcgatgaaggtgtgtacgggatcttcaattccgtcctgtttgacaacatttgtcctactcctatcctccaaaagaagccgagcacggaacagccactatactcctcttcactgtggggtccagctgtcgacgggtgtgactgcgtggcagagggcctgtggctcccgcaacttcatgtcggagactggcttgtgtttgataacatgggcgcctacaccgtggggatgggcagtcccttctgggggactcaggcctgccacataacgtacgccatgagcagggtggcttgggaggcattgcgccgccaactgatggcggccgagcaggaggacgatgtagaaggcgtgtgcaaacctctcagctgtgggtgggagatcacggatacactgtgcgtgggccctgtgttcaccccagcatctattatgtag

SEQ ID NO: 24423 - DNA, 2508 bp, synthetic construct
  source 1..2508: mol_type = other DNA; note = Synthetic coding sequence
atgaagcggcggaccgaccccgagtgcaccgcccccatcaagaagcagaagaaaagagtagccgagctcgccctgtctttgtcatctacatcagatgacgaaccaccctcaagtgtctcacacggagcgaaggcttccactacctcactgagcgggtccgacagtgagactgagggaaagcagcacagttccgactcctttgatgatgcatttaaagccgactcactagtggaaggtacctctagccgatactccatgtacaactctgtgagccaaaaactcatggctaagatgggcttcagggagggcgagggattgggaaaatactcccaaggccgtaaagacatcgttgaagcttcatctcaaaagggccggcgcggccttggcctgaccctacgaggattcgaccaggagttgaatgtcgactggagggacgaacccgaaccttccgcctgcgagcaagtgtcatggtttcccgagtgtaccactgagatccccgatacacaggagatgagcgattggatggtggtgggcaaacgcaagatgatcattgaagacgaaactgagttttgcggcgaggagttgcttcacagtgtgttgcagtgtaaatccgtgttcgacgttctcgacggggaggaaatgcggagggcccgaactcgcgcgaacccctatgagatgatcagaggcgttttctttctgaatcgcgccgcaatgaagatggcaaatatggacttcgtgttcgacaggatgttcactaatcccagagatagctatggaaaaccactcgttaaagatcgggaagcggagctcctgtactttgctgacgtctgcgctggaccagggggtttttccgaatacgttctgtggaggaaaaagtggcatgctaaaggattcggaatgactctgaaggggccaaacgacttcaaactcgaggatttctactcggcctccagcgaactgtttgagccctattatggcgaaggagggatagacggtgacggcgatattacacgaccagagaacatatctgccttccgaaactttgtcctggataacacggacaggaagggcgtacattttctcatggccgacggtggattcagtgtggaggggcaggaaaaccttcaggaaatcctgagcaagcaacttctgctgtgccagttcttgatggcgctgagcatcgtaaggaccggggggcatttcatttgtaaaacctttgatctgttcaccccattttccgtcggcctggtgtacctcctctattgctgttttgagcgagtttgccttttcaaaccaattactagtcggccagctaactccgagcggtacgtcgtgtgcaagggtttgaaggtgggaattgatgatgttcgggattatctctttgctgtgaacataaaacttaaccagctgcgtaacactgattcagacgtgaacctcgtcgtgccattagaagtgataaaaggagaccacgaattcacagactatatgattagatccaatgaaagccactgcagcctccaaattaaggctcttgccaagatacacgcttttgttcaagacacaaccctctcagaacctcgccaggcagaaattcgcaaagagtgcttacggctgtggggcatccccgaccaagccagggttgcccccagctcatctgatcctaaatctaaattctttgaattgatccaagggactgaaatcgatatcttctcgtataagccaaccctgctcacctcaaaaactctggagaaaatcaggcctgtcttcgactacagatgtatggtgagcgggtccgaacaaaaattcctgataggactgggtaaaagccaaatctacacatgggacggaaggcagtcagatcgatggatcaaattagatctcaaaaccgagctgccacgggacaccttactatctgtagagatcgtgcatgaactcaagggggagggtaaggcccagaggaaaataagcgccattcacatcttggatgttttagtactcaacgggaccgatgttagagagcaacatttcaaccagaggattcagctggccgagaagtttgtgaaggccgttagtaaaccgtcccgacccgatatgaacccaatccgagtgaaagaggtttatagactggaggagatggagaagattttcgtgcggctggagatgaagatcattaaagggtcatctggcacaccaaaattaagttacacggggagggatgataggcatttcgtgcccatgggactctacattgtgcgcactgttaacgagccatggacaatgggattttctaagagtttcaaaaagaaattcttctataataagaagacgaaggatagcaccttcgatctacctgccgattcgatcgcgccatttcatatctgttactatggcagattgttctgggagtggggagatgggatacgggttcatgactcccagaaaccccaggatcaagacaagctcagtaaagaggacgtcctcagctttatccaaatgcaccgggcctag

SEQ ID NO: 24424 - DNA, 252 bp, synthetic construct
  source 1..252: mol_type = other DNA; note = Synthetic coding sequence
tgacaggagctgctgaaggagaagaccctggccgagcagaacctggaagatacacgtcaacagctccttgcagcgaggtcgtcacaggctaaggctattaatacattggagacacgtgtgcgcgaacttgagcaaaccctgcaggccagcgaggagcagcttcaacagtctaaaggtatagtggctgcacaggaaacacaaatccaggaattagtgagcgcttattggtcttgctgtatccctggcccttag

SEQ ID NO: 24425 - DNA, 2304 bp, synthetic construct
  source 1..2304: mol_type = other DNA; note = Synthetic coding sequence
atgttcgccaagctgaagaagaagatcgccgaggagaccgccgtggcccagagaccagggggcgctacgcgcatcccccgttccgtatctaaagaatcagtcgcgtccatgggcgccgactcaggggatgacttcgcatccgatggatcaagttcacgcgaggatttgtcctctcaactactccgcaggaatgagcagataaggaagttggaagctagactgagtgactacgcagagcaggtgaggaatttgcagaaaataaaggagaagctggagatagcgctcgagaaacatcaggacagctcaatgcggaagttccaagagcagaatgaaacttttcaggctaacagggctaagatggcagagggccttgcactggcccttgcccggaaagaccaggaatggagcgagaaaatggaccagctggaaaaggagaaaaacatcttaacagctcagctgcaagagatgaagaatcagtcaatgaatctgttccaacggcgcgatgaaatggatgagttagagggtttccagcagcaagaactttccaagatcaagcacatgctgctgaagaaggaagagtctctggggaaaatggagcaggaactggaagccaggacccgcgagttaagccgtactcaggaggagctgatgaacagcaaccagatgagttcggatctgagccagaaactggaagagctgcagaggcattattcgaccctggaggaacagcgtgatcacgtaatcgcctcaaagaccggggcagagagtaaaattacagcattagaacagaaggaacaagagctgcaggcactgatccaacagctgagcatcgatctccagaaagtcaccgctgagacacaggaaaaagaggacgtgatcacccatttgcaggagaaggtagccagtctggaaaaacgcctggagcagaacctgtcgggggaggaacacttacaggaactgctaaaagagaagaccctcgcagaacagaatctggaagacaccagacagcagctcctcgctgcccgttccagccaagctaaagctattaacacattggagaccagggtgcgcgaattagagcagaccttgcaggcctcagaggagcagctccagcaatccaaggggatcgtcgctgcccaggagactcagatccaggaacttgcggctgccaatcaagagtccagtcatgtgcagcaacaggccctggcactggaacagcagtttctggagaggacacaggccctggaggcgcaaatcgtggcactcgagagaacccgcgccgcagatcagacaaccgctgagcaggggatgagacaactcgagcaagaaaatgccgcgctgaaagagtgcaggaacgaatacgagcgctctttacagaatcaccagtttgaactgaagaaactgaaagaagagtggtctcagcgggagatagtcagtgtagcaatggcacaagccctggaggaagtcaggaaacagagggaagagtttcagcaacaggctgccaacctcacagccatcatcgacgagaaggagcagaacctccgcgagaagacagaggtcctcttacagaaggagcaagaaatcctccaactcgagcgggggcataactccgctcttctacagatccatcagctgcaagctgagctggaagcgctgcgcactcttaaagctgaagaggctgcagtggtggcggaacaggaggatctcctcaggcttcgcgggccacttcaagccgaggctctcagcgtaaacgagagccacgtaacatccagagcaatgcaggatcccgtgtttcagctcccaaccgctggccgcacccccaacggggaggtcggagcgatggatctcacccagcttcagaaggaaaagcaggacctcgaacagcaacttttagagaagaacaagaccatcaaacaaatgcagcagagaatgctggaattgcgcaagactcttcagaaagaactgaaaatcagacccgataatgagctgtttgaggtgcgggagaaacctggacccgagatggccaatatggccccctcggtcaccaacaacacggacctgactgatgctcgagagattaatttcgaatatcttaaacacgtagtgctcaagttcatgtcatgtcgcgaatcagaggcatttcacctcatcaaagccgtgtcggtgctgttaaacttttctcaggaagaggagaacatgcttaaagaaacactcgagtacaaaatgtcctggtttggcagtaaacccgcacctaagggatctattagaccaagtatctctaatccacgcatcccgtggtcctag

SEQ ID NO: 24426 - DNA, 291 bp, synthetic construct
  source 1..291: mol_type = other DNA; note = Synthetic coding sequence
tgagccaagatcaaggcccgggacctgcggggcaagaagaaggaggaactgttaaaacaattggatgatctgaaagtagaactgtcacaactgcgcgtggccaaagtcactggcggggctgcttccaaactcagcaagatccgagtcgtaagaaagagcattgcaagagtgttaactgttataaaccagacacagaaggagaacctgagaaagttctacaaagccgcggcaggaggcccttgcatccaaatggacagagtattaccacagccccccgcttgctcatgttag

SEQ ID NO: 24427 - DNA, 1035 bp, synthetic construct
  source 1..1035: mol_type = other DNA; note = Synthetic coding sequence
atgcggcggcggcgggaggaggagggcatccagctgcggaagcagaaacgcgaacagcagctcttcaaacgcagaaacgtggaactgatcaacgaggaggctgccatgttcgactccttactcatggactcttatgtatcttctaccaccggagaatccgtcatcaccagggagatggtggaaatgttattctcggatgatagcgacctacagctggccacaactcagaaattccggaaactgctctccaaagagccctcccctcccattgatgaagtgataaacaccccaagggtggttgataggttcgtggagtttctaaagcgaaatgagaattgtaccctgcaagccgtttgggccctagggaacattgcaggggatagttctgtgtgcagagattatgtcctgaactgctcgatcctgaatcctctcttgaccctgctaactaagtcaacccggctcacaatgacccgtaacgcggtgtgggccctatcaaatctgtgcagaggaaaaaacccgcccccggaattcgcaaaggtatccccatgcctcccagtcctgtcgagacttttattctcctcagatagtgatttgttggcagatgcttgttgggccttaagttatctcagcgatggacctaacgagaagatccaggcagtaatcgactccggagtgtgtcgtaggttggttgaactgctcatgcacaacgattacaaagtcgccagccctgccttgagggctgtaggtaatattgttactggtgatgatattcagacccaggtgattcttaactgcagcgctctgccttgcttactgcacctcctctctagtcctaaggaatcgattcggaaagaggcctgttggacgatttctaatatcacagctggaaaccgtgcccaaatccaggcagtgattgacgccaacatcttcccagtgctgatcgagatcttacagaaagcggagtttcgcacccgtaaagaggcggcctgggccatcaccaacgccacatcgggaggcaccccggaacagatctag

SEQ ID NO: 24428 - DNA, 582 bp, synthetic construct
  source 1..582: mol_type = other DNA; note = Synthetic coding sequence
atgcccaccaccagccggcccgccctggacgtgaagggcggcaccagccctgccaaggaggacgccaatcaggaaatgtcgtctgttgcttatagcaatctcgcagtgaaggataggaaagctgtggccatactgcattaccccggagtggcatctaacggcaccaaagccagcggtgccccaacctcaagcagcggtagccctatcggatcacccacaactactccacccactaagcctccatcttttaatctgcatccagccccgcacttactggcttccatgcacctccaaaagcttaactcacagtaccagggaatggccgcggccaccccaggccaacctggcgaggctgggcccctgcagaattgggatttcggagcccaggcagggggcgctgagagcctctcacctagtgctggggctcagtctccagccatcattgactccgaccctgtagatgaggaggtcctcatgagcttggtggtggagctgggcctggaccgggctaatgagttgcccgaactgtggctgggccagaacgaatttgacttcactgctgatttcccgtctagttgctag

SEQ ID NO: 24429 - DNA, 1611 bp, synthetic construct
  source 1..1611: mol_type = other DNA; note = Synthetic coding sequence
atggagaccatggccagccccggcaaggacaactaccggatgaagtcatataagaataacgcccttaacccagaggagatgagaaggagaagagaggaggaagggatccagctgcgcaagcaaaagcgtgagcagcagctgtttaagcgaagaaacgtagaactcatcaatgaagaggcagctatgttcgactcgctgttaatggactcctacgtttcttccactacgggggaaagtgtgattacaagagaaatggtggagatgctgttttccgatgatagcgacctgcagctggccaccacacagaagtttcggaagctcctttcaaaggagccttccccacccatcgacgaggtaatcaacacacccagggtggtggacagatttgtggagttcttgaagagaaacgagaattgtactctgcaatttgaggctgcttgggcacttacaaatatcgcatccgggacttcccagcagaccaagattgtgattgaagctggggccgtgcccatttttattgagttgttgaattctgactttgaggacgtgcaggagcaggctgtgtgggccctggggaacattgcaggagactcctcggtgtgtcgggactatgttctcaactgtagcattctgaaccctctcttgactctgcttaccaagtccacaaggctcacgatgactcgaaatgcagtctgggcactgagcaatctctgccgggggaaaaatccaccccctgaattcgctaaggtgtccccctgcctgcccgtgttgagtagacttcttttcagtagcgactcagaccttctggcggacgcttgctgggcactgtcctacctctctgatgggcccaatgagaagattcaggccgttattgatagtggagtctgccggcgactggtggaacttctgatgcacaacgattacaaagtagcttcgccagccttacgcgcagtaggcaacatcgtcacaggtgacgatatccagacccaggtgatccttaactgctcagctctaccctgtctgctccacctcctgagcagcccaaaagagtcaatacgcaaggaggcctgctggaccatctccaatatcaccgcaggcaatagagctcagatccaggcagtgatagacgctaatatctttccagtcctgatagagatcctacagaaagccgagtttagaacgcggaaagaagcagcctgggccatcactaatgctacgtccggtggcactcctgagcaaatccggtatcttgtatcactgggatgcattaagcccctgtgcgacttgctcacagtgatggacagcaaaatagtgcaggtggcgttgaacgggctagaaaacatccttagactgggggaacaggagggcaagaggtccggtagcggagttaacccgtactgtggcctaatcgaggaagcgtacggactggacaagattgaatttttacagagccacgagaatcaggagatctaccaaaaagccttcgacctgatagaacactacttcggagttgaggacgatgattcatcacttgctccacaggttgacgagacacagcagcaatttatcttccaacagccagaggcccctatggagggcttccaactatag

SEQ ID NO: 24430 - DNA, 2769 bp, synthetic construct
  source 1..2769: mol_type = other DNA; note = Synthetic coding sequence
atgatcaccagcgccgccggcatcatcagcctgctggacgaggacgagccacagctgaaggaatttgccctgcacaaactcaacgccgtggttaacgatttttgggccgagatctccgaatctgtcgacaagatcgaggtgctttatgaggatgaaggcttccggtctcgccagtttgccgcgctggtggcgtcgaaggtattctatcatctcggagcttttgaggaaagtctgaactacgcgctgggggccggtgatttgttcaacgtcaatgacaatagcgagtacgtcgagaccattattgcgaaatgtatcgaccattacacaaaacagtgtgtggaaaacgcagacttaccggagggcgaaaagaagcccatagaccagcgactcgagggcatcgtgaataaaatgttccagagatgtctcgacgatcacaagtacaagcaggcaataggtatcgcattggagacgcgacgactggatgtcttcgagaaaaccatcctggagtctaatgacgtgcctggtatgttggcttattccctgaaactgtgcatgagcctgatgcagaataaacagtttagaaataaggtgctaagagtgctggtgaagatatacatgaatttggaaaaacctgacttcattaacgtttgtcaatgcttaatatttcttgacgatccacaggctgtttctgatatcctggaaaagttggtgaaagaagacaatctgttaatggcttatcagatctgttttgacctctatgaatcggccagccaacagttcctgagcagtgtgattcagaacctgaggaccgtcggaacaccgatagccagcgtcccagggagtactaacaccggaacggtgccagggtcagaaaaggattcggacagtatggaaacagaagagaaaacttcaagcgcgttcgttgggaagacacccgaggcgtcgccggagccaaaagatcagaccctgaaaatgatcaagatcctgtctggtgagatggcgattgagctccacctgcaattcttgatccgcaacaacaatactgatttaatgattctaaaaaacactaaggatgcagtgaggaactctgtttgccatacagctaccgtgattgctaactcttttatgcactgcggcacgacgagcgatcaattccttcgggataatctcgagtggctcgctcgggctacgaactgggcaaaattcacggctaccgcctcacttggagtcattcacaaagggcatgagaaagaagcactccaattgatggccacctacctacccaaagacacatccccaggctcggcttaccaggaaggcggcggcctgtacgccttaggcctaattcacgcaaatcacggaggagacatcattgactacctgctgaatcaactcaagaacgctagtaacgacattgtgaggcacggtggcagtctggggctcggactagcggccatgggaaccgcgcgccaagatgtatatgatctgcttaagacaaatctctaccaagatgacgcagtgacgggcgaagctgcaggtctcgcattgggcttggtgatgctcggctcgaagaacgcccaggcaattgaagacatggtgggctatgcccaggagactcaacatgagaaaatcctaaggggactggccgttggcatcgctctggtgatgtatggtagaatggaggaagcagacgctttgattgaaagtctctgtcgcgacaaagaccccattctgcggagatctggaatgtacaccgtcgccatggcctattgcggcagtggcaataacaaggccatccggcggttgctgcacgtagccgtgtccgatgttaatgacgatgtgcggcgcgcggccgtcgaatcccttgggttcattctgttccggaccccagaacagtgtccatccgtcgtttccttactaagtgaatcctataatccccatgtgcgctacggcgccgctatggcacttggaatttgctgcgccgggaccgggaacaaggaagccatcaacctgttagagccaatgactaacgaccctgtgaactatgtccgacagggggctctaatagccagtgcgctcattatgattcagcagaccgaaatcacctgccctaaagtaaatcagttcaggcagttgtacagtaaagtgataaatgataagcacgacgatgtgatggccaagttcggcgccatactagcccagggcattctggacgcaggtggccataatgtaacgatcagccttcaatctcggactggacacacccacatgccctctgtcgtgggggtgttggtctttacgcagttttggttttggttcccactgagccatttcctgagcctagcctacaccccaacctgcgtaattggcctaaacaaagacctgaaagtaagcaccgcggtactgtctatcactgctaaggctaaaaagaaggagaaagagaaagagaagaaagaggaagaaaagatggaggttgatgaagcagaaaaaaaagaggaaaaggaaaaaaagaaggagcccgaacccaattttcagctgttagacaacccagcacgagtgatgcccgcccaactcaaggtacttactatgcctgaaacatgtaggtaccagcctttcaagcccctgagcattggaggcattataatactgaaggatacgtctgaggacattgaggaactggtcgaacctgtcgccgcacacggacccaagatcgaagaggaagaacaggagcccgagccgcctgagccgttcgaatacatagacgactag

SEQ ID NO: 24431 - DNA, 1227 bp, synthetic construct
  source 1..1227: mol_type = other DNA; note = Synthetic coding sequence
atgcccgaggagcaggccttcagcgtgctggtgaagatcatgttcgactatgggctgcgggagctttttaaacagaactttgaggatctccattgcaagttctaccaactggagcgactcatgcaggaatatataccagacttgtataatcattttcttgacatttctctcgaggcgcacatgtacgcctcccagtggtttctgactcttttcacagctaaatttcccttgtacatggtcttccacattatagatcttctcctatgcgagggaatttccgtgatttttaatgtagccctgggactcttgaagacgtcaaaggacgacctcctgcttacagatttcgagggggcactgaaattctttcgcgtccagctgcctaagcgatatagaagtgaagagaacgccaaaaagctcatggagctggcttgtaacatgaaaattagtcagaaaaagcttaaaaagtatgagaaagagtatcatacaatgagagaacaacaggcacaacaggaagatcctattgagcggttcgagcgggagaataggcgactgcaggaggcaaacatgcgcttggagcaggagaacgacgacctggcgcacgaattagtcacttctaaaattgcattgaggaaggatctggataatgctgaggagaaggcagacgcgctgaataaggaactgctaatgactaaacagaagctgattgacgccgaggaagagaagaggaggttggaggaggagagcgcccaactgaaagagatgtgccgaagagagctcgataaggccgaatccgagattaaaaagaactcaagtataatcggcgattacaagcagatttgctcccaattgtccgaacgactggagaagcagcagacagccaacaaagttgaaattgagaagatccggcagaaggtggatgactgcgaaaggtgccgcgagttctttaataaagagggcagggtcaagggcatatcatccacaaaagaggtgttggatgaagacacagacgaggaaaaagagaccctgaagaaccaattgagagagatggagctggagctcgcccaaactaaattgcaactggtggaggccgagtgcaagattcaggacctggaacaccacctgggactcgcccttaacgaggtgcaggcagccaagaagacctggtttaaccggacgctgtcaagtattaagactgctacaggagtccaagggaaggagacatgttag

SEQ ID NO: 24432 - DNA, 3210 bp, synthetic construct
  source 1..3210: mol_type = other DNA; note = Synthetic coding sequence
atggacgacaaggccagcgtgggcaagatcagcgtgagcagcgactctgtttccacccttaacagcgaggattttgttctggtgtcccggcagggagatgagacacccagcaccaataacggttcagatgatgagaaaaccggattgaagatagtgggcaacgggtcagaacagcagctccagaaagagttggccgatgttttgatggatcctcccatggacgaccaacccggagagaaggaactggtgaagcgatcccaattagacggggagggggacgggccattgtctaatcagctgagcgccagctccaccattaaccccgtccctctggtgggtcttcaaaagccagaaatgtccctgcctgtgaagcccggccagggggatagtgaggccagctcaccatttacgcctgtggcggacgaagacagcgtagtgttttctaaactgacttacctcggctgtgcgtccgtgaacgcgccacgatcagaggtggaggcactgcgaatgatgagcatactgcggtctcagtgtcagatcagcctcgacgttacactatccgtgccgaatgtgtccgaaggaatagtgcggttactagaccctcagacaaacactgagattgccaattatcctatatataagatactgttttgcgtccgggggcacgatgggaccccagagtctgactgctttgccttcaccgaatctcattacaatgcggaactgttccggatccacgtctttcgatgcgaaatccaagaggctgtgagccggattctgtatagcttcgccaccgcatttcgaagatccgctaaacagacacctctgtctgcgacagccgccccacagactcccgattccgacatctttacattcagtgtgtcattagagataaaagaggatgacgggaagggctattttagcgcagtgcctaaggacaaggacaggcagtgcttcaagctgcgccagggaatcgataagaaaattgtgatttatgtgcagcagactacaaataaagaactggcaatcgagcggtgttttggactgctgctgtcccctggtaaagacgtacgtaattcagacatgcatctcctggatctagaatcaatgggcaagtcctcagatggcaagtcatatgtcattaccggctcttggaaccctaagtccccacactttcaggttgtgaatgaggagacacctaaggacaaagttctttttatgacgactgccgttgatctcgttatcacggaggtgcaggagccagttcggttcctgctggagacaaaagtaagagtttgtagccccaatgagagactcttttggcccttctccaagagatccacgactgaaaacttctttctgaaattgaaacagattaaacagagggaacggaagaataacaccgatacgctctatgaggtcgtgtgtcttgaaagtgaatccgagagggagaggagaaaaacgacagcatctccgtctgtgaggttgccccagtcagggagccagtcatccgtgattccaagccctcctgaggatgatgaagaggaagacaacgacgagcccctgttgtccggaagtggtgacgtgagcaaagagtgcgctgagaagatactcgaaacctggggcgagctcctttcgaagtggcatctaaatctgaacgtgaggcctaaacaactgtctagtctagtccgcaacggcgtgccggaggcactgcgcggagaggtttggcaactgctggccggatgccacaataacgaccacttagtcgagaaatacaggattttgattaccaaggaaagtccccaggattcagccataacacgtgacatcaacagaaccttccctgctcatgactatttcaaagacaccggaggtgatggtcaggactctctgtacaaaatctgcaaagcctactccgtctacgatgaggaaattgggtattgtcaaggccagtcttttctggccgccgtactgctgttacacatgcccgaggaacaggcattcagcgtgcttgtcaagatcatgtttgattatgggctgagggaactgtttaaacagaatttcgaggatctccactgtaaattctatcaattggagcggttaatgcaggaatacattccagatctgtataaccactttctggacatctcccttgaagcacacatgtacgcctctcagtggtttttgaccctttttaccgccaagtttcctttgtatatggtgttccacatcattgacctcttactttgtgaggggatcagcgtaatctttaatgtggccctcggtttgcttaagacctccaaagacgaccttttgttaaccgactttgagggcgcactcaagttcttccgggtgcagttacccaagagatatagaagtgaggaaaatgcgaagaagttgatggaactcgcttgcaatatgaaaatatctcagaagaagctcaaaaagtatgagaaggaataccataccatgcgcgagcaacaagcacagcaggaggatccaattgagcgcttcgagcgcgaaaaccgcagactgcaggaagctaacatgaggctggagcaggaaaatgatgatctggcgcatgagctggtgacatcaaaaatcgcgctgagaaaagatctggacaatgcggaagagaaggctgatgcgctaaataaggaactcctaatgacgaaacaaaagctgattgatgccgaagaagagaagcgccgactagaagaggaaagcgctcagttgaaagagatgtgccgccgggaactggataaggctgaaagcgaaattaagaaaaatagcagcatcattggtgattataaacagatctgctcacaactgtccgagaggctggagaagcagcaaacagcgaataaagtagagattgagaagattcgccaaaaggttgacgactgtgagaggtgcagggaattttttaataaagagggtagagtaaaaggtatcagctccactaaagaggttttggacgaggatactgatgaagagaaagagacactcaaaaaccaacttagggaaatggaactggagctggcacagaccaagctccagctggtggaagccgaatgtaagatccaggacctggagcatcatctggggctggcacttaatgaggtgcaagctgcaaaaaaaacttggtttaaccggactctgagcagcattaagacagccaccggcgttcagggaaaagagacatgttag

SEQ ID NO: 24433 - DNA, 2808 bp, synthetic construct
  source 1..2808: mol_type = other DNA; note = Synthetic coding sequence
atgcagcggaagctggtgaccctggtgaactgccagctggtggaggaggagggaagagttcgtgcaatgagggcggcccggtctcttggggaacgcacagtcaccgaactcatactgcagcaccagaatcctcagcaattgagcgctaatctctgggcggccgtacgagcacgagggtgccaattcctgggccccgctatgcaggaggaagctcttaagctggtgctgctcgccctcgaagacggatctgccctcagcagaaaggttctcgtacttttcgtcgtccagcgtcttgaaccccgttttccccaggctagcaagacaagtattggacacgtagtccagttgctgtacagggcttcttgcttcaaggttacaaagcgggatgaagatagtagtctgatgcagttgaaagaggagttcagatcctatgaagctctacggagagagcatgacgcccagattgtccatatcgctatggaagcagggctgagaattagtcctgagcaatggtcttcccttttatacggtgaccttgctcacaagagccatatgcagagtattatagacaagctgcagtcacccgaatccttcgctaaatctgttcaggaactgaccatcgtgcttcaacgcactggcgaccccgccaatctgaaccgcctaagacctcacctggagttgctagcgaatatcgatccgaaccccgacgctgtgtcgcccacatgggagcagctagagaatgccatggtcgccgtgaagaccgtggtccacggtctagttgactttattcagaattactctcgcaaagggcacgagacgccacagccgcagcctaactccaaatacaagacttcaatgtgtcgggatttacggcaacaagggggatgtccgcgtggtaccaattgtacgtttgcccacagtcaagaggagttggaaaaatatcggcttcggaataaaaaaatcaatgccaccgtgaggacgtttcccctgctgaacaaggtgggcgtcaataacacagttactacaaccgccggaaatgtgatctcagtgatcggatccacggaaacgactggaaaaattgtccccagcactaatggcattagtaatgcggagaattctgtttcacaactgatctcccgctccaccgactccacactgcgggcgctggagacggtgaaaaaggtggggaaggtaggtgccaatggccagaatgccgcaggcccaagcgcagattctgtgactgaaaataaaattggatcgcctcccaagacaccggtcagcaatgttgccgcaacatcagcgggcccaagcaacgtcggcactgaattgaatagtgtccctcaaaaaagctcgccgttcctaacacgtgttcctgtctacccaccccacagtgaaaatatccaatattttcaggaccccaggacccagataccattcgaggttcctcaatatccccagactgggtactacccccccccacccaccgttccggccggggtggccccgtgcgtcccccgttttgtgagaagtaataacgtgcccgagtccagtctaccgcctgccagcatgccttacgctgaccactactccaccttctcaccgcgcgacagaatgaacagttctccgtatcaaccgccccccccacagccctatggccctgttcccccagtcccaagtggcatgtatgcaccagtttatgacagtcgacggatatggcgtcctccaatgtaccagagggatgatataattaggtccaacagcctgcctcccatggatgtgatgcacagcagcgtgtatcagacctcccttagggaacggtataatagtctagacggctactactctgtggcgtgccagcctccaagtgaaccaagaacgaccgttcccttaccccgggaaccttgcggtcatctgaagacatcttgtgaagagcagatcagaaggaagcccgaccagtgggcccaataccatacccagaaggcgcctctggtgagttctactctgccagtggctactcagtcaccaacacctccatcaccactgttcagcgtggattttagggcagatttttctgagtcggtcagtgggactaaatttgaggaggaccacttatcccactacagcccatggagttgcgggacgatagggtcctgtatcaacgccattgatagcgaaccgaaagacgtaatagctaatagcaatgctgttctgatggatcttgactcaggtgacgtgaaaaggagagttcacctttttgagacccagaggagaaccaaggaggaagatccaatcatccctttctccgatggccccattattagcaagtggggcgccatctctcggagtagtcggaccgggtatcacacaaccgacccagtgcaggcaaccgccagtcagggaagcgccactaaacccatctccgtctcagattatgtaccctatgtcaatgctgtcgactcacgttggtcctcctatggcaacgaggcaaccagtagcgcccattatgttgagagggatcgttttatcgtgacagatctaagcggccacaggaaacatagcagcacgggggatctgctgtccctggagcttcagcaggccaagtcgaactctttgctgttgcaacgggaggcaaatgctctggccatgcaacagaaatggaactcattagacgaaggacgccatctcacccttaatctgctgtctaaggaaatcgagcttcgaaatggggaagtgaagaaactgaatctgtccgcttcgtgcctcatgtatctgttttctgctgccgcatcatggctctaccattattag

SEQ ID NO: 24434 - DNA, 1437 bp, synthetic construct
  source 1..1437: mol_type = other DNA; note = Synthetic coding sequence
atgcccgtgcaggccgcccagtggaccgagttcctgagctgccccatttgttacaatgagttcgacgagaacgtacataaaccaatttctctgggctgcagccacaccgtatgtaaaacttgcctgaacaaactgcatcgtaaagcatgccccttcgaccaaacggccataaacacagatatcgatgtcctcccggttaacttcgcactcctacagctggttggcgcacaggtccctgaccaccaatctattaaattgtctaaccttggggaaaataaacattacgaagtggcaaaaaaatgtgtggaagatctggccctatacctcaagccgctgtctggcggtaagggtgttgcctcacttaaccagtcagctctgagcaggcctatgcaacggaagctagtgacgttagtcaactgccaattggtggaagaggagggtagagttcgagccatgcgtgcagcccggtctttaggggagcgaactgtgactgagctcatcttgcagcatcagaatcctcagcagctgagcgctaatctctgggctgccgttagagccagaggttgtcagtttctgggccctgcgatgcaagaagaagctctgaagcttgttcttctggcactggaagacggttccgcactatctaggaaggtcttagtgttatttgtggtgcagaggctggaaccacgatttccacaagcttccaagaccagtataggccatgtggtccagctcttatatcgtgccagttgctttaaagtgaccaaacgggacgaggatagtagcctgatgcagctaaaagaggagtttcgcagttacgaagcccttaggcgggagcacgatgcgcagatcgtgcacatcgcaatggaggctggccttcgcatctctccggagcagtggtcgtccctgttatatggcgatttggcacacaaatctcacatgcagtctataattgataaactgcagtccccggagagctttgccaaatccgttcaggaacttacaatcgttctgcagaggaccggagatcctgcaaatttaaaccggctgagaccccatttggaacttttagctaacatcgaccccaatcctgatgctgtgtctccaacgtgggaacagctcgaaaacgctatggtagctgtgaagacagtggtacacggacttgtggactttatccagaattattcccgtaaaggccatgagacaccacagcctcagcccaattcaaaatacaaaacatctatgtgccgagacctgcgacagcaggggggatgccctagaggaacaaattgcacatttgcacattcacaggaagaactcgaaaagtatcggctccgaaacaagaagataaatgcaactgaagtgttaaagcagcagggcaagttgtttcaggtgcaaacggaattccagatgcagaaaaccgtgttcccttcttag

SEQ ID NO: 24435 - DNA, 3576 bp, synthetic construct
  source 1..3576: mol_type = other DNA; note = Synthetic coding sequence
atgcccgtgcaggccgcccagtggaccgagttcctgagctgccccatttgctacaatgaattcgatgaaaatgttcataagccaatttctcttgggtgttcccatacagtctgcaagacatgtttgaataagcttcatcggaaggcatgtccatttgatcaaacagctatcaacaccgacattgatgtacttcccgtaaactttgcattgctccagctcgtgggggctcaggtgccggaccaccaaagcatcaaactctccaatctgggcgagaacaaacattatgaagtagcaaaaaaatgcgtggaggaccttgccctttatctcaagccactcagcggcggaaagggggtggccagcctgaatcagagtgccctgtcgcgaccaatgcagagaaagctggtgaccttggtgaactgccagctggtcgaagaagaaggccgggtacgggctatgagagcagccagatccttgggcgagcgaacagttactgaactcatactgcagcaccagaacccgcagcaacttagcgccaacctgtgggcagcggtcagggctagaggatgtcaattcctgggccccgcaatgcaggaggaagcgctgaaactcgtactgctggccctggaggatgggtccgcacttagccgcaaagtgttggtattatttgtggtgcaaagactcgagccaaggtttccccaggcgagtaagacatcaatcggccatgtagttcagcttctttatcgggcaagctgcttcaaggttacaaagagggatgaggactcttccttaatgcagttgaaggaggagttccggtcctacgaggccctcaggagagaacatgacgcacagatcgtgcacattgcaatggaagcaggtttgcggataagcccagaacagtggtcgtcccttctgtatggcgacttagcccataaatcacatatgcagtccatcatcgataagttgcagagtcctgagtctttcgccaagtcagtccaagaattaacaatcgtgctgcaaagaaccggggaccccgcgaatctgaatcggctaaggccacacctcgagctcctggcaaacattgacccgaaccctgatgcggtttcccccacctgggaacagctggaaaacgccatggtcgctgtgaaaaccgtcgtgcatgggctggtcgatttcatccagaactactctcggaaggggcatgagacaccacagcctcagcctaatagcaagtacaagacctctatgtgtagagaccttcgccagcaaggggggtgcccacgggggaccaattgcaccttcgcccacagccaggaagagttggagaagtataggctgaggaataaaaaaattaacgcaacggtccgaacttttccgctgctcaacaaagtgggcgttaacaataccgtcaccactaccgctggaaatgtaatctctgtgataggtagcaccgaaacgacgggcaaaatcgttccttcaacgaacggcatctcaaatgctgagaattcagtgtcacagctgatatccaggagtaccgactctaccctccgggcccttgaaaccgttaaaaaggtgggaaaggttggcgcgaacgggcagaatgccgctgggccgtccgctgatagcgttacagaaaacaagatcggctcgccccctaagacaccggtttctaacgtggctgcaacatccgccggaccctctaacgttgggacggaattaaatagcgtaccgcagaaaagttctccttttctgactcgcgtccctgtgtaccctccccattccgagaacatccaatactttcaggaccctcggacccaaattccctttgaggtgccacagtacccccagaccgggtactatccacctccccccactgtcccagcaggagtggccccgtgtgttccccggttcgtaaggagtaacaatgtgcccgagagcagcctcccacccgcgtctatgccgtacgcagatcactactccacgttttcaccccgggaccgcatgaacagctctccctaccagcccccaccccctcagccctacggccccgtcccacctgtccccagcggcatgtacgcccctgtgtatgattctcgaaggatatggagaccaccaatgtatcagagggacgatattatccgctcaaattctctgccccctatggacgtgatgcacagctcagtctaccaaacatctttgagagaacgttacaactctttggatggttattatagtgtggcctgtcagccaccctctgagcctcgaactacggtgcctctaccaagagaaccatgtggccacctgaaaacatcctgtgaggaacaaatccgccgaaaaccggatcaatgggcccagtaccacactcagaaagcaccactggtttccagcaccttgccagtcgcaacccagtctcccactcctccatcaccactgttctccgtggactttagggcagacttctcagaatctgtgtcgggaacaaaattcgaggaggatcatctcagtcattactctccttggagctgcggtacaattggcagctgtatcaacgcaattgacagcgaaccgaaggatgtgatagccaactccaatgccgtactgatggatttggatagtggcgacgttaagcgtcgcgttcatttattcgaaacccagaggcgcactaaagaggaagaccccataattcccttctcagatggtcccatcatctccaaatggggggctatcagccggtcttctcgaaccggataccacacaactgatccagtacaggctaccgcaagccagggctctgcaaccaagcctatcagcgtgtccgactacgtaccatacgttaacgccgtggattcaagatggagttcgtacggcaatgaagcaacaagcagcgcacactacgtggagagagataggttcattgtgactgaccttagcggtcacaggaagcactcaagcactggagacctattatcccttgagctccagcaggcgaagagtaattccttattgctccagagagaagccaatgccctagctatgcaacagaaatggaactcgctcgacgaggggaggcacctcaccttgaacctcctgtccaaggagatcgagctgcggaatggtgagttgcaaagtgactatacagaggatgccaccgacaccaaaccggacagggacatcgaactggaactgtctgctctcgacacggacgaacccgatggacagtccgaacctatcgaagagatcctagacattcagttggggatctctagtcagaatgaccaactgctcaacggtatggcagttgagaacgggcaccccgtccagcagcatcagaaggaacctccaaagcagaaaaaacaatcacttggggaggatcatgtgattctggaggagcagaaaacaatcttgcccgtgacctcttgtttctcccagcctctgccggtgtcaatctccaacgcctcatgtcttccaattaccacctcggtcagcgcgggaaacctgatccttaaaacccatgtgatgagcgaagacaaaaatgattttctgaagcctgtggcgaatggcaaaatggtgaactcatag

SEQ ID NO: 24436 - DNA, 1569 bp, synthetic construct
  source 1..1569: mol_type = other DNA; note = Synthetic coding sequence
atggccgccagcgccaagcggaagcaggaggagaagcacctgaagatgctccgtgatatgacgggtctccctcataacagaaagtgcttcgattgcgaccagagggggccaacctacgtgaatatgaccgtgggcagttttgtctgcaccagctgtagtggatcactgaggggtcttaaccctccccatcgggtgaagtcaattagtatgaccactttcacccagcaggaaattgagtttctccagaaacacggtaatgaagtttgtaagcagatttggctcggcctcttcgacgatagatcctcagctatacccgacttcagagatccccagaaggtgaaggagtttctgcaagaaaaatacgaaaagaagaggtggtatgtgccccccgaacaagctaaagtggtcgcctccgtgcatgctagtatttctgggtccagcgcaagcagcacatccagtacccccgaagtgaaaccactaaagagcttgctcggggacagcgctcccaccctgcacctgaataagggcacccctagccagagcccggtggtcggccgatctcaaggccagcagcaggaaaagaagcagttcgacctgttaagcgacctcggaagtgatatctttgctgctcctgcccctcagtcaacggcaacagctaactttgccaattttgcccatttcaattcccacgcaggaggctccgccgcgagcgtcaatgctaattttgcccatttcgataatttccccaaatcttcatctgccgacttcggcacgtttaacacgagtcagtcccaccaaactgcgtccgctgtctcaaaggtatccaccaataaggccgggctgcagactgctgacaagtacgctgccttagctaatctggacaatatttttagcgccgggcagggtggcgatcaaggatccggcttcggtactactggcaaggcaccagtgggatctgttgtgtccgtgccatcccagagcagcgccagtagtgataaatatgccgctctcgccgagcttgattccgtattttcctctgcggcgaccagtagtaatgcatacacttcaacttccaacgcaagctcaaatgtttttggaacagtgcccgtggttgccagcgcacaaactcagccagcctcttcatctgtgcccgcaccctttggagctacccccagcacaaatccattcgtcgccgcagccggacctagcgtggcctcttccactaacccttttcaaactaacgccaggggcgcaactgccgctaccttcggcacagcctcaatgagcatgcccacagggttcggaacgcctgcaccctatagcctgccgactagcttttccggaagctttcagcaacctgccttccctgctcaggctgcatttccgcagcagactgcattctcccagcagcccaacggagccggattcgccgccttcgggcaaaccaaaccagtggttacaccatttggtcaggtggccgccgccggcgtctcgtctaatccctttatgaccggtgcaccaactggccaatttcccactgggagtagcagcacaaacccattcctttag

SEQ ID NO: 24437 - DNA, 1524 bp, synthetic construct
  source 1..1524: mol_type = other DNA; note = Synthetic coding sequence
atgcaggacgacagcatcgaggccagcaccagcatcagccagctgctgagggaatcctacctggcagagactaggcatcgcggcaacaacgagcgctcccgagccgagccctcatccaatccttgtcatttcggtagtccatccggcgccgcggaaggcggcggggggcaggacgaccttccagatctgtctgcctttctgagtcaagaggaattggacgagagcgtcaacctcgcacggttggccattaattacgaccccctagagaaagccgatgagacacaggcccggaaacgactgtctcccgaccaaatgaagcattcccctaatctctcatttgagccgaacttttgccaggataaccctaggagccccacctcttccaaggagtcaccccaggaggctaagcgcccccagtattgctcagagactcaatctaagaaggtttttctgaacaaggccgccgatttcattgaagaattatcttctctgtttaaatcccattcttcaaaacgaattagacctcgagcatgcaaaaaccataaaagtaaactggaatcccagaacaaagtcatgcaggagaattctagctcctttagcgacctcagcgagagacgggagaggagctcagtgcctattcccattccagccgatacacgtgataacgaagtgaaccatgctctcgagcagcaggaagcaaagagaagagaagcagaacaagcagcttcggaggccgccggtggtgacacgaccccgggatcatccccctctagtttatattacgaggagccactcgggcagccaccacggtttactcagaaactgagatccagagaggtaccagaaggtaccagagttcagctggattgtatagtcgtgggaatcccacccccccaagttaggtggtactgtgaaggaaaggagttggaaaactcccctgacatacatattgtgcaggctggaaacctacattccctcactatcgctgaagctttcgaagaggacacaggccggtatagttgctttgcatcaaacatttatggaactgacagtacttctgctgaaatctacatcgagggagtgagcagcagcgactctgaaggggaccccaacaaagaggaaatgaatcggattcagaagcctaacgaagtgtcctcgcctcccactacttctgcagtgattcccccagcagtgccccaagcccagcacctggtagcccaacctcgggtggccactatccagcaatgccagtctccaactaactatctgcagggcctggatggcaagcctatcatcgcagctcctgtgtttacaaaaatgctacagaacctcagtgcgtccgagggccagctcgtggtgttcgagtgtcgtgtgaagggtgcccccagcccaaaggtggagtggtaccgcgaaggcactttgatcgaggactcccccgattttcgaatattgcagaaaaaaccccgttccatggccgagcccgggaaggacgattttaacttcaatctgcttgtgtacgagtag

SEQ ID NO: 24438 - DNA, 3150 bp, synthetic construct
  source 1..3150: mol_type = other DNA; note = Synthetic coding sequence
atgctgtgctggggcaacgccagcttcggccagctgggcctgggcggtatcgatgaggagatcgtgctggagcctaggaagagtgacttctttatcaataagcgcgttagagatgttggctgcgggctgcggcatactgtgtttgtgcttgatgacggaactgtttacacctgcggatgcaacgacctggggcagttaggacacgaaaaaagtcgaaagaagccggaacaagtcgttgcactagacgcacagaatatagtggcagtgtcatgtggcgaggctcataccctcgcgctcaatgacaagggacaggtatacgcgtggggcttagatagtgatggccagttaggactggtcggttcagaggagtgcataagggtgccaaggaacatcaagtccctctctgacatacagattgtccaggtggcttgcggctactaccactccctcgcactgtctaaagccagtgaagtgttttgctggggtcaaaataaatacggccaactgggtttgggcacagactgtaaaaagcagaccagcccccagcttctcaaatcacttctgggtatcccttttatgcaggtcgccgcaggcggcgcacattctttcgttctgaccctgtcgggagctatttttggctggggtagaaacaaattcggtcagctcggcttgaacgatgagaatgacagatacgtgccaaatctgctgaaaagcctgcgctcgcagaaaatcgtgtatatttgttgcggcgaggaccacacagccgcactcacaaaggagggcggggtcttcactttcggggcaggaggatacggtcagctgggccacaatagcaccagccacgaaatcaatccacgcaaggttttcgagctgatgggtagcatcgtaactgaaatcgcctgcgggcggcaacatacctctgcctttgtcccttcttctgggcgaatctatagctttggacttggtggcaacgggcagctggggaccggcagcaccagcaaccgaaagagcccatttacagtcaaggggaactggtacccatacaatggtcaatgcttgcccgatatagactccgaagagtacttttgcgtaaagcgcatcttttcaggcggcgatcagtccttctcccactactcatctccacagaactgcggcccaccggatgactttcggtgcccaaatcctactaagcagatctggacggtcaacgaagcattaattcagaagtggttaagctatcccagcggtaggtttcccgttgagattgccaatgaaatcgatgggacctttagttcaagtgggtgtttaaacggctccttcttagccgtgtctaacgacgatcactaccggaccggcacacgcttctcaggagttgacatgaacgccgcacgcctgctgttccataagcttattcaacccgaccacccgcagatctctcagcaggtggcagctagtctggagaaaaatctaatacccaagctaacttcttctctacccgacgttgaagccctgcggttttacctcacactccctgaatgcccactgatgagtgattctaataacttcaccacaattgctattccttttgggacagccttagtgaacctggaaaaagcccccttgaaggtcctggaaaattggtggtccgtattggagcctcccctctttttaaagatagtggagttgttcaaagaagtcgtggttcacctgctaaaactatacaaaattggaattcccccatccgaaagacgcatctttaactccttcctccacacagcgttgaaagttctggaaattctccaccgggtgaatgagaagatggggcaaataatccaatacgataaattctatattcatgaagtgcaagaactaatcgacatacgcaatgactacattaattgggttcagcagcaggcatatgggatgctcgccgacattccagtgaccatttgcacttaccccttcgtttttgacgcgcaagccaaaacaaccctccttcaaactgacgcagtgctgcagatgcagatggctattgatcaggcacaccgtcaaaatgtctcttctctttttttgcccgtgatcgaaagtgttaacccctgtctgatcctggtggttcgccgagaaaatatagtcggtgacgccatggaagtattgaggaagactaaaaacatcgactacaaaaaaccactgaaggttattttcgtcggcgaagatgccgtggatgctggtggtgttcgcaaagaattctttctcctcatcatgagagagctgctggaccctaaatacggaatgtttcggtattatgaggactcaagacttatttggtttagtgataagaccttcgaagacagtgacctttttcacttgataggagtgatctgtggcctggccatctacaattgcactattgttgacttgcatttccccttggctctctataagaaactcctaaaaaagaagccctccctggatgatctgaaggagctgatgccagatgtgggaaggtccatgcaacagctcctcgattatcctgaagatgatatcgaagagactttttgtctcaattttaccatcaccgtcgagaattttggtgccacagaggttaaagagttagtcttgaatggggcagacacagcggtcaataaacagaaccgacaggaattcgtggatgcgtatgtggactacatcttcaataagtctgtcgcatcattgttcgatgccttccacgccggattccataaggtttgcgggggtaaagtcttactgctcttccagcctaatgaattacaagcaatggtgattggcaataccaattacgattggaaggaactggagaagaataccgagtataagggggaatactgggcagaacaccctaccattaaaatcttctgggaggtgtttcacgagctgcctctggagaaaaaaaaacagtttctcctttttctgaccggctccgataggatcccgatcctgggtatgaagtccctcaaactggtgattcaatcgaccggaggaggcgaagagtatctccccgtctcccacacatgctttaatttactggatctgccaaaatacacagagaaggagaccttaagatctaagcttatacaagcaatagatcataacgaaggattctcgctcatttag

SEQ ID NO: 24439 - DNA, 726 bp, synthetic construct
  source 1..726: mol_type = other DNA; note = Synthetic coding sequence
atgaacagcggccggcccgagaccatggagaacctgcccgccctgtacactatctttcagggcgaggttgcgatggttactgactatggagcatttatcaagatcccggggtgcaggaagcagggacttgtacataggacgcatatgtcttcttgccgagtcgataaacccagcgagatcgtggatgtgggtgataaggtatgggtgaagctgataggcagggagatgaaaaacgatcggattaaggtctccctatctatgaaggtcgttaatcagggcacaggcaaggatctggaccccaacaacgtcatcattgagcaggaggaacgccgacgccggtcatttcaagattacaccggacaaaaaatcacgctggaggctgtgctgaacaccacatgcaaaaagtgcggctgcaaaggccattttgccaaagactgctttatgcagcccggcggcaccaaatactccctgatccccgacgaagaggaggaaaaagaggaggccaagagcgcagaatttgagaagccagacccgactaggaatccctcccgaaaacggaagaaagagaaaaaaaagaagaagcacagggatcggaagtcgtctgacagcgactcaagtgatagcgagagcgatacagggaagagggctagacacacctcaaaagattcaaaagctgctaaaaagaaaaagaagaaaaaaaagcataagaagaagcacaaagaatag

SEQ ID NO: 24440 - DNA, 870 bp, synthetic construct
  source 1..870: mol_type = other DNA; note = Synthetic coding sequence
atgatcatcaactggaaccaggtgagcgtgctgtggaagtgcctgctgaaacaaagcgcatcttaccaggacaggaggcagagttggcgccgggctagcatgaaggaaactaatagacgaaaatcgctacaccccatccatcagggcattaccgagttgtcacgcagtattagcgtggacctggctgaatctaagaggctgggttgcttgcttctgtctagcttccaattctcaatccagaaactggagccgttcttgcgcgataccaaggggttcagtttagaaagcttccgagccaaggcttcgtcactgagtgaagaacttaagcacttcgcagacgggttggagacagatgggactctgcagaaatgcttcgaggactcaaacggcaaagcatcggacttttccctcgaagcttctgtggcagaaatgaaggaatacatcacaaagttctctctcgaaaggcagacttgggaccagttactactccattatcagcaggaagccaaagaaatcctatcccgagggtcgactgaggccaagattacggaggtcaaggtggaacctatgacttacctgggcagctctcaaaatgaggtgctgaacaccaagccggactaccagaaaattctacagaatcagtcaaaggtattcgattgcatggagctcgtgatggatgaactacaaggcagcgtgaaacagcttcaagcctttatggatgaatcaacccagtgcttccagaaagtctctgtgcagcttgggaagcggagcatgcagcaactggacccctcaccagctaggaagctgcttaagctgcagctccagaaccccccagctatccatgggtccggctcgggaagttgccaatag

SEQ ID NO: 24441 - DNA, 750 bp, synthetic construct
  source 1..750: mol_type = other DNA; note = Synthetic coding sequence
atgaccagcgtgacccggagcgagatcatcgacgagctgagccggagtatctcagtggacttagcagaatctaaacggctgggctgtcttctgctgtcaagcttccagttctctatacagaagcttgagccctttctgagagacacaaaagggttcagtcttgagtccttccgggccaaagcctctagcctcagcgaggaactgaagcattttgcagacggcctggagacagatggaactctccaaaagtgtttcgaggattccaatgggaaggcgtctgatttctcactggaggcctccgtggctgagatgaaggaatatatcaccaagttttcgctcgagaggcaaacttgggaccagctactgttgcattaccagcaggaggctaaggaaattttatccaggggttccactgaggctaagattacggaggtgaaggtggaacccatgacttacctcggatccagtcagaatgaggtccttaacaccaagcccgattatcaaaaaatcctgcagaatcagagtaaggtgttcgactgcatggagctcgtcatggatgaactccaggggagtgtaaagcagctgcaggcttttatggacgagtcaactcagtgtttccagaaagtttccgtacagctgggcaaacgatcaatgcaacaactcgatccctcccccgcgcgaaagttacttaagctccagctgcagaatccgcctgcgattcatggaagcggcagtggcagctgccagtag

SEQ ID NO: 24442 - DNA, 855 bp, synthetic construct
  source 1..855: mol_type = other DNA; note = Synthetic coding sequence
atgaccagcgtgacccggagcgagatcatcgacgagcagagcgcctcttatcaggatcgccgccagagctggagacgcgccagcatgaaggagacaaatcgaaggaagtctttgcatccaatccaccaagggattaccgaactctcacgatcaatttcagtcgacctcgctgagagcaagcgactcggatgcctattgctatcttctttccagtttagtattcagaagctggagccttttttacgtgacactaaaggtttttctctcgagtccttcagagccaaagccagtagcttgagcgaggagctgaaacatttcgctgacggcctggagaccgatggtacactccagaagtgcttcgaggattcgaacggtaaggctagtgatttctccttggaggcctcagtggcagagatgaaagagtatattaccaaattttcgcttgagcggcagacctgggatcagctccttctgcattaccagcaagaggccaaggaaatcctgtcccgcggttccacagaggctaaaattactgaagttaaagtagagccaatgacctacctgggttcatctcagaatgaagtgttgaacactaaacccgactatcagaaaatccttcaaaaccagtcaaaggtgttcgactgcatggagctggtcatggacgaattgcagggaagcgtgaaacagttacaggcttttatggatgagagcacacagtgcttccagaaagtgtccgttcagcttgggaaaagatccatgcagcaattggatcctagccccgctaggaaactgttaaaactccagcttcagaaccctccagccattcacggatcgggctccggtagttgtcaatag

SEQ ID NO: 24443 - DNA, 1071 bp, synthetic construct
  source 1..1071: mol_type = other DNA; note = Synthetic coding sequence
atgaccagcgtgacccggagcgagatcatcgacgagaagggccccgtgatgtcgaaaactcatgaccaccaactggaatcttccctgagtcccgtcgaagtgtttgcgaaaactagcgccagccttgagatgaaccagggggtctctgaagagcggattcatctcggaagttctcctaagaaaggcggaaactgtgatcttagccatcaggaaagactgcagtctaagagcctgcacctgtcccctcaggagcaatcagcaagctaccaagatcggcggcagagttggaggcgtgcatccatgaaggaaacaaacaggcgcaagagtctccaccccattcaccagggcatcaccgagctgtccaggtcaatttccgtggaccttgccgaatcgaaacgtttaggctgcttgctcctgagttcctttcaatttagcatccagaaactggagcctttcctgcgagacacaaaaggattttccctcgagagtttccgggccaaagcctcaagcctcagtgaggagctgaagcactttgctgatggtctggaaactgacggcactctgcagaaatgctttgaggatagtaacggaaaagctagcgacttctcactggaagcctccgtggctgaaatgaaggaatacatcacgaaattctcactggagagacagacatgggatcagctcctgctccactaccagcaggaggccaaggagatactttcgcgcggaagtacagaagccaagatcactgaagtgaaggtcgagcctatgacttacctcgggagctctcaaaatgaggtgcttaacaccaaacccgattatcagaagattctgcaaaaccagtccaaggtgttcgactgcatggagttggtgatggacgagttgcagggcagtgtaaagcaacttcaagcattcatggatgagtctacacagtgttttcagaaggtctctgtgcagttagggaaacgctctatgcagcaactggatccatccccagcccgcaaactccttaaattgcaattgcagaacccgccggctattcatggaagtggaagcgggagctgtcagtag

SEQ ID NO: 24444 - DNA, 1071 bp, synthetic construct
  source 1..1071: mol_type = other DNA; note = Synthetic coding sequence
atgaccagcgtgacccggagcgagatcatcgacgagaagggccccgtgatgtcaaaaacccacgatcaccaactagagagctcactgtcccccgtcgaggtatttgccaaaacaagtgcttctctggagatgaatcaaggagtctcagaagaaaggatccatttgggaagcagccctaagaagggcgggaattgcgatctgtcccaccaggaacggctgcagtcaaagagtttgcacctctcccctcaggagcagtcagcctcgtaccaggaccgccgccagagttggagacgagctagcatgaaggagactaaccgtagaaagagcctgcaccctattcatcaaggtattacggaactgtcgaggtcaatcagcgtggatctggccgaaagcaaacgactagggtgcctcctgctgtcttcctttcaattcagcatccagaagctggagccattcctgagagatactaaaggtttttcactcgaaagtttccgcgctaaagcctcttccctctccgaggagttgaagcacttcgctgatgggttggaaactgacggcactctgcagaaatgcttcgaagatagcaatggaaaggcatctgacttcagtctggaggcatcagtggctgaaatgaaagaatacatcaccaagttttcattggaacgccagacttgggatcagctcctactccattaccagcaggaagccaaagagatcctgtctaggggctctactgaagcaaagatcaccgaagtcaaagtcgagcctatgacctacctagggtccagtcagaacgaggtcctgaatacgaaacctgactaccagaagatacttcagaaccaatctaaggtgtttgattgcatggagctcgtgatggacgagcttcagggcagtgtgaagcagctgcaggccttcatggatgagagcactcagtgcttccaaaaggtttccgtccagctaggcaagcggtcgatgcaacagctggaccctagccctgcccgcaaattactgaaactgcagctgcaaaaccctcccgctattcatggctcaggctctggatcttgccaatag

SEQ ID NO: 24445 - DNA, 1617 bp, synthetic construct
  source 1..1617: mol_type = other DNA; note = Synthetic coding sequence
atggccgccgccgccagcgtgaccggccgggtgacctgggccgcctcaccgatgcgtagcctcggtttagggaggaggctgtcacttccaggaccaaggttggacgccgtcactgctgccgtaaatcccagtttgagtgatcatggcaatggactgggaagggggacgcgtggcagcggatgctctggtggcagtctcgtagcagattggggtggtggggctgccgccgctgcagcagtggcactcgctctggccccagccctgagtactatgcggcgaggtagctccgagtcagagctagctgctaggtgggaggcggaagcagtggccgctgctaaggctgccgcgaaggccgaggctgaagccactgctgaaacagtcgccgaacaggttcgggtggacgctggcgccgctggagaaccggagtgtaaagccggggaggaacaacccaaagttctcgcacccgcgcctgcccagccatccgccgccgaagagggcaacactcaggtgctgcaacgccctccgccgacgctgccacccagtaagcccaaacccgtgcaaggactgtgtccccacgggaagccacgcgacaaaggaaggtcatgtaagcgaagcagcggccacggcagtggtgaaaatgggtctcagcgtccggtaaccgtggactcttcaaaggcacggactagcctggacgctcttaaaatcagtataaggcagctgaagtggaaggagtttcctttcgggcggcgacttccttgcgatatttactggcacggagtgagtttccacgacaacgacatcttttcaggtcaggtgaacaagtttcccgggatgacagagatggtgagaaaaattaccctctctagagccgtgaggacgatgcagaacctttttcccgaagaatataacttttacccccgctcttggattctgcccgacgaattccaactgttcgtggcacaggttcagatggtgaaggacgacgatccctcttggaagcctaccttcatcgttaagcctgatggaggttgccagggggatggaatctacctcataaaggatcccagcgatatcagattggccggcaccctccagtcccgtccagctgtcgtgcaggagtatatatgcaagcctctcctgattgacaaactcaagtttgacattagactttatgtcctgctaaagagcctagacccgctcgaaatctacatcgccaaagatggtttgtctcggttttgtaccgaaccctatcaggaaccgacacctaaaaatctgcacagaatattcatgcacctcaccaactacagcctaaacattcatagcggcaactttattcacagcgactctgcatcaaccggcagcaagaggaccttttcatccatcctctgcaggctaagctctaaaggggtcgacatcaagaaggtgtggtctgacatcatttccgtcgtgattaagacagtgatcgctcttactcccgagctcaaggtgttctatcaatcagatattccgacaggcaggcccgggccaacatgtttccaggtgactattgcctcttcacaacctgcctttccagctctaacgggactgaaaagagctctgtggctgcgtgttgggtag

SEQ ID NO: 24446 - DNA, 1356 bp, synthetic construct
  source 1..1356: mol_type = other DNA; note = Synthetic coding sequence
atgaccgagatggtgcggaagatcaccctgagccgggccgtgcggaccatgcaaaatctctttcctgaggaatatatatgtaagcccctgctgattgataaattgaaattcgatatccgtttgtatgtgctgctaaaaagcttagaccctttggagatttatattgcgaaagatggcctgagcaggttttgtacagagccttatcaggaacctacaccaaagaatctacatcgcatctttatgcatctcaccaactattctttgaatatacattctggcaactttattcactctgacagtgcctcaaccgggtctaaacggaccttttctagtatcctatgccggctctcttcaaagggggtggacattaaaaaggtatggagcgacataatctctgttgtgattaaaacagtcattgcccttactccggaactgaaagttttctaccagtctgacattcctactgggcggcccggtcctacctgttttcagatattagggttcgatattctgctgatgaagaatctgaaacccattttgcttgaggtaaacgccaatcccagcatgcgaatagaacacgaacacgaactgtcgcctggcgtattcgagaacgtgccaagtttggtggatgaagaggtgaaagttgcggtgattagggacaccctgagactcatggatcctctgaaaaagaagagggagaaccagagccagcaattggaaaaacccttcgcaggaaaagaagatgccctcgatggcgaactgacatcagcgccagactgcaatgccaatcccgaagcacacctcccatctatctgtctgaaacaagtattccctaagtatgccaagcagttcaactaccttcgcctcgtcgatcggatggcaaatctttttattcgcttcttggggataaaggggaccatgaagctgggcccgactggctttaggacgtttatcaggtcctgcaaactcagcagctcctccctgagcatggctgctgttgatattctctatatcgacattacccgtagatggaatagtatgacactggaccagagggactcaggcatgtgcctgcaggcattcgtggaagccttcttcttcctggcacagcgcaaattcaagatgctccccttgcacgagcaggttgcgtctctcatcgatctgtgcgagtatcatctttccctgctcgacgaaaaaagattggtctgtggccgtggagtgcccagtggcgggaggccgccccaccgggggcctccgcaggagccaagtccaagcgctcagcctgccggcgacaaccctcctccacgcactagttgtgcaaataaactgagccacccacgccataccctatcctag

SEQ ID NO: 24447 - DNA, 1644 bp, synthetic construct
  source 1..1644: mol_type = other DNA; note = Synthetic coding sequence
atgaaggtggtgaagagcgccgagcactacaccgagaccgccctggacgagatccggctgctgaagtccgttaggaatagcgacccaaatgaccctaaccgcgagatggttgtacaacttctggacgattttaagatctccggagtgaatgggacgcatatttgtatggtcttcgaggtgctcggtcatcacctccttaaatggattattaaatctaattaccaaggcctgcccttgccctgtgttaaaaagatcatccagcaagtcctacagggcctggactatctccacaccaagtgcagaataatccatactgacatcaaacctgagaacatcctgttaagcgttaatgaacagtacatccgcaggttagctgctgaagccacagagtggcagaggagcggtgcaccccccccctcagggtcagcagtaagcacagcgcctcagcccaaaccggccgacaagatgtcgaagaataaaaaaaaaaaactcaagaaaaagcagaaacgccaggccgagcttctggaaaagcgaatgcaggaaatcgaggaaatggagaaggagtctgggcccggtcagaaacgcccaaataagcaggaagaatcagagtcacccgtcgagaggcccctaaaggagaatccgccaaacaagatgacccaggaaaaactggaggagtcctcaacaatcggacaggaccagacactgatggaaagggataccgaaggcggagcggcagagatcaactgtaacggagtgattgaagttattaactacactcagaactctaataacgagaccctgcgccacaaggaagacttgcacaatgcaaatgattgcgatgtccagaatcttaaccaggagtcctcattcctgagtagccaaaatggcgatagcagtacctctcaagaaactgactcatgtacaccaatcacaagtgaagtctctgacactatggtgtgtcagagctcctccactgtggggcagagtttctctgagcagcacatctctcagctccaggagtctataagggccgaaatcccatgtgaggatgagcaggaacaggagcacaatggaccactagataacaagggcaagtctacagctggaaacttcctggtcaacccacttgagccaaagaatgcagaaaagctgaaggtcaagatcgcagatcttgggaacgcttgttggcataagcactttactgaggacatccagaccaggcaatataggtccctggaggtcctgatcggttccggttacaataccccagccgacatctggtcaaccgcctgcatggcttttgaactggcaacaggtgactatctctttgagcctcactcgggggaggaatatacccgggatgaagatcatattgtgcatattatcgagcttattggaagaatccccagacggttttccctcagtggaaaatactcacaggacttcttcagccaccggggagacttgaagcatatcaccaagctcaaaccatggggtctctttgaggtactcgtggagaagtacgaatggagtcaggaggaggcggctggtttcaccgactttctcctgccaatgctggagttgatccctgagaaacgggccacagctgctgagtgtctgaggcatccatggctcaattcatag

SEQ ID NO: 24448 - DNA, 1968 bp, synthetic construct
  source 1..1968: mol_type = other DNA; note = Synthetic coding sequence
atggagcggaaggtgctggccctgcaggcccggaagaagcggaccaaagcaaaaaaggataaggcacagcgcaagtccgagacacagcatcgaggttcagctcctcattccgaatccgacctgcctgaacaagaagaggaaatcttgggatccgacgatgacgagcaggaggacccaaacgattactgcaagggaggataccacctggtcaagataggcgacttattcaacgggcgatatcacgtcatccgtaagctcggttgggggcactttagcaccgtgtggttgtcctgggatatccaaggaaaaaaatttgtagcaatgaaagtcgtgaaaagtgccgagcattacacagaaaccgccctagatgaaatccgactgcttaaaagcgtccgaaactctgacccaaatgatccaaatagggagatggtcgtgcagctgctggacgattttaagatttccggagttaatggaacccatatctgtatggtgtttgaagtcctgggccaccatttgctaaaatggattatcaaatccaactaccagggtctgcctcttccatgcgtcaaaaagatcattcagcaggtgctccagggcctggactacctccacaccaagtgcaggattattcacaccgacatcaaacctgaaaatatcctcctctccgtaaacgagcagtacatacggcggcttgcggcagaagctaccgagtggcaacgcagcggtgccccccccccttctgggtctgccgtaagtactgccccccaaccaaagccagcagacaagatgtctaaaaacaagaagaaaaagctaaagaagaaacagaagagacaagcggagttactggagaaacgcatgcaggaaatcgaggagatggagaaggagagcggccccggacagaagagacctaacaaacaggaagagtctgagtccccggtagagcgtcccttgaaggaaaaccctccaaacaagatgacccaggagaaattggaggagtcatccacaattggtcaggaccagaccctcatggagagagatacagaaggcggggcggctgagataaactgtaatggtgtgatagaggtcattaattatactcagaattccaacaacgagaccctgagacataaagaggatctgcacaatgcaaatgactgtgatgtgcagaacctaaaccaagaaagttcttttttgagcagtcaaaatggagactcatctacaagtcaggaaacagattcttgcacaccgattacctccgaagtcagcgataccatggtttgtcagagctccagcaccgtgggacagagctttagtgaacagcacatttcacagctacaggagtctatccgagctgagataccctgtgaagacgagcaagagcaggagcataacggtcccttagacaataagggcaaaagcactgccggaaattttcttgtgaatccacttgagccaaagaatgccgagaagctgaaagtgaaaatcgcggatctgggtaatgcctgctgggtccataagcactttaccgaggacatccagacacgacagtataggagcttagaagtcctgattggatccgggtataataccccggccgatatctggtctactgcttgcatggcctttgagttggccactggagactacttgttcgagcctcactctggtgaagagtatactcgagatgaagatcacatcgcgcttatcatcgagctcctcggtaaagtgccccgcaagctgatcgtcgccggtaagtattcgaaagagtttttcaccaaaaaaggggacctgaagcatattacaaaactgaagccatgggggctgtttgaagtgctggtggaaaagtatgaatggtctcaagaggaggccgctggttttaccgattttctgctgcctatgctagagctaatccctgagaagcgcgcgaccgctgccgagtgtctccggcacccatggctgaactcttag

SEQ ID NO: 24449 - DNA, 864 bp, synthetic construct
  source 1..864: mol_type = other DNA; note = Synthetic coding sequence
atggccgccagcctgtggatgggcgacctggagccctacatggacgagaacttcatttctagagcctttgccacaatgggggaaaccgtgatgagtgttaagattatccgtaatcgcctgactggtattcccgccggatactgtttcgttgagtttgccgatcttgcaaccgccgaaaaatgcctacacaaaatcaacggcaagccacttcccggtgctacccccgccaagcggttcaagctgaattacgcaacttatgggaagcagccggacaattctcctgagtattccctttttgttggagacctcacaccagacgtcgatgacggtatgctttacgagttcttcgttaaagtctatcctagctgtaggggtggtaaggttgttctggatcagacaggcgtgagtaagggatatggctttgtcaaatttactgacgagcttgagcagaaacgtgctttgacagagtgccagggcgcagtaggcctgggctcaaaaccagttcgtctcagcgtggctatcccaaaggccagcagagttaagccggtcgagtactcccagatgtactcatacagctacaaccagtattaccagcagtaccagaactactatgctcaatggggatacgaccagaacacaggcagctactcttacagctacccccaatatggctacacccagagcacaatgcagacctatgaggaggtaggtgacgatgcattagaagatcctatgcctcagttggatgttacagaagctaacaaagagtttatggagcaaagtgaagagctgtacgatgcgctgatggactgccattggcaaccattggataccgtcagctccgagataccggccatgatgtag

SEQ ID NO: 24450 - DNA, 438 bp, synthetic construct
  source 1..438: mol_type = other DNA; note = Synthetic coding sequence
atggccgagcggaacgaggaccaccacctgcaggtgctgaaggagagcgaggttctgttgcaggcaaaaagagccgagttggagaagcttaagtcccaggttaccagccagcagcaggagatggccgtgctcgacaggcagcttggtcacaaaaaggaggaacttcatctgctgcaagggagcatggtgcaggctaaagctgacctccaggaggctctgagactcggagagacagaggtgacagagaaatgtaaccacatccgcgaggtcaagagtcttctggaagagctgagtttccagaagggtgagcttaacgtccagatttctgagcggaaaacccagttaactctgatcaagcaagaaatcgagaaagaggaggaaaacctccaggtcgttttacgccaaatgtccaaacataaaacggccttcctgcaatag

SEQ ID NO: 24451 - DNA, 3024 bp, synthetic construct
  source 1..3024: mol_type = other DNA; note = Synthetic coding sequence
atgcagcacctgaagagcaagaagcgggaggagcggtggatgcgggccagtaagagacagagtgagaaagagatggaggagctgcatcataatattgatgacttgctgcaggagaaaaaaagccttgaatgcgaagtggaagagctgcaccgaaccgtccaaaaacgtcagcaacagaaagacttcattgacggaaacgttgaatcactgatgaccgagctggaaatcgagaaaagtctaaagcatcatgaggacattgttgacgaaattgagtgtatcgaaaaaacacttctgaaacgcaggagtgaacttcgagaggcagatagactcctggctgaagctgagtctgagcttagctgcactaaagagaaagtctgccttctcgtggtatggggagtgagtagcgtgtggaccaagaatgcagtggaaaagtttactgacgccaagaggtctctgctgcagacagagtctgacgctgaagaactggaacggagggcgcaggagaccgccgttaatctggtaaaggctgaccagcagctccgaagccttcaggctgatgcaaaagacctagaacaacataagatcaaacaggaagagattctgaaagaaattaacaagattgtcgctgccaaggatagcgattttcagtgcctttcaaagaagaaagagaagttaacagaggaattacaaaagctccagaaggacattgaaatggcagaacggaatgaggaccatcaccttcaggtccttaaggaatctgaggtgctcttgcaggctaagagagctgaactggagaagctgaagagtcaggtcacaagccagcagcaggagatggcagttctggacagacagctgggtcataaaaaggaggagctccacctgttgcagggtagcatggtccaggccaaggccgatcttcaagaagcactgaggttgggcgagaccgaagtcacagaaaagtgtaatcatattagggaagtgaagtccctccttgaggagctcagttttcagaaaggtgaactgaacgtgcagatttcagaacgcaagacccaattgactctgattaaacaggagattgaaaaggaagaggaaaacctccaagtagttttgcggcagatgagcaaacataagactgagttaaaaaatatcctggacatgttacagctcgagaaccacgaactccaggggctcaaactccagcacgatcagcgagtgtctgaactggagaaaacacaggtggcagtcctggaagaaaaactggagctagagaacctgcagcagatttcccagcagcagaaaggcgaaattgaatggcagaagcaactgctcgagcgcgacaagagagaaattgagcgaatgacagccgagtctcgcgctctacagagttgcgtcgagtgtctgtctaaggaaaaagaggaccttcaggagaagtgtgatatctgggagaagaaactcgctcagacaaagagggtgctggcggccgcagaggagaacagcaaaatggagcaatcaaatctggagaaactggaactgaacgttaggaaactccagcaggaactagaccagctgaaccgagataaactgagcctgcacaatgacatttctgccatgcagcagcagctccaggaaaaacgcgaggcggtgaactctctgcaggaggaactggcaaacgtccaggaccatctgaatcttgctaagcaggatttgcttcacaccactaagcatcaagatgtactcttgagtgagcaaacacgactccagaaagatatcagcgaatgggcaaatcgctttgaggactgccagaaggaggaggaaacaaagcagcagcagctccaggtcctccagaatgagattgaggagaacaaattaaagcttgtacagcaagaaatgatgttccagcgactgcagaaagagagagaaagtgaggagtcgaagttggaaacaagcaaagtgacacttaaagagcagcagcaccaactcgagaaagaactcacggatcagaagagcaaactggaccaggtcttgtcaaaagtcctggctgccgaagaacgggtgaggactttacaggaagaagagcgctggtgcgaaagcctggagaagaccctctcacagaccaagagacaactcagcgagagagagcaacagctggtagaaaaaagcggcgagttgttggctttgcagaaggaagcggactcaatgcgggctgatttctctttactgcggaaccagttcctgaccgagagaaagaaggcagaaaagcaagtcgcgtccctgaaggaggcgctgaaaatccagcggtcgcagcttgaaaaaaatttgcttgaacagaagcaagagaacagctgcatccaaaaagaaatggccacaatcgagctggtagcccaggataatcatgagcgggctagacgacttatgaaggaactgaaccagatgcagtacgaatatacagaactgaaaaagcagatggcaaaccagaaggatctggaacgcagacagatggagatttctgatgccatgagaaccttgaagtctgaagtgaaagatgagattcgtactagtttgaagaatctgaaccaattcctaccagaactgccagctgacctcgaggcgatccttgagagaaacgaaaaccttgaaggcgaattagaaagcctcaaggagaacctgccctttacaatgaacgaggggccatttgaagagaagctcaacttcagccaggtccatatcatggacgaacactggcgcggggaagctctgcgggagaagttgaggcatagagaggatcgactgaaggcccaacttaggcactgcatgtccaaacaggccgaggttctgatcaagggcaaacgtcagacagaggggaccttgcattccttgcgccgtcaagtggacgcactgggtgagctggtgactagcacctctgccgactccgcatcatcgccatccctatcccagctggaatcttcactgactgaggacagccagctcggccaaaatcaggagaagaacgccagcgccaggtag

SEQ ID NO: 24452 - DNA, 2985 bp, synthetic construct
  source 1..2985: mol_type = other DNA; note = Synthetic coding sequence
atgaaggcccagaagagcggcaaggagcagcagctggacatcatgaacaagcaatatcagcagcttgaatctcggctggatgaaatcctgtcccgcattgccaaagaaacagaagagatcaaagatttggaagagcagcttaccgaaggccagatcgcggctaacgaagccctgaagaaggacctcgaaggagtaattagcggactccaagagtacctaggcactattaagggccaggccacccaagcacagaatgagtgtcgaaagctgcgcgacgagaaagagacccttctgcagaggctaacagaggtggagcaggaacgcgatcaactggaaatcgtggcaatggatgcagaaaacatgcggaaggaacttgcagagttggagagcgccctacaggagcaacatgaggtcaatgcaagtctccagcagactcaaggggacctcagcgcctacgaggcagagctggaggcgagactgaacctgcgagacgccgaggccaatcagctcaaagaggagctggaaaaggtgacacgactcacacaactggaacagagcgcactacaggccgaactcgaaaaggagcgccaggctcttaaaaacgccttgggaaaggcccagttctctgaggaaaaggaacaagagaactctgagctacatgctaaacttaagcatttgcaggacgacaacaaccttcttaaacagcaacttaaagatttccaaaatcatctgaaccacgtggtggacggactggtacgcccagaggaagtcgccgctagggtggacgagctgcgaagaaagcttaagcttggtaccggagagatgaatattcacagccccagtgatgtgctcgggaagagccttgcggacttgcaaaaacagttctcagagattttggcgagatctaagtgggagcgcgacgaggcccaagtcagggagaggaaattgcaagaagaaatggcacttcagcaggagaagctggctacaggccaggaggaatttaggcaggcatgcgagcgcgccctggaggcccggatgaacttcgacaaaagacagcatgaggctagaatccagcagatggagaatgagatacactaccttcaggaaaatctgaaatccatggaggagatccagggcctgaccgacttacagcttcaggaagctgacgaggagaaagaaagaattctagcgcagttacgcgaactcgagaaaaaaaagaaactggaagacgccaagtcccaggagcaagtgttcggtctggataaggagctcaaaaagctgaaaaaggctgtggcaacttccgacaaactcgcaaccgccgaacttacaatcgcgaaagatcagttaaaatcactgcacggaacagtcatgaaaattaaccaggaaagagccgaggaattgcaggaggccgagaggttctcgaggaaagctgcccaggcggctcgagatctgacccgggccgaggccgagatagaactgctacagaatctccttcgccagaagggagagcaattccgcctggaaatggaaaaaacaggcgtgggaaccggagcaaatagccaggtgttggagattgaaaagctgaacgagaccatggagcgccagcgcactgagatcgcacgtttacagaacgttctcgacctgacaggatctgacaacaagggcggcttcgagaatgtcctggaggaaatcgctgagctgcgacgagaggtgtcatatcagaacgattacataagttccatggccgatccctttaaacgacgtggatattggtactttatgcctccccccccctccagcaaggtgtcctcgcacagctctcaagctacaaaagatagcggggtcgggctgaaatattccgcatccacccccgtccgcaagccgcgcccgggacagcaggacggaaaggaaggaagccagccaccgcctgccagcggttattgggtctacagtcccattagatctggactgcacaagctttttcccagccgcgacgcggactccggtggggacagccaggaagaatccgaacttgatgaccaggaagaaccaccgttcgtgcctccgcccgggtatatgatgtacacagttctccctgacggttcgcctgttccgcagggaatggccctgtacgctcctcccccccccttacccaataattcccggcctctgaccccgggcaccgtagtttatgggccaccgccagctggagcacctatggtgtatggcccccccccccctaatttctcaattcccttcattcctatgggcgtgctgcattgcaatgtgcccgaacaccacaacttagagaacgaagtaagcagactggaagatatcatgcagcatctgaagtccaaaaaaagggaggaacggtggatgcgtgcctcgaagaggcagagcgaaaaagaaatggaagaactgcatcataacatcgatgacctgctccaagaaaaaaaaagcctcgaatgcgaagttgaagaacttcataggacagtgcagaagcgtcagcagcaaaaagatttcatcgacggaaacgtcgagagcctgatgaccgagctcgagatagagaagtccctgaagcatcatgaggatatcgtcgatgaaattgagtgcattgaaaagacattacttaaacggcggtctgagcttcgggaagcggatcgactgctggccgaagctgagagtgaactctcttgcaccaaggagaaaacgaaaaatgccgtagaaaaattcaccgatgccaagcgctctctgctccaaacagagtcagacgcggaagagcttgagaggcgggcacaagagactgcagtgaatctcgtgaaagctgaccagcagctgaggagtcttcaggcggacgcgaaagacctggagcaacacaagatcaagcaagaggaaatcttgaaagagatcaacaaaattgttgcagccaaagactcagatttccaatgtctctctaagaaaaaggagaaactgaccgaagaatag

SEQ ID NO: 24453 - DNA, 5322 bp, synthetic construct
  source 1..5322: mol_type = other DNA; note = Synthetic coding sequence
atgaaggcccagaagagcggcaaggagcagcagctggacatcatgaataagcagtatcaacagctagaatctcgccttgatgagattctgtctaggattgccaaagagacagaagagatcaaggatctcgaagaacagctgactgaaggccagatcgcagctaacgaggcactgaaaaaagatctggaaggcgtgatttcagggctccaagagtacttaggtactatcaaaggacaagcaacacaggctcagaacgagtgtagaaaactccgcgacgagaaggaaaccctgcttcaaaggctgaccgaagttgaacaagaacgggaccagctggagattgttgccatggatgccgagaacatgcggaaggaactcgcagagctggagtctgcactgcaagaacagcatgaggtgaatgcgtcattacagcagacacagggtgatctttccgcctacgaggcggaacttgaggctagactgaacctccgcgacgccgaggccaaccagctcaaggaagaactcgagaaggtgactcggcttacacagctggaacaaagtgctctacaggctgagctggaaaaggaacggcaagctttgaaaaacgccctcgggaaggctcaattcagcgaggagaaggaacaagaaaactccgaattgcacgccaaattaaagcacctacaggacgacaataacctgctcaagcagcagttaaaggatttccagaaccatcttaaccacgtggtcgacggcttggtaaggccggaggaggtagccgcaagagtggacgaactgagacgcaagctgaagcttggaaccggcgaaatgaacattcactctccctctgatgtactggggaaaagcctggccgacctgcaaaaacagttttccgagatactggctcggagtaaatgggagagggacgaagcacaggtgagggaaaggaagctgcaagaggaaatggccctgcagcaagagaagctggctactggtcaggaagaatttcggcaggcctgcgagagagcattggaggctagaatgaactttgataagcgacagcacgaagcacgtatccagcagatggaaaatgagatccactatcttcaggagaatctgaagagtatggaggagatccaaggactgacagacctccaactccaggaagccgacgaggaaaaagaacgaatcctggcccagcttcgagagctggagaagaagaaaaagcttgaggatgcaaaatcacaggaacaggtgttcgggttggacaaggagctgaaaaagcttaaaaaggctgtggctacttccgacaaacttgctactgccgaactgaccattgccaaggaccagctgaagtccttgcacggcacagtgatgaaaatcaaccaggagagggccgaagaactgcaggaggctgagcgcttcagtcgtaaagccgcccaagcagcccgggacctgaccagagccgaagccgaaattgagctgctgcagaacctgctaagacagaaaggcgaacagttccgactcgagatggaaaaaaccggcgtggggaccggcgcgaattcccaggtcctagagattgagaaactgaatgagaccatggagcgccagaggacagaaatcgcccgcctgcagaatgtcttggacctgactggtagcgacaataaggggggttttgaaaacgtcctggaggaaatcgccgaacttcggcgggaggtctcttatcagaacgactatatttcatctatggccgatcctttcaagcgtcgcggctattggtattttatgcccccacccccctcgtcaaaagtctcaagccatagcagtcaggccaccaaggatagtggggttggacttaaatactccgcctccactcccgttagaaagcccagacctggacaacaagatgggaaggaaggatctcagccaccacccgcatctgggtactgggtttattcgcctatcagatctggcctgcacaagctatttccctctagggatgccgatagcgggggcgactcccaagaggagtctgagctggatgatcaggaagaaccgcccttcgtacccccgcccgggtacatgatgtatacagtgttgccagatggatctcctgtgcctcaggggatggctctttatgccccaccacctcccctgcctaacaattcgcgtccgcttactcccggaacagttgtttacggacctccaccagcaggagctccaatggtctacggccctcccccccctaacttttccatcccattcatcccaatgggcgttctgcactgcaacgttcctgaacatcataatctagagaatgaagtgtccaggctcgaagatattatgcaacacctgaaaagtaaaaagagggaagagcgctggatgagagccagcaagcgccagtctgagaaggaaatggaagaactccatcacaatatcgatgacctgctgcaggagaagaagagccttgaatgtgaggtcgaagagctccataggactgtccagaagagacagcagcagaaggattttattgatggtaacgtggagagcctgatgaccgagcttgagatcgaaaaaagcctgaaacaccacgaagatatcgtggacgagatagagtgtatcgaaaagacattgctcaaacggaggtcagaactgcgggaggctgatcggctgctggccgaagctgagtccgaactctcctgcacgaaggaaaagaccaagaacgccgtagagaagttcacagacgcaaaacgatctcttctacagacggagagtgacgctgaggaactggagcgaagggctcaagagactgcggtgaacctggtgaaagctgatcagcaactacgcagcctgcaagcggacgctaaggacctggaacagcacaagataaagcaggaagagatattgaaagaaatcaataagattgttgccgcgaaggacagcgactttcagtgtttgtcaaagaaaaaggagaagctgaccgaggaactgcagaagctgcagaaggatattgaaatggccgaaagaaacgaagaccatcatctccaggtgctcaaagaatcagaagtactccttcaggctaagcgagccgagcttgagaagctgaagagccaggtgacaagtcagcagcaggagatggctgtcctggataggcagcttggccacaagaaggaagagttgcacctgctgcaaggaagcatggtgcaagccaaagcggaccttcaggaggcacttcggctcggcgaaacagaagtgacggaaaagtgcaatcacattagagaggtgaagtccttgttggaagaactatcttttcagaaaggcgagctgaatgtgcagattagtgaacgaaaaacccagcttaccctgatcaagcaggaaatcgaaaaggaggaagagaatttacaggtggtcctgagacaaatgagcaaacataagacagagctgaagaacatcctcgacatgcttcagttagagaatcatgagctgcagggacttaagctgcaacatgaccagcgggtaagcgagctcgaaaaaacacaggtagccgtcctagaggagaaactcgaacttgaaaacctccaacaaatctcccaacagcagaaaggtgagatcgaatggcagaaacagttgctggaaagagataaacgagaaatagagcgtatgaccgccgagagcagggcactgcagagttgtgttgaatgtctcagcaaagagaaggaggacctgcaggagaaatgtgatatctgggagaagaagcttgcccagaccaagcgcgtgctcgccgctgcagaagaaaattctaaaatggagcagtccaacctggagaagcttgagttgaacgtcaggaaactgcagcaagaactggaccagcttaacagagacaagctcagtctgcataacgacattagtgccatgcagcagcagctgcaggaaaagcgcgaggcggtgaactccttgcaggaggagctcgccaacgtgcaggatcacctgaacctggctaaacaggacctcctgcatacgaccaagcaccaggatgtacttcttagcgagcagactcgcctacaaaaggacatctcggagtgggccaatagattcgaagactgccaaaaagaggaagaaaccaaacagcagcagttgcaggtactgcagaatgagattgaggagaacaaactgaagctggtccagcaagagatgatgtttcagaggctacagaaggagagagagtccgaggagagcaagctagaaacatccaaggtgactctgaaagaacaacaacaccaactggagaaagagctaactgaccagaagagcaagctggaccaggtcctgtccaaggttctagctgctgaagaaagggtccgtacgctccaggaagaagagagatggtgtgagagcctggagaaaactttaagccagacaaaaagacagctcagcgaacgggagcaacaactggtcgagaaaagcggggagcttttggcactgcagaaggaagctgattccatgcgagccgatttcagcctgctgaggaatcagttccttactgagcgcaagaaggccgagaagcaggtcgccagtttgaaggaagccttaaagattcagagaagccagctggaaaaaaacttgctggagcagaagcaggagaacagctgtatccaaaaggagatggccacaatcgagctggtggcccaggataaccatgagcgcgccagaaggctgatgaaagagttaaaccagatgcagtatgaatatactgaactaaaaaagcaaatggcaaaccagaaggacttggagaggaggcagatggagatctctgatgccatgaggaccctgaagtccgaggtcaaggatgagatcaggacctctctgaaaaacctcaaccagttcctgccagagctcccggctgatttagaagccatccttgaacgcaatgaaaacctggaaggtgaactggagtctctgaaggagaatctgccctttactatgaacgaaggacccttcgaagaaaagctcaatttttcacaggttcacatcatggacgaacactggagaggcgaggcacttagggaaaaactccgccaccgtgaagacagactaaaagctcaattaaggcattgtatgtccaaacaggcagaagtcctcatcaaaggtaagcgtcagacagagggaacacttcattccctgcgacgacaggtggacgcactcggcgagttagtcacatcaacgagcgcggatagcgcctcgagcccaagtctgtctcagctggagtcttcactgacagaggatagccagctgggccagaaccaggagaaaaatgcctccgcccgatag

SEQ ID NO: 24454 - DNA, 2487 bp, synthetic construct
  source 1..2487: mol_type = other DNA; note = Synthetic coding sequence
atggagaagcagaagcaggagatcgccggcaagcagaaggagatcaaggatctgcagatcgcaattgacagtcttgactctaaggatcccaagcacagtcacatgaaggctcagaagagcggcaaagagcagcagctggacattatgaataagcagtaccaacagctggaaagcaggctggacgaaattctcagtcgaattgccaaggagacagaagagattaaagacctggaggaacagctgacggaaggccagatcgctgccaatgaagctctcaagaaggacctggagggtgttattagtggactgcaggagtatttggggacgatcaagggacaggctactcaggcccagaacgaatgccgcaagcttagagacgaaaaggagaccctcctccaacgtctgactgaggttgaacaagagcgggaccagttggaaatcgtcgccatggatgctgaaaacatgcgtaaggagttggctgagctcgaatcagcgctccaggagcagcatgaagtgaatgcctccctacagcaaacacagggtgaccttagcgcttacgaagcagaactcgaggcccgcctgaatctaagggacgctgaggcaaatcaattaaaagaggagctcgagaaggttacccgactgacgcaacttgaacaaagcgcactccaagctgaattggagaaagagcgccaggcgttaaagaacgcactgggaaaggcacagttctccgaggagaaagagcaagaaaactctgagttgcatgccaagctgaagcacctgcaagatgataataacttgctgaaacagcagctgaaagactttcagaatcatctaaaccatgtggtggacggactcgttaggccggaagaggtggccgcacgcgtagacgagttgcgcaggaagctgaagctgggcactggagagatgaacattcatagtccttctgacgtactcggcaagtctctggcagatctgcaaaagcagttttcagaaatcctcgccaggtccaagtgggagcgagacgaagcccaggtgcgggaacgaaagctgcaggaggaaatggcactgcagcaggaaaaactggctacaggccaggaagagtttcgccaggcctgtgaacgcgcactcgaagctagaatgaactttgacaagagacagcacgaagcccggattcaacaaatggaaaatgagattcattacctgcaagagaacctgaagtcgatggaagaaattcagggccttaccgacctgcaactgcaggaggctgacgaggaaaaggaacggatcctggcccagctcagagaattggaaaagaaaaagaaactcgaggacgctaaatcccaagaacaggtgtttggcctagacaaggagttgaaaaaacttaagaaagctgtggccacgagcgataaactagcgactgctgagcttactatcgccaaagaccaactcaaaagcctgcacggaaccgtgatgaagattaaccaggagcgcgccgaagagctgcaggaggcagagcggttttctcgcaaggcagctcaggcagcccgggatttgacccgggctgaagcagagatagagcttcttcaaaatctcttgagacagaagggggaacagttccgcctggaaatggaaaaaacaggggtaggtacaggtgctaacagtcaggttttagagattgaaaaacttaacgagaccatggagagacaacggacggaaattgcgcgcctccagaatgtcctggacctgactggaagtgataacaaggggggattcgaaaacgtgctggaagagatcgcagagctccggcgtgaggtctcatatcagaatgactacatctcctcaatggccgatcccttcaagcgccgagggtactggtattttatgccccctccaccctcttctaaggtgagttcccattcctcccaggccaccaaggacagcggagtcggcctcaaatattctgcctctactcctgtgagaaagcccaggcctggccaacaagatggcaaggaaggcagccagcctccccctgcttccggatactgggtgtacagcccgatcaggtctgggcttcacaagctatttccttcaagagatgccgattctggaggggattcacaggaagagagcgaactggatgaccaggaggagcccccttttgtccctccgcccgggtatatgatgtataccgtgctgcctgacgggtcgcctgtcccccagggcatggcactttatgcccctcctccccccttgccaaataactctaggccgctgacccctggcacggtcgtgtatgggcccccccctgctggcgcgcccatggtctacggccccccgcccccgaatttttccatccccttcatcccaatgggggtgttgcactgcaacgttcctgagcaccacaacctggtgagcggcaaaacctacaactctctgagcactctgcttccctgggtcacggacaaagttatatacttaatgtcctag

SEQ ID NO: 24455 - DNA, 6978 bp, synthetic construct
  source 1..6978: mol_type = other DNA; note = Synthetic coding sequence
atgaagaagggcagccagcagaagatcttcagcaaggccaagatcccgtcatcttctcacagccctatcccgtcttctatgagcaatatgaggtcacggtcactgtcacctttaatcggatcggagaccttaccttttcactccggcgggcaatggtgcgagcaggtggagatcgctgacgagaataacatgttgctggattaccaggatcacaagggcgcagactcccacgctggcgtgcggtacatcactgaagctttgatcaaaaagctgaccaaacaagataacctcgccctcatcaagagcttgaatctgtcactgtccaaggacggcggaaagaaattcaaatacatagagaatctggagaaatgtgtcaagttggaggtactaaacctatcatacaatctgatcggaaaaatcgagaagctggacaaactgctgaagctccgtgagttgaacctgtcttataataagatctccaagatcgagggtattgagaatatgtgcaacctgcagaaactgaacctggccgggaacgagatcgaacatattccggtctggctcggaaaaaaactgaagtcattgcgagtgctcaacctaaaaggaaacaagattagttccctgcaggacatttcaaagctgaagcccctgcaagacctcatcagcttgattctggtagagaaccccgtggtcactttaccacactacttgcagttcacaatctttcatctccgttccctggaaagcttagaaggccagcccgtcacaacacaagacagacaggaggcctttgaacgatttagcctggaggaggtggaaaggctcgaacgggatctggagaaaaagatgatcgaaacagaagaactgaagagcaaacagacccgctttctagaggaaataaagaaccaggataagctcaacaaatccctgaaggaagaggcaatgttgcagaaacagtcatgtgaggaactcaagtctgacttaaacacaaaaaacgaactcctaaagcagaagacgatcgaactgactcgggcttgtcagaaacagtacgagttagagcaggagcttgccttttacaagatcgacgccaaattcgagccactcaactattaccccagcgagtacgcagaaattgataaagcccccgacgagtctccctacataggaaagagcaggtacaagcgcaacatgtttgccactgagagttatatcattgactctgctcaggcagtacagatcaagaaaatggaacccgacgaacagctgcggaacgaccatatgaacttacggggacatacaccactcgacacacaactggaagataaggagaagaagatctctgcagcccagacacgtttaagcgagttgcatgatgaaatcgaaaaggctgagcaacagatcctgcgcgccactgaagagtttaagcagctggaggaagcaatacagctgaagaaaatttcggaggccggtaaggatctcctatacaagcaactcagcggcagactgcagctggttaacaagctgaggcaagaggccctagacctggaactgcaaatggaaaagcaaaaacaggagatcgccggaaagcaaaaggagatcaaagacctacagatcgcaatcgactctctggattcaaaagaccctaaacacagccacatgaaagctcagaaaagcggaaaggagcagcaacttgatattatgaataaacaataccagcagctcgaaagccggctcgacgaaattctgagcagaatcgccaaggaaactgaagagatcaaggacctcgaggagcagctgacggaaggccaaatcgccgccaacgaagccttgaaaaaagacctcgagggcgtaatttccggtcttcaggagtacttgggtaccattaagggccaagcgacacaggcccaaaatgaatgtagaaaactgagggacgaaaaagaaacgctgctacagaggttaacagaggtggagcaggagagggaccagctggaaatcgtcgccatggacgctgagaatatgaggaaggaactggccgaactggagtctgctctccaggagcagcacgaagttaatgcaagtctccagcagacacagggggatctttcggcctacgaagctgagctcgaggcccgcctgaacttaagggacgctgaagccaaccagcttaaggaagaactggaaaaggttacccgcctcacacaactggagcagagtgccctgcaggcggagttagaaaaagaacggcaagctctgaaaaacgctttgggcaaagctcagttttccgaggaaaaagagcaggagaacagtgaactgcacgccaagctcaaacacctacaggacgacaacaatcttttgaaacaacagctaaaggattttcagaatcaccttaaccatgtagtcgacggccttgtaagaccagaagaagtggcagccagggtggatgagttgaggaggaaactgaagcttggaaccggggaaatgaatatccatagcccatcagacgtcctgggtaaaagccttgccgacctgcagaagcagttttcggagatactggctaggagcaagtgggagcgcgatgaagcccaggtccgcgaacgcaagttgcaggaagagatggccctgcagcaggaaaagttggcaaccggacaggaggaatttaggcaggcctgtgagagagctctcgaagccagaatgaactttgacaagcgtcagcatgaagctaggatccagcaaatggaaaatgagatccactatctccaggaaaacctcaagtctatggaggagatccaggggctcacagacttgcagctgcaggaggcagatgaagaaaaagagcgtatcctggcccagctgagagaattggagaagaaaaaaaagctggaagacgctaaatcacaggagcaggtgttcggcctcgataaagagctcaagaagctgaagaaggctgtcgcaacttctgataagctggcaaccgctgagctgaccatcgcgaaggaccaactgaaaagtcttcacggaacagtcatgaaaatcaaccaagagcgcgccgaagagctgcaagaggcagagcgatttagtcgcaaagctgcccaggcagcacgggacttaactcgcgccgaagccgagattgaactattacagaacctgctgagacagaagggtgaacagtttcgactagaaatggagaagaccggcgttggcacaggcgcaaattcacaggttttagagatcgagaaacttaatgagaccatggagaggcagagaacggaaatcgctcgtttgcagaacgtcttggatctgacggggtccgataataaaggtggcttcgaaaacgtgctcgaagagatcgctgaattgagaagggaggtgtcctaccaaaacgactacatcagcagcatggccgatccatttaagcgccgcggctattggtacttcatgcctccaccaccctccagcaaggtgtcttcccatagtagccaggcaacaaaagactccggggttggtctcaaatactcagcgtcaactcccgtgaggaagcccaggccaggacagcaagatgggaaggagggctctcagcctccacctgcctcaggttactgggtatatagtcccatccgctcgggactgcataaactgtttccctcacgtgatgccgacagcggcggcgactcacaggaggagtctgagctggacgaccaggaggagcctccttttgtaccaccccctggctacatgatgtacaccgttctccccgatgggtcccctgtgcctcaggggatggccctttacgctccacccccacctcttcctaataactctcggcccctaactccaggaaccgttgtgtacggccccccccctgccggtgccccgatggtctatggaccaccccctcccaacttttctattccctttatacctatgggtgtgttgcactgtaacgtcccagagcaccataatttggagaatgaagtgtctagactggaagatatcatgcagcacctaaagagcaaaaagagagaggaacgatggatgcgagctagtaagcggcagagcgaaaaggagatggaagaattgcaccacaacattgacgacctgctgcaggagaaaaagtcactggagtgtgaggtagaagaactccacagaacagtccagaaaaggcaacaacaaaaagatttcatagatggaaatgtcgagtctctgatgactgagctggagatcgagaagtcccttaagcaccatgaagacatagttgatgagatcgagtgtattgagaagaccttgcttaagaggagatcagaactccgggaagcggacaggttgctggccgaggctgaaagcgaactgtcctgcacaaaagaaaagacaaaaaatgctgtggagaaattcacagatgctaagcggtccctgttacagaccgagtcggatgccgaagaactcgagagacgcgctcaggagactgccgtcaatttggtgaaagcggatcagcagcttcggtcgctccaggccgatgccaaagacttggagcagcacaaaattaaacaggaagaaattctcaaggagatcaataagatcgtagcagccaaagattccgatttccagtgtctctctaagaaaaaggagaaacttaccgaagagttgcagaaactgcaaaaagatattgagatggcggaacggaacgaggaccaccacctacaggtgctgaaagagagtgaagtacttctgcaagcaaagagggccgagctggagaagctgaagagtcaggttacttcccagcagcaggaaatggccgtccttgacagacagcttggacacaaaaaggaggagctgcatcttctgcagggatccatggtgcaggctaaagccgatcttcaggaagccttacgcctgggagagacagaggtcacagagaagtgtaatcacattagggaggtcaagtccctactcgaggagctgtcctttcagaaaggcgagttaaacgtccagattagcgaaagaaagacccagctcacactgatcaagcaagagatagagaaggaggaagaaaacctgcaggtggttctgagacagatgagtaaacataagaccgaattgaaaaacatactggatatgctgcagttggagaatcacgagctccagggccttaagctgcaacacgaccaacgcgtgtccgagctcgaaaaaacgcaggtcgccgtgttggaagaaaagcttgaattagaaaacctacaacaaatttctcagcagcaaaagggtgagattgaatggcagaaacagctgctggaaagggataagcgcgagattgaacgcatgacagcagaatcccgagcgctccagtcatgcgttgagtgccttagcaaagaaaaggaagacctgcaagaaaagtgcgacatatgggaaaagaagctggctcagaccaagcgagtgctcgcggccgctgaggaaaatagtaaaatggagcagtccaacctggagaagctggagctgaacgtgcgtaagcttcaacaggagctggatcagctgaatcgggataagcttagtctgcataacgatatctcagccatgcagcagcagctgcaggaaaaacgggaagcagtaaactctctgcaggaggagctagcaaatgtccaggatcacctgaatctagccaagcaagacctcttgcacacaacaaaacatcaggacgtgctgctgagcgaacagacccggctccagaaagatatttccgagtgggccaaccgctttgaagactgtcagaaagaagaggaaactaaacagcagcagctacaggttcttcagaatgagattgaggagaacaaactgaagctggtgcagcaggaaatgatgttccagaggctgcagaaggaacgtgaatccgaggagagcaagctggagactagtaaggtgacactgaaagaacagcagcatcagcttgagaaggagctgaccgaccagaaatccaagctcgaccaggtgctgagtaaagttctcgccgccgaagagcgagtgagaacactgcaggaagaggaaaggtggtgtgagtccctggagaagaccctgtcccaaactaaaaggcagttgtccgaacgggaacagcagcttgtcgagaaaagcggcgaactgttggccctgcagaaagaagccgatagcatgcgggctgatttttccttgctgcgaaaccagttccttactgagagaaagaaggctgagaaacaggtggcctctttgaaggaggcattgaagatccaacggtcgcagctggaaaagaacctgctggagcagaaacaagagaacagctgtatccaaaaggagatggcaacaatcgaactggttgcccaggacaatcatgaaagagcgcggagactgatgaaggagttaaaccaaatgcaatatgagtacacagagctgaaaaaacagatggccaatcagaaggacttggagaggcggcagatggaaatctcagacgctatgagaaccctcaagagtgaggtgaaagacgaaattcggacgtctctgaaaaacctgaatcagtttctgcctgaattgcctgcggatctggaggccatactagaaaggaatgagaacttggagggcgagttggaaagtctgaaagagaatctgccctttacgatgaatgagggtcccttcgaagaaaaactgaatttctctcaggtccacatcatggacgagcactggaggggagaggcactccgtgagaaactaaggcacagagaagatcgtctcaaagcacagttacgccattgcatgtctaagcaagcagaggtgttaatcaagggaaagcgccagaccgagggcactctgcacagcctgagaagacaggtggatgcccttggcgagttagtgaccagcacctctgctgactcggcatcatctccatccttgtcacagctggaatcttctctgacggaggactcacaacttggccagaaccaggaaaaaaatgccagcgctcgatag

SEQ ID NO: 24456 - DNA, 1359 bp, synthetic construct
  source 1..1359: mol_type = other DNA; note = Synthetic coding sequence
atgaagaagggcagccagcagaagatcttcagcaaggccaagatcccttcctcatcacatagtcccatccctagctctatgtcaaacatgcgaagtcgaagtttgagtccattgatcggctccgaaactctccctttccattccggaggccaatggtgtgaacaggtcgagatcgcggacgaaaacaacatgctgctcgactatcaggatcataaaggagctgatagccacgcgggtgtgcggtatatcacagaggcccttattaagaagctgaccaaacaggacaatttggccctgatcaagtctctaaatctatccctgtcaaaagatggaggaaagaaatttaagtacatcgaaaacctggagaaatgtgttaaactcgaggtgcttaatttgtcatataacctcattgggaagattgagaaactagacaagctattaaaacttcgtgagcttaacctctcctataataaaatctctaaaatagagggaatcgaaaatatgtgcaatctccaaaagctgaatctggccggaaacgaaatcgagcacattcctgtttggctgggcaagaaacttaaatctttacgggtcctgaacctgaagggtaacaaaatatcctctttgcaggatatctccaaactgaaacccttgcaggacctgatctctctcatcttggtcgaaaatcctgtcgtgaccctgccacattatctacagttcaccatcttccacttgagatctttagagagtttggagggacagcccgttactacacaggacaggcaagaagcgttcgagcgtttcagccttgaggaggttgaacgactcgaaagagacctggaaaagaagatgattgaaaccgaagagctgaaatctaagcagaccaggttcctcgaggagattaaaaatcaggataagctgaacaaaagtctgaaggaggaggcaatgctgcagaagcagtcatgcgaagagctcaagtccgatttaaataccaaaaatgaattgctgaagcagaagaccatcgagctgacccgtgcttgtcaaaagcaatacgagttggagcaggagctcgccttttataagattgacgcaaagtttgaacctctgaattactacccatcggaatacgcagagatcgataaagccccagatgagtctccgtatatcggcaaatctcggtacaagaggaacatgtttgcaaccgagtcctacattatcgacagtgcacaagcagttcaaatcaaaaagatggaaccagacgagcagttgcgcaatgatcatatgaatctgcgtgggcacacacccctggatacacagttggaggaccacaagttagattatcagaattgcatgatgaaatag

SEQ ID NO: 24457 - DNA, 1053 bp, synthetic construct
  source 1..1053: mol_type = other DNA; note = Synthetic coding sequence
atgtgctgcgacagcgacttcgtggcccggaacaagagccaggactctgggattgcggagatggaagaactgcccgtgccgcacaatatcaagatcagcaacatcacatgtgactctttcaaaatctcttgggaaatggatagtaagagtaaagatcgaattacgcattactttattgatttgaataaaaaggagaataagaatagcaacaagtttaagcataaagatgtacctacaaagctggtagcaaaagccgtcccgctaccaatgacggtgaggggtcattggttcctgtcccctcgcacggaatataccgtggcagtgcagactgcttccaaacaagtggacggagattatgtggtgtccgagtggagtgagatcatagaattctgcaccgctgactactcaaaggtgcacctgacacagctgctggagaaagcagaagtcatagcgggccgaatgctgaagttctcagttttttaccgcaatcagcataaggaatatttcgactacgtgcgagaacaccatgggaacgccatgcagccaagcgttaaggacaattctggctcacacggatcgccaatctccggaaagctggaagggatcttttttagctgttccaccgagttcaataccggaaaacccccacaggattccccatatggcagataccggtttgaaatcgcggccgaaaagctgttcaatccgaacacaaacctgtatttcggtgatttttactgcatgtacaccgcctatcattatgtgattctggtgatagcacccgttgggtccccaggggatgaattttgtaagcagcgactgccccagctgaacagcaaagataacaagtttttaacctgtacagaagaagatggcgtgctggtgtatcaccacgctcaggatgtgatcctagaggtcatttacacggacccggtggatctgtccgtaggtacagtggccgagataaccggtcaccagctgatgagcctctctactgctaatgccaagaaggatccctcttgtaaaacctgtaacatctctgtcggtcggtag

SEQ ID NO: 24458 - DNA, 1131 bp, synthetic construct
  source 1..1131: mol_type = other DNA; note = Synthetic coding sequence
atggaggtgccccggctggaccacgccctgaacagccccaccagcccatgtgaggaagttatcaagaacctgtcactggaagcgatccagttgtgcgatcgtgatggtaataaatctcaggacagcggcatcgctgaaatggaagagctgccagtaccccataacattaagattagtaatattacttgtgactcgttcaaaatttcctgggagatggactccaaatctaaggacaggattactcattacttcatcgatctgaacaagaaggagaataagaattctaataagtttaagcacaaggatgtgccaactaaacttgttgccaaagccgtgcccctgccgatgacagttcgagggcattggttcctgagccctaggacggaatacaccgtcgctgtgcagacagcttccaagcaggtggatggagactatgtcgtgagcgagtggtcagagatcatcgaattctgtacagctgattattcaaaagtacatctaacgcaacttctggagaaggccgaggtcatcgctggccgaatgcttaaattctccgtgttctaccggaatcagcacaaggagtactttgactacgtccgtgaacatcacggtaatgctatgcagccctctgtgaaggacaattctggttctcacggatcccccatttccggcaaactagagggcatattcttctcttgctcaaccgagtttaatactggtaaaccacctcaagactccccctacgggaggtatcggttcgaaatcgccgctgaaaagctgttcaatcccaataccaatttgtattttggtgacttttattgcatgtacaccgcctaccattacgtcattctggttattgctcccgtgggatcaccgggcgatgaattctgtaagcagaggttgccgcagctgaattccaaagacaataagttcctaacatgcacagaagaggacggagtactggtataccaccatgcgcaagatgtcattctcgaagtcatctacactgatccagtggacctatccgtgggaactgtggcagaaattaccggacaccagctgatgtctctaagcacagctaatgccaaaaaagatccctcctgcaaaacctgcaacatcagcgttggccgctag

SEQ ID NO: 24459 - DNA, 1263 bp, synthetic construct
  source 1..1263: mol_type = other DNA; note = Synthetic coding sequence
atgctgaaggccgtgatcctgatcggcggcccccagaagggcaccaggttcagaccgttgagttttgaagttcccaaaccattatttccggtcgcaggcgtgccaatgatccagcaccacatcgaggcctgtgctcaggtcccaggtatgcaggagatactcctgattggcttttatcaacctgacgagccacttactcagttcctcgaagctgctcagcaggagttcaatttgcccgtacggtacttgcaggagtttgcccctctcggtactggggggggtctgtatcatttcagggaccagattctggccggctcccccgaggcattttttgtcctcaacgcagatgtgtgctcagattttccactgagcgccatgctcgaggcacatcggcgacagcgccatccgttcctcctgttgggaactacggccaacagaacccagagcttgaactacgggtgtattgtggagaacccacagactcacgaggttctacactatgtggagaaacctagtacattcatcagtgatatcatcaattgcggcatctacctctttagccccgaagccttaaaacctttgcgagacgtgtttcagcggaaccagcaggatggccagctggaggacagtccaggattgtggccgggggctgggacaattaggctggaacaggacgtgttctctgctctggccggccaggggcaaatctacgtccatctgacagacggcatttggtcgcagattaaatccgccggatcagccctttatgccagtcgactatacctgagtaggtaccaagacacccatcccgaacgcctggccaagcacacacctggcggaccatggattcgaggcaacgtgtacattcaccctaccgccaaagtggctccctctgccgtacttggcccaaacgtgtcaatagggaaaggagtgacagtcggggagggcgtgcggcttagagagtctatcgtcctccacggggccacactccaggaacatacgtgtgtgctgcacagcatcgttggatggggttcaaccgtaggaaggtgggcccgggtggagggcacaccgagtgatcccaaccctaacgatccccgggctcggatggacagcgaatctctatttaaggatggcaaacttctgcctgcgatcacgatattgggctgccgcgtgaggatacccgctgaggtactcatactgaactccatcgtgttaccgcacaaagagctttccaggtcattcactaatcagattattctgtag

SEQ ID NO: 24460 - DNA, 411 bp, synthetic construct
  source 1..411: mol_type = other DNA; note = Synthetic coding sequence
gaccccctgagctggctgagcggcccctggggccaggtgcccgccggcatctgcccacctagacaccgcggctggtaccacttccgtgaccagatactggccggttcccccgaggccttcttcgttcttaatgccgacgtgtgtagcgattttcctctctctgccatgctggaagcgcaccggcgacaacgtcatccatttcttctgctggggacaactgcaaatcgtacgcagtcccttaactatggttgtatagtcgagaaccctcagactcacgaagtcctccattatgtggaaaagcccagtacattcatttcagacatcataaattgcggcatctacctgttttctcctgaagctctcaaaccgctgcgggatgtgttccaacggaaccaacaggacggtcagtag

SEQ ID NO: 24461 - DNA, 1365 bp, synthetic construct
  source 1..1365: mol_type = other DNA; note = Synthetic coding sequence
atggagcggaaggacttcgagacctggctggacaacatcagcgtgaccttcctctctctgaccgacttgcagaagaacgagaccttggatcacctcatatctctctctggagcagtacaactccgccatctctcgaataatcttgaaactctgctcaaaagagatttcctgaaactgctccctctggaacttagtttctacctgttaaaatggctcgaccctcagaccctcctcacttgctgcctggttagcaagcagtggaataaggttatttccgcttgtactgaagtgtggcagacagcttgcaagaacctcggttggcagatcgatgattccgtgcaggatgcacttcactggaagaaagtgtatctgaaagcaatactgaggatgaagcagttagaggaccacgaggcctttgaaaccagtagccttatcggccattctgcccgcgtatatgccctgtactacaaagatggtctgctgtgtaccggatccgacgatctgtctgctaaactgtgggatgtttccaccggccaatgcgtgtacgggattcaaactcacacatgcgctgccgtgaagtttgacgagcagaagctcgttactggcagcttcgataatacagtggcttgttgggaatggtcatcaggcgcccggacacagcactttcgtgggcacaccggcgccgtcttttccgtagactataatgacgagttggatatccttgtcagcggatccgctgacttcactgttaaggtgtgggctctcagcgctggaacgtgcctaaacactctgactggccacaccgagtgggtgactaaggtggtgttgcagaagtgtaaggtgaagtcccttttgcattctccgggtgactatattctgttgagcgccgacaagtacgaaataaagatatggcctattggcagggaaattaactgcaagtgccttaaaacgctctcagtgagtgaggacagatcaatctgtcttcagccaagacttcactttgacggaaagtacatcgtttgcagcagcgccctggggttgtaccagtgggacttcgcctcttatgacattctacgggtcatcaaaactcctgaaattgccaatctggcgttgctgggctttggagacatcttcgctctgttgtttgacaaccgctacctgtatattatggatctgcggactgaatcgctgatctcccgatggccattgcccgaatacagaaagagcaaaagagggtcctcttttctggctggcgaagcaagctggctaaacggcttggatgggcacaacgatacaggattggtgtttgctacatctatgccagaccactccatccacctggtgctgtggaaggagcacggctag

SEQ ID NO: 24462 - DNA, 372 bp, synthetic construct
  source 1..372: mol_type = other DNA; note = Synthetic coding sequence
atggaggccgccgagaccgaggccgaggccgccgccctggaggtgctggccgaagtcgcgggcatcttagagcctgtcggcctccaagaagaggccgaactgcctgcaaagattctggtggaatttgtcgtggactcgcaaaagaaagacaagctgctgtgcagccagctccaagtagccgatttcctccaaaacatcttggcccaagaacgcccttggtgcgtgctccagggctgctggtctacaacttgctggcgatgcaagttcgccatgacttcgtggagaaccgcagcctggaggaagatcctggagaaggcctctgacttcccacatcttccaacaataatcactggaaaaaccgtcaattcgtag

SEQ ID NO: 24463 - DNA, 834 bp, synthetic construct
  source 1..834: mol_type = other DNA; note = Synthetic coding sequence
atggaggccgccgagaccgaggccgaggccgccgccctggaggtgctagccgaagtcgcgggaatcctcgagccagtgggtcttcaggaggaagccgaactaccagcaaagatcctggtggaattcgtggttgacagtcaaaaaaaagacaaacttctgtgctctcagctgcaagtggccgactttcttcaaaacatactcgctcaggaggataccgcaaagggattagaccccctggctagtgaagataccagtagacaaaaagcaattgccgccaaggaacagtggaaggagcttaaggccacgtacagagagcacgtcgaagccataaagatagggctgaccaaggccttaacccagatggaggaggcccagcgcaaaaggacacaactcagagaggcctttgagcagctgcaagcgaaaaaacagatggccatggaaaaacgccgggcggtgcagaatcagtggcaactgcagcaggagaaacacttacagcacctggctgaggtttctgccgaggtgcgggaacgaaagacagggactcagcaagagctcgatcgcgtgttccagaagctcgggaacctgaagcaacaggcagaacaggaaagagataagctgcagaggtatcagacctttttacagctactctatacactccagggtaaactgctctttcctgaggctgaggccgaagctgaaaacctccccgatgataagcctcaacagcccacaagacctcaggagcagtctactggcgacacaatggggcgcgatccaggtgtgtctttcaaggcagtgggcctgcagcccgccggagacgtgaacctgccgtag

SEQ ID NO: 24464 - DNA, 1713 bp, synthetic construct
  source 1..1713: mol_type = other DNA; note = Synthetic coding sequence
atgagcagcatcggcgagggcatcgacttcagccaggagcggcagaagatttccggcctccgaaccttagagcagtccgtgggcgagtggctcgagtctattggcttacagcagtatgaaagtaagctgctgttgaacggctttgatgatgtacacttcctcgggtccaatgtgatggaggagcaggatctccgagacatcggtatctccgatccgcagcacaggcgcaagctgttgcaggcagcgcgctccctcccgaaggtcaaagcccttggttacgatggcaattcacctccttccgtgccctcttggttagatagcctaggtttgcaagattacgtgcattcattcctgagcagcggatattccagcatagacactgtgaaaaatctgtgggaattggaattggtcaatgtactgaaagtacagctcctggggcatagaaagcgcatcattgcgagtcttgctgatagaccttacgaggaaccccctcagaagcctcctaggttctcccagctgaggtgccaggacctcctgtcccagacctcatcccccctgagtcagaacgactcatgtacagggaggagcgctgacctgcttctaccacccggcgatacagggcgaaggcggcatgattcactgcacgatcccgcggccccaagcagggctgagcgcttccgaatacaggaggaacacagggaagcaaagctgactctgcgaccaccgtctctggctgcgccctacgcacctgtccaatcgtggcagcaccagccagagaagctgatctttgagtcatgtgggtacgaagccaattacctcgggagcatgttgatcaaagacctgaggggaaccgagagcacccaagatgcgtgtgctaaaatgcggaagtctactgaacacatgaagaaaatcccgactattatcctctctattacttacaagggcgtgaagttcattgatgcctcaaacaagaacgtgattgccgagcacgagatcaggaatatttcctgcgctgcgcaggaccccgaagacctgtgcactttcgcctacatcaccaaggatctacaaacaagccaccattattgtcacgtcttctccactgttgatgtaaacctcacctacgagataatcctgactctcggtcaagcctttgaggttgcatatcagctggctctgcaggctcaaaaaagcagggccaccggcgcttctgcggccgagatgatcgagactaagtctagcaagcctgtccctaagcctagggtgggagttcggaagtcagctgtccccctgccccccgactcccgatgttgctattgccatacttgtacgacgcacagaccctcgtatctccctcttcccagcgtgagccccggggttaagctcgagcctccggatatggatcaagacgctcagtcgcacgcaagtgtgtcctgggtggtcgaccccaagcccgattccaaacggagcctgtccacaaaccacacaaggctggagctcgtctgctgcagccaacccgagaacgagctggtgagtacaatcagtggcgataaaccaaaatccttcctcgagcctctgctgttcgtaatgccaaccaccgcctacaatcataattgtccggagtggcgcagtcaaaaggatggcggctgttcaaccagtgagtgtcctcaccatctttgcctcgaaaagcctggggtgctgtcattggaaatgtag

SEQ ID NO: 24465 - DNA, 1785 bp, synthetic construct
  source 1..1785: mol_type = other DNA; note = Synthetic coding sequence
atggagagcaaccacaagagcggcgacggcctgagcggcacccagaaagaggctgctctcagagctctcgtacaaaggaccggctactccctcgttcaagagaacggtcagcggaaatacggaggaccccctccaggctgggacgcagctccccccgaacggggctgcgagattttcatcggaaagctcccaagagacctcttcgaggatgagctgatccccttgtgtgaaaagattggaaagatctatgagatgaggatgatgatggacttcaacgggaacaaccgcggatacgcttttgtaacatttagtaataaggtagaagctaaaaatgccataaaacagctcaacaactacgagattcggaatgggagactcctcggagtatgcgccagcgtcgacaattgtaggctgttcgttggaggtattcctaaaaccaagaagcgggaagagatcctgtcggaaatgaaaaaggtgaccgaaggcgtcgtggatgtcatcgtctacccttctgccgccgacaaaacgaaaaatagggggttcgccttcgtggagtatgagtctcatcgtgctgcagcgatggcgcggaggaagctacttccaggtcgaatccagttgtgggggcatggcattgctgtggactgggcagaacccgaggtggaggtggacgaggatactatgagcagcgtcaagattctttacgtccgtaatttaatgttgagtacttcagaggaaatgattgagaaggaatttaataacatcaaacccggggccgtggagcgagttaaaaaaatacgggactatgcattcgtgcatttttcaaacagggaggacgctgtcgaagcaatgaaagctctgaacggcaaagtgctggatgggtctcccatcgaggtcacattggcaaagccggtggacaaggatagttacgtgaggtatacaaggggcaccggcggcaggggtaccatgctgcagggggagtacacctacagtctcggtcaggtttatgatcccaccaccacttatttgggtgccccagtgttttatgccccccagacgtacgctgccatcccatcgctgcacttcccagctaccaaaggacacttatcaaaccgcgctatcatccgcgctccgtctgtccgcgaaatttatatgaatgtaccggtcggagcggccggcgtgcggggcttgggcggccgaggctacctagcctatacgggactggggagaggttaccaggtcaagggggacaaacgggaggacaaactttatgatatactgcccgggatggagttaacccctatgaaccctgtgacgttgaaaccacaggggatcaagctcgctccacagattctcgaagagatctgccagaagaacaactgggggcagcctgtgtatcagctccattcagccattggccaagaccaaaggcagctttttttatacaagatcactatcccggccctggccagccagaaccctgcaattcatccattcactccgcccaaactgagcgccttcgtggatgaagctaaaacttacgccgccgaatacacacttcagaccctcggcatccccaccgatggcggcgacgggaccatggcaaccgcggccgctgctgcaacggcatttcccgggtacgcagtaccaaatgcaaccgctcccgttagcgctgcccagctaaagcaggcagtgaccctggggcaagacctggcagcttatacgacttacgaggtgtacccaaccttcgccgtgactgcccggggggacggctatgggactttctag

SEQ ID NO: 24466 - DNA, 1785 bp, synthetic construct
  source 1..1785: mol_type = other DNA; note = Synthetic coding sequence
atggaggccgtgtgcctgggcacctgccccgagcccgaggccagcatgtccacggctatccccggcctgaagaaaggcaacaacgccctacagtcaataattctgcagacacttcttgagaaagagaatggacaacgcaagtatgggggaccgcccccaggctgggacgccgctccacctgaacgcggctgcgaaatcttcatcggaaagctgccgagagatttgttcgaggacgagcttatacctctgtgcgagaagatcggcaaaatctatgagatgcggatgatgatggatttcaatggaaataacaggggatatgcctttgttacattcagcaataaggtcgaggcgaaaaacgctattaagcagttaaacaattacgaaatccggaacggtaggctgttgggtgtgtgcgcatctgttgacaattgcagactgtttgtggggggaattcccaaaaccaagaaacgcgaggagattctgagtgagatgaaaaaagttaccgagggggttgtggatgtgatagtgtacccgagcgccgctgacaagacaaagaacagagggtttgcttttgtagaatatgagagccaccgtgcagctgccatggcgaggaggaagctgctccccggccgtatccagttgtggggacacggcatagccgttgattgggcagaacccgaagtggaagtggatgaagataccatgtcatcggttaaaatcctgtacgtgcggaatctaatgctgtccacatccgaggaaatgatcgaaaaggagtttaacaacattaaacctggagcggtcgaacgtgtgaaaaagattcgggactatgcctttgtacacttttccaaccgcgaagacgcggttgaagctatgaaggccctcaatggtaaggtcctcgacggtagccctatcgaggtcactcttgcaaaaccagtggataaagactcttacgttcgttatacacgaggtactggcggccggggtaccatgcttcagggggagtatacttatagcttagggcaggtatacgaccctacaaccacttacctgggcgcccccgtgttctacgctccacaaacctacgctgctattcctagcctgcacttccctgctactaagggtcacctctctaacagagcaataattagagctccctccgtcagaggcgctgcgggcgtgagaggactaggagggcgtggctacctggcttacacaggactcgggaggggctaccaggtcaaaggcgacaagcgggaagataaactgtacgatatcttgcctggcatggagttaacccccatgaacccagtgaccctaaaaccccagggaataaagctggctccgcagatccttgaggaaatatgtcaaaagaataattggggtcaacctgtgtatcagctccactctgcaatcgggcaggaccaacgtcagctctttctatataagatcacaatcccagcactggcctcacagaatcccgctatacacccctttaccccacccaagctctccgcttttgtggatgaagccaaaacatatgcggccgaatatacattgcaaacactcggaatccccactgatgggggtgacgggactatggcgacagccgccgccgccgcaaccgcctttcctggttacgccgtgcctaacgcgactgctccagtgtcagcggcccagctgaagcaggcggtcactttagggcaagatctggccgcatatacaacatacgaggtgtacccaaccttcgctgttaccgctcggggagacgggtacggcaccttttag

SEQ ID NO: 24467 - DNA, 1761 bp, synthetic construct
  source 1..1761: mol_type = other DNA; note = Synthetic coding sequence
atggagagcaaccacaagagcggcgacggcctgagcggcacccagaaagaagctgctctgcgtgcgctggtgcagcgtacaggttattcactggtgcaagagaatggccagcggaagtatggaggcccaccccccgggtgggacgctgctcctcctgagagaggatgcgagatttttatcgggaaactccctcgtgatctgttcgaggacgaactaatccccctgtgtgaaaagatcggtaagatctatgagatgagaatgatgatggacttcaacggaaacaataggggatatgcatttgtcacattctccaataaggtggaggccaaaaacgccattaaacagctgaacaattatgagataagaaacggtagactcctgggagtttgcgctagtgtggacaactgtcgcctgttcgtcggtgggattcccaagacaaaaaaacgcgaagaaatcctctccgagatgaagaaggtgactgaaggagtagtggatgtgatagtgtacccttcggcggcagacaagacaaagaatagagggtttgccttcgtagaatacgagtcccacagggctgccgcaatggcacgaaggaagctactccctggcaggattcagctgtggggacacgggattgcagtggattgggcagagccagaagtggaagtggatgaggacaccatgtcttcggtcaaaattctctatgtgcgaaatctcatgctttccacttccgaggagatgatcgagaaggagttcaataatattaagcccggagcagtcgagagagtgaagaaaattcgggactatgcttttgtgcacttctctaaccgagaggacgcagtggaggctatgaaggcgctgaacgggaaggtactcgatgggagccccatcgaagttacgctcgctaagccagtggataaagattcctacgtcaggtacacgagaggcaccgggggacgaggcacaatgctgcagggggagtacacctacagcctgggtcaggtgtatgatccaactaccacctatctgggcgcccccgtcttctatgccccccaaacctacgccgctattccatctctgcacttccccgctactaaagggcacctgagcaatagggccattattagagcaccgagcgttagaggcgcagctggagtccggggacttgggggacgtgggtatcttgcctacacagggttagggaggggctatcaggtgaagggcgacaagcgggaagacaaactgtatgacatcctgcctgggatggagttgacaccgatgaatccagtcaccctgaaacctcaggggataaagctggcgccacagatcctggaagaaatttgccagaagaacaactggggtcagcctgtctaccagctgcactccgctattgggcaggatcaacggcaattattcctgtacaaaattaccatccctgctctggcttctcaaaaccctgccatccaccccttcacccccccaaaacttagcgcattcgtcgacgaggccaaaacctacgcagctgaatacaccctacagaccttagggattccaacggacggaggagatggtactatggctaccgcagccgctgctgctactgcgtttcctgggtatgcagtgcccaatgctactgcacccgtctcagccgcccagctgaagcaggctgtgaccctgggccaagatctggcagcatatacaacttacgaggtgtatccaactttcgccgtgaccgcccgcggtgatggctatggtacattttag

SEQ ID NO: 24468 - DNA, 1761 bp, synthetic construct
  source 1..1761: mol_type = other DNA; note = Synthetic coding sequence
atggagagcaaccacaagagcggcgacggcctgagcggcacccagaaagaggctgctctgagagcccttgtccagcgtaccgggtatagtctggtgcaggaaaatggacagagaaagtacggcggccccccccccggctgggatgctgcacccccagaacgggggtgcgaaatcttcattgggaagctgccgcgtgatctttttgaggatgagctgatacctctgtgcgagaagataggtaagatctatgaaatgcggatgatgatggatttcaacggcaataatcgcggctacgcattcgtgaccttctctaacaaagttgaagctaagaatgctatcaagcagctgaacaactacgaaatccggaatggccggctgctgggggtgtgcgcatcagtggacaattgcaggctttttgtcggggggattcccaaaaccaaaaagcgcgaggagattctgagcgagatgaaaaaggtgaccgaaggagttgtggatgtgattgtttatccttcggctgccgacaaaaccaagaatagagggtttgcattcgtcgagtacgagtcccacagggccgcggccatggcccgccggaaattactgccaggtcggatacagctgtggggccacggtattgcagtggattgggcagagccagaggttgaagttgatgaagacacaatgtcatctgttaagattctgtatgttcggaacctgatgttgagtacaagtgaggagatgatcgagaaagagtttaacaacattaagccaggtgccgttgaaagggtgaagaagattcgcgattacgccttcgtgcatttctccaaccgggaggatgccgtcgaggcaatgaaggcactgaacgggaaggtactggacggctcacctattgaggtgaccctagccaagcctgtcgacaaggacagttacgttcgctacacccggggcactggtggccgcggaaccatgctgcagggcgagtacacatactctctagggcaggtctatgaccctactacaacgtacctgggggcacctgtattttacgcccctcagacatacgcggcaataccatcactgcactttcccgctactaagggacacctcagtaatcgggccattattcgcgctccctcagtgcggggagcggccggggtccgcgggctgggcgggcgggggtaccttgcctataccgggctggggcgtggttaccaagtaaagggcgataagagagaggacaaactatacgacattctgcctggcatggagctcacaccgatgaatcccgtcaccctgaaaccccaaggcatcaagctggccccccagatcttagaggagatctgccagaagaacaactgggggcagcccgtgtatcagttacactctgccattggtcaggatcagagacagctcttcctttataaaatcaccatcccagccctggcttctcaaaatccagctattcatcctttcacacccccaaaattgagcgcattcgtggacgaggccaaaacttatgctgccgagtacactctgcagacacttgggattccaactgatggtggcgatggcacgatggccacagcagcagccgcagctaccgcgttccccggctacgctgtcccaaacgccacagcccctgtttcagccgcccagctgaagcaagccgtgactctgggccaggacttagctgcctacactacatatgaagtgtatcctacctttgcagtcactgctcgcggcgatgggtacggaacattctag

SEQ ID NO: 24469 - DNA, 1542 bp, synthetic construct
  source 1..1542: mol_type = other DNA; note = Synthetic coding sequence
atgcagcggaccttcgcctggctgctggaccgggtgcagcacctgggggcccccgtgacactgagagcgagctacctcgaaatttacaatgagcaggttagggatttactgtccttgggcagcccacgcccattgcctgttcggtggaacaaaaccaggggattttatgtagaacagctcagggtcgttgagtttggctcccttgaggcattgatggagctgcttcaaaccggcctctcccgccgccggaattccgctcacacccttaaccaggcgtctagccggtctcacgcccttttgaccctgtatatttccagacagacagctcagcagatgccatctgttgacccgggtgaaccgccagtcgggggcaaactctgctttgtggacctcgctggatctgagaaggtcgcggccaccggaagtaggggggaactgatgttggaggctaacagcatcaaccgctcccttctggcacttgggcattgcatatcactgcttctcgacccgcagcgcaagcagagccacattccttttcgggacagcaagttaaccaagcttcttgcggattccctcggaggcagaggtgtgactcttatggttgcctgtgtgtctccttctgctcaatgcttgcccgagaccctgagtacccttcggtatgcaagcagagcacaacgcgtgaccacaaggccccaagcccccaagtcacccgtcgccaagcagcctcagaggttagagacagagatgctccagttgcaggaagaaaataggcggcttcaattccagctggaccagatggactgcaaagcatctgggcttagcggcgctagagtcgcatgggcccagaggaacctctatgggatgctgcaggaatttatgttggaaaacgagaggctgcggaaagaaaagtcccagctgcagaattccagagacctggcacaaaacgaacagaggatcctggcgcagcaggtgcatgcactggagaggcgtctgttaagcgcttgctaccaccaccaacaggggccgggactgactcccccatgcccctgcttaatggctccggctcctccctgtcacgcccttccacctctgtactcatgcccctgttgccacatctgcccactctgtcgagtgcccctcgcccactgggcatgcctgccaggcgaacaccacctccctcaggtcttagatcccgaagcttctggcgggaggcctcctagtgccagacctcccccttgggcccctccatgcagccccggaagcgcaaagtgcccccgcgaacgaagccattcagactggacccaaactcgcgttctagctgagatgcttacggaggaggaggtcgtcccttcagcaccccctctgccagtccgcccaccaaagacctctccaggtctgcgcgggggggcaggtgtccctaatttagcccaaagactggaggcactgcgcgaccagattggatcaagcctgagacgtgggcgtagtcaaccaccctgcagtgaaggcgccaggagcccagggcaggtactgccaccacattag

SEQ ID NO: 24470 - DNA, 786 bp, synthetic construct
  source 1..786: mol_type = other DNA; note = Synthetic coding sequence
atggtgaagggcgagaagggccccaagggcaagaagatcaccctgaaagtggcccgaaattgtatcaaaatcaccttcgatggaaaaaagcgattggacctttctaaaatgggaatcaccacattccctaaatgcatactgaggctatccgacatggacgagttggatctgagtcgcaacttaatccggaagattccggatagcatcagtaagtttcagaacctccggtggctggacctgcatagtaattatatcgacaagctccccgagtccattggacagatgacgtctcttctgtaccttaatgtctccaataatcgccttacctctaacggactaccagttgagttgaaacagctcaagaacatcagagcggtgaacctcggactcaaccatctggacagtgtgcctaccaccctaggggccttgaaagagctgcacgaagtgggactgcacgacaatttgctgaataacattcctgtaagtattagcaaactccctaaactgaaaaagttgaatataaaaagaaacccattcccaaagcccggcgagtctgagatctttatcgacagcattcggaggctggaaaatctgtatgtggtggaagagaaggacttatgtgctgcctgcttgaggaagtgccagaacgcacgggacaatctgaaccgaataaaaaacatggctaccaccacaccacgtaaaactatattcccaaatctcatttcaccaaactcgatggcaaaagattcttgggaagactggagaataagactgacctcttcctag

SEQ ID NO: 24471 - DNA, 1770 bp, synthetic construct
  source 1..1770: mol_type = other DNA; note = Synthetic coding sequence
atggccagcagccagcgggacatggaggactgggtgcaggccatcagaagggtgatttgggctccactaggagggggcaccgcccgtcgcagccatgcccatcccctggaacctctgccccctggtatcttcggacagaggctggaggaaactgtccatcacgaaaggaagtacggaccacggctcgcacctttacttgttgaacaatgcgtggactttattagggaaagagggcttaccgaggagggcctgtttcgcatgccgggacaggctaatctggtgcgggacctgcaggacagttttgactgcggcgagaagccactctttgacagcaccaccgacgtgcatacagtggcatcattgctgaaactgtatctgagagagctaccagagccggtcgtccctttcgcacggtacgaagatttcttaagctgtgcacagttgttgacaaaggacgagggagagggcaccctcgagcttgcgaaacaggtctctaacctgccacaggccaattataatcttctgagatacatatgcaagtttctggatgaagtgcaggcctattcgaatgtgaacaaaatgagcgtgcagaacctggctactgtgtttggtcccaacattcttcgccctcaagtcgaagatccggtcaccatcatggaggggacgtctctcgttcaacacctcatgacagtacttattcggaaacattcccagcttttcactgcccctgtgccagaaggacctacgagcccacggggaggactccagtgtgccgtcggctggggttccgaagaagtaactagggattctcaaggtgagcctggagggccaggattaccagctcatcgtacctctagtctcgatggcgcggcagtggcagtgctgtctcgcacagctccgacggggcctggatcccgttgcagccccggaaaaaaggttcagaccttgcctagctggaagtccagttttaggcaacctaggagtctgagtggttcaccaaagggtggaggctcaagtctggaggttccgattatcagctctgggggaaattggctcatgaacggcctgagctcacttcggggacaccgccgggcgtcaagtggtgaccggctgaaggattccggaagcgtccagcggctcagcacttatgacaacgtccctgctcctggattagtgccaggcatcccttccgtggcatccatggcgtggagcggcgcctcaagttcagagagctccgtgggaggtagcttaagcagctgcacagcttgccgcgcatctgacagttccgcaaggtctagcctccacacagactgggctcttgagccctctccactaccatcttccagcgaggaccccaaatccctggatttggaccattctatggacgaggcaggggccggggcctcgaacagtgagccttctgagccggattcacccactcgtgagcatgcccggagatcagaggcactgcaggggctggtgaccgagcttagagctgaactttgcagacaaaggactgaatatgagcgtagcgttaaaagaatagaagagggttccgcggacttgcgcaaaagaatgtctagactagaagaggagttggatcaagaaaaaaagaagtacatcatgctggagatcaagcttcgcaattccgagcgcgcccgagaagatgccgagaggaggaatcagctgttgcagcgtgagatggaagaattttttagtacactcggtagcctcacagtaggagcaaagggagccagggcccctaaatag

SEQ ID NO: 24472 - DNA, 1209 bp, synthetic construct
  source 1..1209: mol_type = other DNA; note = Synthetic coding sequence
atgagcgccgagggcgccgagcccggccccggcagcggcagcggccctggacctggacccctttgccccgagcacggtcaagccctctcctggttctgcggcagtgagcggcgccccgtctgtgccgcctgcgccggcctgggaggccggtgccggggacaccggatcaggagggccgaggaacgcgctgaggaactgagaaataagatcgtcgaccaatgtgagaggctgcagctgcagtccgctgcaataacgaagtacgtagcagacgttctccccgggaagaaccagcgcgccgtttccatggccagcgccgcccgggaactggtgatacaaagactctctctcgtacgctcactgtgtgaaagtgaggaacagcggctgctggagcaggtacacggcgaagaagaacgagcgcaccagagtattctgacccagcgtgtgcattgggccgaggccctccagaaacttgacactattcggaccggacttgtaggaatgctgacccatctggacgacctgcagcttattcagaaggaacaggagatcttcgaaaggaccgaggaagccgagggcatactggacccgcaggagagcgagatgctgaatttcaatgagaaatgtacgcgcagccctctcctgactcagctatgggcgactgccgtgctaggttccctgagtggtactgaggacatccgaattgacgaacggacagtttccccattccttcagctgtcggatgatcggaagacactgactttctccaccaaaaaaagcaaagcatgcgctgacgggcctgagagatttgatcactggcctaacgcacttgccgccacttctttccagaatggcctccacgcttggatggtgaacgtccaaaactcttgcgcttataaggtgggcgtagcctctgggcatctgcctcggaaaggcagcggatctgattgccggttaggtcacaacgctttttcttgggttttcagtaggtacgaccaggagttccggttcagccacaatggccagcatgagcctcttgggctgcttcggggacccgctcagttgggagtggtcctggatctgcaggttcaggagcttctgttttacgagccggctagcggtaccgtgctgtgcgcacatcacgtaagctttcctggaccattgttccccgtctttgccgtagcagaccaaacaatttcgattgtgcggtag

SEQ ID NO: 24473 - DNA, 258 bp, synthetic construct
  source 1..258: mol_type = other DNA; note = Synthetic coding sequence
atgctgcggcggaagcccacccggctggagctgaagctggacgacatcgaagaattcgaaaatatccggaaagacctcgagacaagaaagaagcagaaggaagatgtagaagtggtaggagggtcagacggagagggagccataggtttatcgtctgatccaaagagtagagagcagatgatcaacgatcggatcgggtacaaacctcagcccaagcctaataatcgttccagccaatttggtagtctcgagttctag

SEQ ID NO: 24474 - DNA, 744 bp, synthetic construct
  source 1..744: mol_type = other DNA; note = Synthetic coding sequence
atgctgagcgacggctgcggcagcgaggagaagatcagcgtgccctcttgttacggcggcattggcgctccggtgtctcggcaagttcctgcctcccatgactcagagctgatggctttcatgacacgtaaactgtgggatctagagcagcaggttaaggcccagacggacgagatcctctctaaagaccaaaagattgccgccttggaggacctggtacagactctcagaccccaccccgcagaagccacattacagaggcaggaggagttggaaaccatgtgcgtgcaactacagcggcaggtgagggagatggagagattcctgtcagattacggactgcagtgggtgggagaaccaatggaccaggaggattctgaatctaagaccgtgagtgagcacggcgaaagagattggatgacggcaaagaaattttggaagccaggggattctcttgctccaccggaggtggacttcgacagattacttgcaagcctacaggacctgtcagagctggtggtcgaaggcgacactcaggtcacccctgtgccaggtggggcgaggctgagaacactggaacccatcccgttgaagctgtataggaacggaattatgatgtttgatggtcctttccaacctttttatgacccatctacccagcgctgcctgagagacattttggacggcttcttcccatccgaactccagcgcctatatcctaatggggtcccttttaaagtgtag

SEQ ID NO: 24475 - DNA, 1464 bp, synthetic construct
  source 1..1464: mol_type = other DNA; note = Synthetic coding sequence
atgagcagccccctggccagcctgagcaagacccggaaggtgcccctcccgtctgaaccgatgaatccaggcagaaggggtatccgtatctacggggatgttcccgctagccatgacagcgaactcatggcttttatgaccagaaagctgtgggacttggaacagcaagtaaaagcacagaccgacgagattcttagtaaggaccaaaaaatcgccgcactagaagacttagttcaaaccttgcgcccacacccagccgaagccactctgcaaaggcaggaggagctcgagacaatgtgcgtgcagcttcagagacaagtgcgtgaaatggagagatttttgtcggattacggactccaatgggtgggagagcccatggaccaggaggattcagagtccaagactgtgagtgaacacggagagcgcgactggatgactgcgaaaaagttttggaaaccaggcgattctttagcccctccggaagtcgatttcgatcgactcctagccagcctccaggatctgagcgagctcgtagtggagggcgatacccaggtcaccccagtgcccgggggtgctcgtttgaggacgcttgagccgatccccttgaagctgtatagaaacgggattatgatgtttgatggaccattccagcctttctatgaccccagtacccagcggtgtctcagagatattctggacggcttcttccctagcgagcttcagcgtctctaccctaacggagtgcccttcaaggtttccgacttaaggaatcaagtctacctcgaagatggccttgacccattcccaggcgagggcagagttgttgggcgacagctgatgcacaaagccctggaccgcgtcgaggagcatcccggaagccgaatgacggccgagaagttcctgaatcgcctccctaagttcgtaattcggcaaggcgaggttatagacattagaggtcccattcgcgataccctgcagaactgctgccctcttcctgcccggatccaagagatcgttgtggaaacccccaccctcgccgctgagcgagaacggtctcaagaatcccccaatacacccgcacccccactctctatgctgagaatcaaatcagagaatggcgagcaggccttcctcctgatgatgcagcctgacaacactattggcgacgtaagggccctgcttgctcaagccagggtaatggatgcatccgcttttgagattttttcaactttcccccccaccctgtatcaggacgatacactcaccttacaggctgccgggctcgtgcctaaagcagcactgttacttcgcgcgcgccgggctcccaaaagctctctcaagttctcaccaggaccatgtcctgggccagggcccggcccctctccaggtccaggaccaggaccctcccccggccctggacccggacccagcccttgcccgggccccagcccatcaccccaatag

SEQ ID NO: 24476 - DNA, 1020 bp, synthetic construct
  source 1..1020: mol_type = other DNA; note = Synthetic coding sequence
atgtggaccgcccggggccccttccggcgggaccggtggagcagcgaggatgaggaggctgcggggcccagccaggctctctctccactactgtccgacacacggaaaatcgtttcagagggcgaactggaccagctggcacagattcggcctctgatcttcaattttcacgagcagacggctatcaaggattgcctgaagattcttgaagagaagacagccgcgtacgacatcatgcaggagtttatggcgttagaactgaagaacctgcccggcgaatttaatagcgggaatcagccttcaaatcgggagaagaacaggtatagagatatcctgccgtatgattcaacacgggtgccactagggaaaagtaaggactacattaacgccagttacatacggatagttaattgtggagaggagtatttctatatcgctacccagggaccactcctgagcacaatagatgacttctggcagatggtgctagaaaataacagcaatgtgatagccatgatcacaagagaaatcgagggagggattattaagtgttatcactattggcccatcagcctcaagaagcccctggaactgaaacatttccgggtcttcctcgagaattatcaaatactgcagtactttattatccgaatgttccaggtggtagaaaagagcaccggaacaagccactcagtcaaacagctgcagtttaccaaatggccggaccatggaaccccagccagcgctgattcctttataaaatatataaggtatgcccgaaagtcccaccttactggtcctatggtagttcattgttccgccggtatcgggcggaccggggtgttcctgtgtgtagacgtggtcttctgtgctatagtgaaaaactgcagttttaacatcatggatattgtggcccagatgcgcgaacagcgctctggcatggtacagacaaaagaacagtatcacttctgctatgatattgtgctggaagtactcaggaaactgctgacgctggattag

SEQ ID NO: 24477 - DNA, 1563 bp, synthetic construct
  source 1..1563: mol_type = other DNA; note = Synthetic coding sequence
atgagcagccccctggccagcctgagcaagacccggaaggtgcccctgccgagcgagcctatgaaccccggccgccgcggcatccgcatttacggcgacgaggatgaggtggacatgctgagtgacgggtgtggaagtgaagaaaagatttccgtcccaagctgttacggcgggataggtgcgcctgtgtcacgtcaggtgcctgcatctcatgatagcgagctcatggcctttatgacccggaaattgtgggacttggaacagcaggtgaaagcccagactgacgagatactgtcaaaagaccaaaaaattgccgccctggaggacctggtgcagactttgaggccccatcccgcagaggctaccctccagcgtcaggaggaactggaaactatgtgcgtacaactgcaacgacaagtgcgcgagatggagagatttctctcggattatggtctccagtgggtcggcgagcccatggaccaggaggattcagaatccaagaccgtttccgaacacggggaaagagactggatgaccgccaagaagttctggaagccaggtgactccctggctcctcccgaggtggactttgatcggctcctggcatcactgcaagacttgagcgagctcgtcgttgagggggacacgcaggtcacgcccgtgcctggcggcgcgcgccttcgcacattagaacctatcccgctcaagctgtacaggaatggaattatgatgttcgacggtccttttcaaccattctatgacccttccacccagcggtgcctgcgagacatcctagacgggtttttcccctcagaactgcagaggctgtatcctaatggtgttccctttaaggtctctgacctgcgtaatcaagtttacctggaagacggccttgatccgtttccaggtgagggtcgagtagtgggcaggcagctaatgcacaaggcattggacagggtggaagagcatccaggaagcaggatgacagccgagaagtttctgaatcgcctgccaaaattcgtcattcgccagggcgaagtgattgatatcagggggccaatccgggatacccttcaaaactgttgtccgctgcccgcccggatccaggagatcgtagtcgaaacccccaccctcgctgcggagagagagcggagccaggaaagccccaacactcccgcaccgcccttgagcatgctgcgaatcaagtccgagaacggtgaacaagccttcctgctaatgatgcagcccgacaataccattggcgatgtaagagccctgctggcacaggcaagggtgatggacgcaagtgccttcgaaattttctctaccttccccccaacgctctaccaagacgacaccctgacactgcaagctgcaggcctagtgccaaaagccgcactcctgcttagagccaggagggcacccaagagttcactcaaattctcccctggtccgtgtcctggacccggaccgggcccaagccccgggcccggtcctggcccaagtccagggcccggcccagggccctcaccttgcccgggcccatcccctagtccccaatag

SEQ ID NO: 24478 - DNA, 1563 bp, synthetic construct
  source 1..1563: mol_type = other DNA; note = Synthetic coding sequence
atgagcagccccctggccagcctgagcaagacccggaaggtgcccctcccttccgagcccatgaatccagggcgtcgagggatcagaatatacggggacgaagacgaagtggatatgctcagtgacgggtgtggatctgaggaaaaaatctcagtgcccagctgttatggaggaatcggcgcacctgtttcgcggcaggtgcctgcctctcacgattcagaacttatggctttcatgaccagaaaactatgggaccttgagcagcaggtcaaagcccagaccgatgaaatcctcagcaaggaccagaagattgcagcgttggaggacctggtgcagaccctgcgtcctcacccagctgaggccaccctccagcgtcaggaggagctcgagactatgtgcgtgcagctgcagcgacaggtgagggaaatggaacgtttcttgtcagattatgggctgcaatgggtgggcgagcccatggatcaggaggattccgaatccaagaccgtcagcgaacacggcgagcgggattggatgaccgctaaaaaattttggaagcccggagatagtctggctccgccggaagttgatttcgacagattattagcttcgttgcaggacttgagtgaactagttgtcgagggtgacacgcaggtgacaccagttcctgggggggcccggctccgcaccctggagcctatacctctcaagctctatcgaaacggaatcatgatgttcgatggccccttccagccattttatgaccctagcactcagcgctgcctccgcgacatcctagacggattctttccgtccgagctccagcggctctatccaaatggagtccccttcaaggtatcggatttaaggaaccaagtctatctggaggatggcctggatccttttcctggtgaggggagggtcgtcggccgtcagttgatgcataaagctcttgatagagtagaagaacaccctggctcgagaatgaccgcagaaaaattccttaatcggctccctaagtttgtgatccgccaaggggaagtcatcgatattcggggtccgattagggatactctgcagaattgctgccctttacctgcccggatccaggaaatcgtggttgaaacccctactctcgcagccgaacgcgagcgatcccaggagagccctaacacaccagctccacctctgtcaatgctgcgaatcaagagtgagaatggcgagcaagcttttctcttgatgatgcaacctgacaataccatcggagatgttagggctctgctggcccaggcccgagtcatggatgcaagcgctttcgaaatattttcgacgtttcctccaaccctgtaccaggatgatacattgaccttgcaggccgccgggcttgtgccaaaagccgctctactgctacgggccagaagagcgcctaagagtagcctgaaattctcaccaggtccatgtccaggccctggaccgggtccatcccctggaccgggtccaggaccttctcctggtcccggaccaggcccctccccctgccctggcccaagcccgtctcctcagtag

SEQ ID NO: 24479 - DNA, 834 bp, synthetic construct
  source 1..834: mol_type = other DNA; note = Synthetic coding sequence
atgttcgacggccccttccagcccttctacgaccccagcacccagcgatgtctgagagacattttagacgggttctttccctcagagttacaaagattatatccaaacggcgtgcccttcaaggtgtctgatctgcgcaaccaagtataccttgaggatggcctggaccccttccccggagagggcagagtcgtgggtcggcagttaatgcacaaggccctcgatagagtagaagaacatccagggtctagaatgacagccgagaaattcctgaatcgcttgccgaagttcgtgatccggcaaggggaggtgattgatattcggggaccaatcagggatactctacagaactgctgtccgctgcctgcacggatccaggaaatcgtggtcgagacccccactctggcagctgagcgagagaggtctcaagagagccctaacacccccgctcctccactgtctatgcttaggatcaaaagcgagaatggcgagcaggcgttcctgctgatgatgcaacctgataacacgattggcgatgtgcgcgcgctattagcccaggctcgtgtaatggacgctagtgccttcgagattttctctactttccctccaactctgtatcaggatgacaccctgactctgcaagccgcgggcttggtcccaaaagcagctcttctactgcgtgccagacgcgcacccaagagtagcttgaagttctcaccgggaccatgcccgggccctgggccagggcccagccctggcccaggtcccggcccttcgccaggccccggccccggcccatccccttgccccggaccctctccatctcctcaatag

SEQ ID NO: 24480 - DNA, 1314 bp, synthetic construct
  source 1..1314: mol_type = other DNA; note = Synthetic coding sequence
atggccggcggcccccccaaggccctgcccagcaccggcccccactcgctaagagatatgcctcacccactcgctggcagctcgagcgaggaggctgtagggggcgatagcactccttcccccgacctgctgatggctcggtcgttcggagataaagatctcatcttgcccaatggcgggactccagccggcacttcttccccagcttcgtcaagctctctactgaataggctgcaactggatgacgatatcgatggcgagacccgggatttatttgtgattgtggacgatcctaaaaagcacgtctgcactatggaaacatacatcacataccgtataaccacaaaatctactcgcgtggaatttgatctgcctgagtatagtgttcgtcgccgctatcaggactttgattggctgcggtcaaaactggaggagtcacagcctactcatcttataccgccacttcctgaaaagtttgtcgtgaagggagtcgtagatcgatttagcgaagaatttgtggagaccaggcgcaaggctctcgacaagttcctcaagcgcataacagaccaccccgtgctcagctttaacgagcattttaacatttttcttaccgcgaaggatctaaacgcgtacaagaagcagggcatcgctctcttgacgagaatgggcgaatccgtaaaacacgtgactggcggttataaactcaggacaaggcctttggagttcgcggccatcggagattatctcgacactttcgccctgaagctcggcactatcgaccgaatagcacagcgcatcatcaaagaagaaatcgagtatcttgtggaacttcgcgagtatggtcccgtctactccacgtggagcgccttggaaggtgagctggctgagcccctggagggtgtgtcagcctgcatcgggaactgtagcacggcactggaggagctgacagacgacatgaccgaagactttcttccggtgctgagagaatatatactttattcggattccatgaagtcagtactcaaaaagcgcgatcaggttcaggcggagtatgaggcaaaactagaagcggtcgccctccggaaagaagatagacctaaggtcccggccgacgtggagaagtgtcaggaccgcatggaatgcttcaatgccgacctgaaagccgatatggagaggtggcagaacaacaaaagacaggacttccgccaacttcttatgggaatggcggataaaaatatccagtactatgaaaaatgcctgatggcctgggagtctattatccccctgctacaggagaaacaggaggccaaatag

SEQ ID NO: 24481 - DNA, 1263 bp, synthetic construct
  source 1..1263: mol_type = other DNA; note = Synthetic coding sequence
atgagcagcccccgggacttccgggccgagcccgtgaacgactacgagggcaacgacagtgaagctgaggacctcaactttcgggagaccctgcccagcagctctcaggaaaacaccccaaggtcaaaggtgtttgaaaacaaagtgaatagcgagaaagtcaagctgagcttgcgcaatttccctcacaacgactacgaagacgtctttgaagaaccgtccgaatctgggtccgatccatcaatgtggacagctcgtggtccttttaggcgggatcggtggagctccgaagacgaggaagcagcaggcccttctcaggcactgagcccactgctttctgatacccgcaaaattgtctcagagggagaactagatcagctggcccagattaggccgctgatcttcaattttcacgaacagacagcaattaaagattgccttaagattttagaggagaaaaccgccgcatatgatattatgcaggagtttatggctctagagctcaagaacctgccaggtgaatttaattccggcaaccagcctagtaatcgggagaaaaacaggtacagagatatcctgccctacgacagtacacgcgttccactggggaaaagcaaagactacataaacgcaagctacattcggatcgtgaactgtggagaggagtacttttatattgctacccaaggaccactgctttccacaatcgacgatttttggcagatggttctggaaaataacagcaatgtgattgctatgatcacacgcgagatcgaaggcggaattattaaatgttatcactactggcccattagcctgaaaaaaccactggagttgaagcattttagggtcttcctagaaaattaccaaattctgcaatactttatcatacgcatgtttcaagtcgtggaaaaatctactgggacttctcacagcgtaaagcagctgcaatttacgaaatggcctgatcatggaacccctgcctctgccgatagcttcatcaagtacattaggtacgcaagaaagtctcacctgactgggccgatggtagtacattgcagtgccgggatcgggagaaccggagtgtttctctgcgttgatgtggtgttctgcgccattgtgaaaaactgtagcttcaatatcatggatattgtggcccagatgagggagcagcgctccggcatggtccagacaaaggaacagtatcacttctgttacgatattgtgctggaggtcctcaggaaactgctgacacttgactag

SEQ ID NO: 24482 - DNA, 837 bp, synthetic construct
  source 1..837: mol_type = other DNA; note = Synthetic coding sequence
atgagcagcccccgggacttccgggccgagcccgtgaacgactacgagggaaacgattcagaggccgaagatctaaacttcagagaaaccctgccctcctcctcccaagagaacacacctagatctaaggtctttgagaataaagtcaatagtgaaaaggttaagctttctctgcgaaactttccacacaatgactacgaggacgtgtttgaggagccctctgagagcggctctgaccctagcatgtggacagccaggggcccattccgccgggatagatggagcagtgaggacgaggaggcggctggcccctcccaggcgttatcccccttgcttagtgatacacgcaaaattgtgtccgaaggggaactggaccagttggcgcagattcgacctctgatctttaatttccatgaacaaactgcaattaaagattgcctgaaaattctggaagaaaaaaccgcagcgtacgatatcatgcaagagttcatgacaggaacttctcatagcgttaaacagttgcaattcacaaaatggcccgatcatggtaccccagcatccgcagattccttcatcaagtacataaggtacgctagaaagtcccaccttacaggacctatggtggtccattgtagcgcaggcatcgggagaactggagtgtttctttgtgttgatgttgttttttgcgccatcgtgaagaattgttctttcaacattatggacatcgtcgcccagatgcgagaacaacgatcaggcatggtccaaaccaaagagcagtaccacttctgctatgatattgtgttggaagtcctcagaaaactgctgaccttggactag

SEQ ID NO: 24483 - DNA, 681 bp, synthetic construct
  source 1..681: mol_type = other DNA; note = Synthetic coding sequence
atgagcagcccccgggacttccgggccgagcccgtgaacgactacgagggtaacgactctgaggcagaagacttaaacttccgtgagacacttccgtcctcttcacaggagaataccccgcggagcaaggtctttgaaaataaggtaaattcagaaaaagtgaagcttagcctgcgcaacttcccccataacgactacgaggatgtgtttgaagaaccatctgagagcggcagcgatcccagcatgtggactgctcgggggcctttccgtagagatcgatggtccagcgaggatgaagaggccgccggcccctcccaggcgttatcacctttgctgagtgatacaaggaaaattgtttcagaaggcgagctggaccaattggcccaaataaggccgctgattttcaactttcatgaacagaccgccatcaaggactgcctcaagattttagaggagaagacggcggcttacgacattatgcaggaatttatggctctagagctcaagaatctgccaggggagtttaatagcggaaaccagccttcaaatcgcgaaaagaatagatatcgcgacatcctcccatttcaacaccatggctactcaggccccaacgagcggacgaccttctggcacggttcaaatgagggtgccgtgagtctgctgctgaggtactgcgcttag

SEQ ID NO: 24484 - DNA, 681 bp, synthetic construct
  source 1..681: mol_type = other DNA; note = Synthetic coding sequence
atgcaccagacctgcgtgcggctggagcgggaggccagcgcccggcccagtcctggaccagtcctccccccacgacccctgccaagccacacggaacttcaaattagggagggacccaaacgcacaatccgggccgcagccgagggtgccccttgcgtgggacgcgtgaggtgcgcgcctggcaatagggggggaagagagggggcgagcggcgtcaggggaggcgtcgcccaggttcctccccgcctgccggccccccccattggacccgagcgtgacgatctggctgggggcgctggtcgtaagcctctaccgagtaccgccgcggcaagcagcccggggtccgccgccgccgcaacagcagccttatgcccgccggccagactatctacgccttccatgagtggcctgcgggtttactccacatccgtgacagggagccgtgaaatcaagagccaacagtctgaagtgacgcggattctggatggtaagagaattcagtatcagcttgtggatataagccaggacaacgctcttcgcgacgagatgcgggcgttggccggcaacccaaaggctaccccaccccagattgtcaatggggatcagtactgcggcgattatgaattgttcgttgaggctgtcgaacaaaacactctgcaggaattccttaagctcgcctag

SEQ ID NO: 24485 - DNA, 1518 bp, synthetic construct
  source 1..1518: mol_type = other DNA; note = Synthetic coding sequence
atggaccccggcaacgagaacagcgccaccgaggccgccgccatcatcgacctggacccagattttgagcctcagtcaaggccacgaagctgcacttggcccctgccacgtccggagattgccaatcaaccatctgagcccccagaggtggagcccgatctcggtgagaaagtacataccgaaggccgcagcgagcctatcctcctcccctctagacttccagaacccgcaggcggaccacagcctggcattctgggtgctgtgacggggccacggaagggtgggtcaaggagaaacgcatggggaaatcagtcttacgctgagctgatatcacaggcaattgagagcgcccctgaaaaaagactgaccctcgcgcagatttacgaatggatggtgaggaccgtgccttatttcaaggacaagggcgacagtaactcatcagcgggatggaagaacagcatccggcacaacctgagtttgcattccaagttcattaaagtgcacaatgaggcaactggcaaatctagctggtggatgctgaatcccgagggcgggaaatctggaaaagctccacggaggcgtgcagcgtccatggattcaagcagcaagctgctgagaggccgctctaaggctcccaaaaagaaaccgtccgtcttacctgctcctccagaaggtgcaaccccaaccagccccgtcggtcatttcgccaagtggtctgggtctccctgctcccgcaacagagaggaggctgacatgtggaccaccttccgtcctcgctcttcgtcgaacgcctcatctgtcagtacaaggctgtcccctctgagacccgagagcgaggtactcgcagaagagatacccgcctcagtaagctcctatgcgggaggcgtgccaccaaccctgaatgagggcctcgagcttttagacgggctgaacttgaccagcagccacagcctactgtcccgatcggggctgagcggctttagtctccagcaccctggagtgactggccccctgcacacatattctagttccttgttcagccctgcagagggccccctctccgcaggggagggttgtttttccagcagtcaggcactggaggccctgctcacttcagatacccctccgcccccggcagatgtccttatgacccaggtggaccccatcctgtcccaggcgcccaccctgctcctgctcgggggcctcccctcctcatctaagctggcgaccggggtaggcctgtgccctaagccactggaggcccccgggccatcttcgctggtgcccacgctgtctatgattgcaccccctcccgtgatggcatccgctcctatccctaaagccttgggaaccccggtactgactccacccacagaagctgccagccaagataggatgcctcaggacctggatctcgatatgtatatggagaacctcgagtgtgatatggacaacatcatttctgatcttatggatgagggagaaggcctggactttaacttcgaacctgatccctag

SEQ ID NO: 24486 - DNA, 1062 bp, synthetic construct
  source 1..1062: mol_type = other DNA; note = Synthetic coding sequence
atggactacaagagcagcctgatccaggacggcaaccccatggagaacctggagaaacaactcatatgcccaatatgtctcgagatgtttactaaacccgtggtcatattaccttgtcagcacaacctgtgtaggaaatgcgccaacgacatcttccaggccgcaaacccctactggactagtcgcggaagctccgtctccatgagtgggggacgctttcgctgtcccacctgccggcacgaggtgataatggacaggcatggcgtctacgggttgcaacgcaatctgctcgtggagaacatcatcgatatctacaaacaggagtgctcatccaggcctttacagaagggttcccatcctatgtgtaaagagcacgaggatgaaaaaatcaacatctattgtcttacctgtgaggtgcctacgtgcagcatgtgcaaagtgtttggtattcacaaagcttgtgaagtggcgcccctgcagagtgtttttcaaggacaaaagactgagctgaataattgcatctctatgctggtggcaggaaacgatcgagtccaaacaataatcacccagctggaggacagcagaagggttaccaaggaaaactcccaccaggttaaggaggaactctcacagaagtttgataccctgtatgccattctggacgagaagaaatcagaactactgcagcgcatcacccaggaacaggagaagaaactgtctttcatcgaggccttgatccagcaataccaagaacagctggataagtccaccaagctcgtggagaccgccatccagagcctcgacgagcctggaggggccacattcctgcttacagcaaaacagctgatcaagtcgatcgtcgaggcctccaaaggttgtcagctgggaaagactgaacagggatttgagaatatggacttcttcacgctggatctggaacatatcgccgatgcattaagagcaatcgacttcggaacagatgaagaagaagaggagttcatcgaggaggaggaccaggaggaggaggagagcactgagggcaaagaggaaggacatcagtag

SEQ ID NO: 24487 - DNA, 1179 bp, synthetic construct
  source 1..1179: mol_type = other DNA; note = Synthetic coding sequence
atgggcgtgaaccagagcgtgggcttcccccccgtgaccggcccccatctcgttggctgtggcgacgtgatggagggccaaaacctgcagggatcattttttcgccttttctacccctgccagaaagcagaggaaacaatggagcagccactgtggattccccgctatgaatactgcacaggcttagcagagtacctgcaattcaataaaaggtgcggcggattacttttcaacctcgccgtcggatcctgtcggttacccgtgagttggaacgggcccttcaaaacgaaggattccggctatcccttaatcattttcagtcacggtttgggggcattcaggactttgtactcagccttttgcatggaactcgcttccaggggctttgtggtggccgtgccagagcatcgggaccgcagtgccgccaccacttatttttgcaagcaagctcccgaagagaatcaacccacaaatgaaagtctgcaagaggagtggatcccgttccgccgagtcgaggaaggtgagaaggagtttcatgtgcgtaacccccaggttcatcagagagtgtctgaatgcctcagagtgcttaagatccttcaagaggtgacagcgggtcaaactgtgttcaacatcctgcccggaggtcttgacctgatgaccttgaaagggaatatcgacatgtccagagtggccgtgatgggacatagctttggaggagccacagctatactagcccttgccaaggaaacccaattccgctgtgccgtggccctggatgcatggatgtttcctttggaacgagatttttaccctaaggccaggggccccgtgtttttcattaatacagaaaaattccagacaatggagtccgtgaacttaatgaaaaagatttgtgcacaacacgagcagtcccggattattaccgttctcgggagcgttcaccgctcccagaccgacttcgccttcgtcactgggaatctgattggcaagtttttttccactgaaactagagggagtctcgatccatacgagggacaggaggttatggttagagcaatgctggcgtttctgcagaagcatctggatctcaaggaggactacaatcagtggaataacttaatcgaggggattgggcccagcttgactcccggtgctccccaccacctgagctcactgtag

SEQ ID NO: 24488 - DNA, 1179 bp, synthetic construct
  source 1..1179: mol_type = other DNA; note = Synthetic coding sequence
atgggcgtgaaccagagcgtgggcttcccccccgtgaccggcccccatctcgtaggctgcggcgatgtgatggaaggccagaatcttcaaggaagttttttccgtctgttctatccctgccaaaaagccgaagagaccatggaacagcctctttggatccctcgatatgagtattgcactggcctcgctgaataccttcagtttaataagcgatgtggcggactcctgtttaacctggccgtggggtcttgtcgcttaccagtgagctggaatggaccattcaagacgaaagacagcggataccccctcatcattttcagccacggtctgggagcatttcgcactctttactccgcgttttgcatggaacttgccagtaggggttttgtggtggcagttccggagcacagagatcggtctgcagccacgacttatttttgcaagcaggcaccagaagagaaccagcctacgaatgaatcactccaggaagaatggattccattcagacgcgtggaggaaggcgagaaggagttccatgtgcgaaatccgcaggtgcatcagcgggtgtccgagtgcctcagagtgcttaagattctgcaggaagtgacagccggacagaccgtgtttaatatcctccccgggggcctcgatctgatgacgttgaaaggaaacatagacatgagtcgcgtggctgtgatggggcattcctttggtggtgccaccgcgattctcgctcttgcgaaggaaacccagtttcgttgtgccgtcgcgctggacgcctggatgttccctctggagcgagatttctacccaaaggcccggggacctgtgttttttattaacacagagaaattccaaaccatggaaagcgtaaacctgatgaaaaagatctgtgcgcagcacgagcaaagccgtataataacagttctcggatcggtgcatcgatcacaaacagacttcgctttcgtcaccgggaacttaatcggcaaatttttttccacagagacccgtgggtccctcgacccttatgaggggcaagaggtgatggttagagctatgctggcattcctgcagaaacatctcgatctaaaggaggattataatcaatggaataacctgatcgaggggatcggcccttccctgacaccaggggctccacaccacctctcctcactatag

SEQ ID NO: 24489 - DNA, 213 bp, synthetic construct
  source 1..213: mol_type = other DNA; note = Synthetic coding sequence
atggtgcggaccaagacctggaccctgaagaagcacttcgtgggctaccctaccaattccgatttcgagcttaagacggccgaactgccccctctaaaaaacggagaagtcctgttagaggcactcttcctgactgtagacccttacatgcgggtcgctgccaagaggttgaaagagggtgacacgatgatgggtcagcaggtggcaaaatag

SEQ ID NO: 24490 - DNA, 213 bp, synthetic construct
  source 1..213: mol_type = other DNA; note = Synthetic coding sequence
atggtgcggaccaagacctggaccctgaagaagcacttcgtgggctatcctacaaattccgacttcgagctgaaaacagctgaactgccccctttaaagaacggtgaggtgttactggaagcactgtttcttaccgttgatccatacatgagggtggctgccaaaagactcaaggaaggcgacacaatgatggggcagcaggtcgccaagtag

SEQ ID NO: 24491 - DNA, 534 bp, synthetic construct
  source 1..534: mol_type = other DNA; note = Synthetic coding sequence
atgcccggcctgaccgcctacttcggcctgctggagatctgcggcgtgaaggggggcgaaacagtcatggtcaacgcagccgcgggagcggtcgggtcagtcgtaggccaaatagctaagctgaaggggtgcaaggttgtgggggctgtaggctcagacgaaaaagtggcttacctccagaagcttggctttgacgtggtttttaactataagactgtcgagagtcttgaggaaacactcaagaaagcatcgccagatggatatgattgttattttgacaatgtgggaggagagttctcgaatacagtgattggacagatgaagaagtttggaaggatcgccatctgcggcgccattagtacttacaataggacggggccactaccccctgggccccctcctgagattgtcatctatcaagaactgcgaatggaagcctttgtggtgtaccggtggcagggtgatgcccgacaaaaagctctcaaggatctcctcaaatgggtcttggagttgccatacttcgtgatcgattag

SEQ ID NO: 24492 - DNA, 1263 bp, synthetic construct
  source 1..1263: mol_type = other DNA; note = Synthetic coding sequence
atgagcagcccccgggacttccgggccgagcccgtgaacgactacgaagggaatgacagcgaggcggaggacttaaatttcagggagaccctgccttcatctagccaagagaatacaccaagatccaaggtgtttgaaaataaagtcaactctgaaaaagtcaagctctctctcagaaacttcccacacaatgactacgaggacgtgttcgaggagcccagtgagtctggttccgacccaagcatgtggacagcacggggaccgtttcgccgagataggtggtcttctgaagatgaagaggctgctgggccctctcaggccctatctcccctgcttagcgacacaagaaaaattgtgagcgaaggcgaactggaccagctcgcacagattcgacctctaatcttcaacttccacgagcagacagcaattaaagactgtctaaaaattctggaggaaaaaactgcggcttacgacattatgcaagagttcatggctcttgaactcaagaatctgcccggagaatttaatagtggcaatcaacccagtaaccgggagaagaatagatacagagacatcctcccttacgactcaacccgggtgccgctcggaaaatcgaaggactatataaacgccagttatattcgcattgtaaactgcggagaggaatatttctacatcgcgacacagggacctctgctaagcaccatcgacgatttttggcagatggtgctggaaaacaattcaaatgtaatcgcaatgatcacaagggaaatcgaaggcggtattatcaaatgttatcattattggccgatctccttaaaaaagcccttggagctgaagcacttccgtgtcttcctcgagaactatcagattctgcagtacttcattattcgcatgtttcaagttgtggaaaaatccaccggaacttcgcatagtgttaaacagctccagttcacaaagtggcctgaccacggtaccccagcaagcgcggattcattcatcaagtatattagatacgccaggaagagccacctgacgggccctatggtggtccactgttctgcaggaataggaagaaccggtgtcttcctgtgtgtggacgtggtcttctgtgcgatcgtcaagaactgttcattcaatattatggatattgtggcgcagatgagagagcagaggtctggaatggtccagaccaaggagcagtatcatttctgctatgacattgtgctcgaggtcctccggaagctattaacgcttgactag

SEQ ID NO: 24493 - DNA, 837 bp, synthetic construct
  source 1..837: mol_type = other DNA; note = Synthetic coding sequence
atgagcagcccccgggacttccgggccgagcccgtgaacgactacgaagggaatgattctgaggctgaggatctgaacttccgggaaacgttgccctcatcctctcaagagaacaccccaaggtctaaagtgtttgaaaataaggtgaactccgagaaagtgaaactaagcctcagaaacttcccccacaacgattacgaggacgtgtttgaggagccttccgagtctggcagcgatccatccatgtggacagcacgaggaccattccggagggatcgatggtctagcgaagacgaggaggcagcaggcccgtcccaggcactgagcccactccttagcgacacacggaagattgtctctgagggagagctggaccagctcgcccagatcagaccactcatcttcaattttcacgagcagactgctattaaagactgcctcaaaattctggaagaaaagactgccgcttatgatatcatgcaggaatttatgacaggcactagccatagcgtcaaacagttgcagttcacaaagtggcccgaccatggtacacctgccagcgctgactccttcatcaagtacatccggtacgcgcggaagtctcatctcaccggtccaatggtggttcactgctctgccgggatcggacggaccggcgtatttctttgcgtggacgtggtattctgcgccatcgtgaagaattgctcctttaacatcatggacatcgttgcccaaatgcgtgagcagaggagcggcatggtccagacaaaagaacagtatcatttctgctacgatatcgttctggaagttttacgaaaactgttgactcttgactag

SEQ ID NO: 24494 - DNA, 681 bp, synthetic construct
  source 1..681: mol_type = other DNA; note = Synthetic coding sequence
atgagcagcccccgggacttccgggccgagcccgtgaacgactacgaggggaatgatagcgaagcagaagacctgaatttcagggagacactgccctcttcctcccaagagaacacaccacggtcgaaagtattcgaaaataaggttaactctgagaaggtcaagctgagcctgagaaacttcccccataatgactatgaagatgtctttgaagaacccagcgaatccggctcagatccttccatgtggacggcccggggaccctttcgtcgggacagatggagctccgaagacgaggaagcggcgggtccttctcaagcgttaagtccactcctgtcagacacccgcaagatcgtctccgaaggcgagcttgaccagctggcacaaatccgtcccttgatctttaatttccatgaacagactgccatcaaggactgcctgaagattctggaggaaaagacagccgcgtatgacatcatgcaggaatttatggcgctcgagttgaaaaacttaccaggcgagttcaacagtggcaatcagccaagcaaccgggagaagaaccgctatagggacatccttcctttccaacatcacggctattcagggcctaacgagcggactactttttggcacggcagtaacgaaggagctgtgtcactgctgctgcggtactgcgcatag

SEQ ID NO: 24495 - DNA, 789 bp, synthetic construct
  source 1..789: mol_type = other DNA; note = Synthetic coding sequence
atgagccggtacctgcggccccccaacaccagcctgttcgtgcggaacgttgccgatgacactcggagcgaggacctgagacgggagttcggtcgctatggccctatcgtggacgtttacgtgccactggatttctacacaaggcgcccccgcggttttgcctacgtccagttcgaggacgtgagagacgcggaggacgcgctccataacctggacaggaagtggatttgcggtagacaaatagaaatacagttcgcacagggagatcgaaagaccccaaaccaaatgaaggctaaggagggacgtaacgtatattcatcttcacgctatgatgattacgacagatacaggcgttcaaggagtcgtagctacgagaggcgaagaagccgctctcgcagcttcgattacaattatcggcgttcctacagtcctcgaaattcccggcctacaggcagacccaggaggagtagatcccacagcgataatgataggttcaagcaccgtaatcgatccttcagtcggtcaaagagcaattctcgctccagatctaaaagccaacctaagaaagagatgaaagcgaagagtcggtccaggtcggcctcccatacaaaaaccaggggtacctctaagacagacagcaaaacacactataagtcgggctcccgctacgaaaaagagtccaggaaaaaggagcctcccaggagcaagagccagtcaagaagtcagagtcgttcccggagtaagagcagatctagatcctggacatcacctaaatccagcgggcattag

SEQ ID NO: 24496 - DNA, 522 bp, synthetic construct
  source 1..522: mol_type = other DNA; note = Synthetic coding sequence
atgagccggtacctgcggccccccaacaccagcctgttcgtgcggaacgtggcggatgacaccaggagcgaggacctgcggagagagtttgggcgctatggaccgattgtggatgtgtatgtccccctagacttctatacacgccggccacgggggtttgcctatgtgcagttcgaagatgtgcgcgacgccgaggacgccttacacaatctggatagaaagtggatctgtggtcggcagattgaaatccagttcgcacaaggggacagaaagaccccaaaccagatgaaagccaaggagggccgaaacgtctacagtagcagtcgatatgatgactacgatcgctaccgtagaagccgctctcgatcctacgaacgtaggaggtcaaggtcacgttcttttgactacaactacagacggagctactctccccgtaactcacggcctaccgggcggcccagaaggtcgaggtcacactccgataacgactctcaggtgtcaaaaaagaagaacgaaagatag

SEQ ID NO: 24497 - DNA, 669 bp, synthetic construct
  source 1..669: mol_type = other DNA; note = Synthetic coding sequence
atgagcgccttcggccacgacgaggcctggatggaggccggcggctttggccttgaggcggctgaaaggactgaatatcagtctctatgcaagagcaagctcctgttcctaggtgagcagtctgtggggaaaacctcaatcatctccaggttcatgtacaattcttttggttgcgcatgccaggcaaccgtggggattgattttctgtccaaaacgatgtacttggaggaccagatcgtccagcttcaactctgggatacagcagggcaggagcggttccactcccttatcccaagttatatcagagatagtacaatcgctgtagtggtatacgacataacaaatatcaactcttttaaggagacagataagtgggtggagcatgtccgagcggaaaggggcgatgacgtagtgatcatgctgctgggcaacaaaattgatctggataacaaacgacaggtcaccgctgagcaaggtgaagaaaaaagccggaacctgaacgtgatgtttatagaaactagtgctaaaaccggttacaacgtgaaaaaactgttcaggagggttgcttctgctttactcagcacacgaacttcacctccccccaaagaaggcacagtggagattgagctagaaagctttgaggagtccgggaataggtcctactgttag

SEQ ID NO: 24498 - DNA, 348 bp, synthetic construct
  source 1..348: mol_type = other DNA; note = Synthetic coding sequence
atggtgcagatcatcaaggacaccaacgagttcaagaccttcctgaccgccgcaggacataagttggcagtagtgcagttcagctctaagcgatgtgggccctgcaagcgtatgtttcccgtatttcacgcaatgagtgttaagtaccaaaacgttttttttgcgaacgtcgacgtaaataactcgcccgagttagccgagacatgccatataaaaaccattccaacttttcagatgttcaagaagagtcaaaaagtcactctgtttagtcggattaagcgcatcatctgctgctacaggagcgggttcatgagcaacctgtgtctcgccgacgatgggaacgaatag

SEQ ID NO: 24499 - DNA, 384 bp, synthetic construct
  source 1..384: mol_type = other DNA; note = Synthetic coding sequence
atggtgcagatcatcaaggacaccaacgagttcaagaccttcctgactgcagccggccataagcttgccgttgtgcagttctcatctaagcgctgcggcccctgcaagcggatgtttcctgtgtttcacgctatgagtgtaaaatatcagaacgtattttttgctaacgtggacgtgaacaattcacccgaattagccgagacatgccatattaaaactatcccaacgttccaaatgttcaagaagagccaaaaggtgaccttgttcagccgcatcaagcggatcatctgctgctacagaagtggcttcatgtctaacctcatcttcgagttctgcggagctgacgcaaagaagctcgaagcaaagacccaggagttgatgtag

SEQ ID NO: 24500 - DNA, 1767 bp, synthetic construct
  source 1..1767: mol_type = other DNA; note = Synthetic coding sequence
atgcaccggagcgcccccagccagaccaccaagcggagccggagccccttctccaccacccgacgttcgtgggatgatagcgagtcttccggaacaaatctgaatattgacaacgaggattatagcaggtacccacctcgcgagtatcgggcttcggggagccgacgggggatggcatacgggcatattgactcctatggcgccgacgacagtgaagaggagggcgctggccctgttgaacggccaccggttagaggtaaaacaggaaagtttaaagatgataagctgtatgatcctgagaagggcgcacggagcctcgctgggcccccccctcacttttcatccttttcgcgcgacgtgcgagaggagagggataaactcgatcccgtccccgctgcacggtgttcggcgagtagagccgatttcctaccccaaagtagcgtcgcctcccagagctcaagcgagggcaagcttgccactaagggcgattcttccgagagggaaagacgcgagcaaaatttgccagctaggcccagtcgagcgccggtttccatttgtggaggcggcgaaaataccagtaaatctgccgaagagcctgtggtcaggccaaaaattaggaacttggcctctcctaactgcgttaaacccaagatctttttcgatacagatgatgacgatgatatgccacattctacgtcgcgatggcgcgatacagccaacgataatgaaggccatagcgacggactagccaggcgcgggcgcggggagtcaagttccgggtatccggaaccgaaatacccagaagataaaagggaggctcgctcagatcaggtgaaacctgagaaggtcccgagacggagacgcactatggccgatcccgatttttggacccatagcgatgattactacaagtactgcgacgaggactcagactcggataaggaatggatcgcagcacttcggaggaaataccgctcacgggagcagaccctaagctcatccggagaatcttgggagaccctacccggcaaggaagagcgggagcctccacaggcgaaggtgagtgcttcaacaggcacttctcctggccccggcgcttccgcaagtgctggagcaggtgccggggctagtgcaggatcaaatggttcaaattacctagaggaagtccgagaaccttcgttgcaggaggagcaagctagcctggaagaaggcgaaatcccctggctccagtaccacgaaaatgattctagtagcgagggagacaatgatagcggccacgagctgatgcagccgggagtatttatgcttgatggcaataacaacctggaggacgatagttccgtctctgaagatctggaggttgattggagcctgtttgatggcttcgctgacgggctcggtgtcgctgaagctatatcttacgtggacccccagtttcttacttatatggctctggaagaaagactggctcaggccatggagactgcccttgctcatcttgagtctctggccgttgatgtggaggtagctaacccacctgccagcaaggagtctatcgacgccctaccggagatcctagtgacagaagatcatggggccgtgggacaggagatgtgttgccccatctgttgcagtgagtatgtgaagggcgaggtcgcaaccgagttgccatgtcaccattacttccacaaaccctgcgtcagcatatggctccagaagtctggaacgtgtccagtgtgtcgctgcatgtttccgcctcctctctag

SEQ ID NO: 24501 - DNA, 612 bp, synthetic construct
  source 1..612: mol_type = other DNA; note = Synthetic coding sequence
atgcccgagcagttcagcgtggccgagttcctggccgtgaccgccgaggatttatccagccctgccggcgccgctgctttcgcagccaaaatgcctaggtatcggggggctgcactggctagggaggagatactcgaaggggaccaggccatactccagagaattaagaaggcagtcagagcgatccattcctccggattgggtcacgtggagaatgaggagcaatatagggaggctgtagagtcactgggtaattcacatttgtcccaaaactctcatgaactgtctacaggctttctcaatctggctgtgttcactagggaggtggctgctctcttcaagaacctgatccagaacctgaataatattgtgtccttcccccttgatagcctaatgaagggtcagctgcgcgacgggaggcaagatagcaaaaagcagttggagaaggcctggaaagactatgaggctaaaatggccaagcttgagaaggaacgtgaccgggcacgtgtgaccggcgggatcccggcctggaacttgggcatccctgccaagccacatcccacactgaaaagggcttctgagtcgccacaagctcccccagacccggcctag

SEQ ID NO: 24502 - DNA, 1932 bp, synthetic construct
  source 1..1932: mol_type = other DNA; note = Synthetic coding sequence
atgggccaggagagcagcaagcccgtgtggcccaaccccaccggcgggtatcagtccaataccgggcgcagatacgggcggagacacgcctatgtttccttcaggcccccgactagccagcgggaacgtatcgccagccagcgtaagactaactcagaggtgcccatgcacagatccgcccctagccagaccaccaagcggtcccgcagccccttctccacaactagaagatcctgggacgattctgaaagctcgggaacgaatctcaacatagataacgaagattacagtaggtaccccccccgggaataccgggcatccgggtcacgtaggggaatggcatatggccatattgatagctatggggcagatgattcagaagaagagggagccgggccagttgagcgtccacctgttaggggtaaaaccggaaagtttaaggatgacaaattatacgatcctgagaagggcgctcggtccctggccgggcctccgcctcatttttctagtttcagccgcgacgtgcgagaagaacgggacaaactggacccagtcccagcagcaagatgtagtgctagtcgagccgattttctgcctcaatctagtgtggccagccaatcatcgtctgagggaaaactggccacaaaaggagactcctccgagcgcgaacgaagggaacagaatctcccagccagaccctctagggccccggtgtctatttgcgggggaggggaaaatacttctaagtctgcggaagaaccagtggtgaggccgaaaatccgcaacctggctagtccaaactgtgttaagccaaaaattttctttgataccgacgacgacgatgacatgccgcattcgacgtcccgctggagggacactgccaatgacaacgaaggacatagtgacgggttggctagacgaggaaggggggaaagctccagcggatacccggagcctaaataccccgaggacaaacgggaagctcgaagcgatcaagtgaagccggaaaaggtccctcgccgccgacggacaatggcagacccagacttttggacacacagtgatgattattacaaatattgtgacgaggattccgactccgataaagagtggatcgccgctttaagacggaaataccgatccagagagcagacgctctcttcttctggagagtcatgggagacactgccaggcaaagaggaaagagagcctccgcaggcaaaagtatctgcttcaaccggaacttcccctggaccaggcgctagcgcaagcgcaggagccggagccggggctagtgccggctccaacggctccaactacctcgaagaagtgagggaacccagcttacaggaggaacaggcctccttggaagaaggtgaaatcccgtggctacagtatcacgaaaatgatagttcttcagagggggacaatgactctggccacgagttaatgcagccaggagtttttatgctcgacggcaacaacaacctcgaggatgatagctcagtctccgaggacttggaagtcgactggtctctgttcgacggctttgcagatggtctgggcgttgctgaggcaatatcgtatgtggatccccagtttctgacatacatggcactggaggaaaggctcgcccaagccatggagacagcgctggcacacctggagagcttggcagtcgatgtggaggtggcaaaccctccggcaagcaaggaatctatcgatgccctgcctgagatactggttacggaagatcatggtgctgtcgggcaagaaatgtgctgtcctatctgttgcagcgaatatgtgaagggcgaagtggcaactgagttgccttgtcatcactacttccacaaaccatgcgtgtctatttggcttcagaagtctgggacatgccccgtctgccgctgtatgttccccccaccgctgtag

SEQ ID NO: 24503 - DNA, 1368 bp, synthetic construct
  source 1..1368: mol_type = other DNA; note = Synthetic coding sequence
atgggccaggagagcagcaagcccgtgtggcccaaccccaccggcgggtaccagtcaaatactgggcgtcgctatggccggcggcatgcgtacgttagttttaggccgcccacatcacagagagagcgaattgcatctcaaaggaaaaccaactctgaagtgccaatgcaccgctcggctccaagccagacgacaaagagaagccgaagcccattttcaaccactagaagaagctgggacgattctgaaagcagtgggactaatttgaatatcgacaatgaagattacagtagtacaagtaggtggcgggacaccgccaacgacaacgagggtcactcagatggcttggcgcggcgtggccgaggcgagagctcaagcgggtaccccgaacctaaatacccggaagataaacgagaggctaggtccgaccaggttaagccggagaaggtgcctcggaggagacgcactatggcagaccccgacttttggacgcactccgacgactattacaagtattgtgatgaggatagtgacagcgataaggagtggatcgccgcactgagacggaagtaccggagcagggaacagactttgagcagctcaggggaatcctgggaaaccctgccaggtaaggaagaacgggagcctccccaagccaaagtctcagcttcaactgggacctcacctggacctggcgcatcagccagcgccggcgctggtgcaggggcgtcggccggtagcaacggcagcaattacctggaagaagtgagagagccaagcttgcaagaggaacaggcctctttggaggagggagagatcccctggctgcaatatcacgagaatgattcgagcagcgagggggacaacgactcaggtcatgaactgatgcaacccggtgtctttatgctggacgggaataacaatctggaagatgattcctcagtttctgaagaccttgaggtggattggagcttgtttgatggttttgctgatggacttggcgtggccgaagctatcagctacgtggaccctcagtttttaacctacatggccttggaggagcggttagcccaggcaatggagacggcgcttgcacacctggaaagcttggctgtggacgtggaggtggctaaccctcccgcgagtaaagaatccattgacgccttacccgagatcctcgttaccgaggatcatggggcggttggacaggagatgtgctgtcccatttgctgcagcgaatacgtgaaaggagaggttgcaacagaactgccatgtcaccactacttccacaagccctgcgtgtcaatttggttacagaagtcggggacctgccctgtatgccggtgcatgtttcctcctccgctctag

SEQ ID NO: 24504 - DNA, 390 bp, synthetic construct
  source 1..390: mol_type = other DNA; note = Synthetic coding sequence
atggccgagctgatccagaagaagctgcagggcgaggtggagaagtaccagcagctccagaaggaccttagtaaatccatgtccgggagacagaagcttgaggcccagcttaccgaaaacaatatcgtaaaggaggaactcgcgctgctcgacgggagcaacgtggtgttcaaactgctgggaccagtgctggtgaagcaggaactgggcgaggcccgagctaccgtgggtaagaggctggactacattaccgccgagatcaagaggtatgagtcccaactaagggatctcgaacggcaaagtgaacaacaaagagagacactggcccagctgcaacaagagtttcaaagagctcaagcagccaaagccggagcgccaggcaaggcatag

SEQ ID NO: 24505 - DNA, 390 bp, synthetic construct
  source 1..390: mol_type = other DNA; note = Synthetic coding sequence
atggccgagctgatccagaagaagctgcagggcgaggtggagaagtaccagcagttgcagaaagatttatccaagtccatgtctggacgacagaagctggaggcccagctgaccgaaaacaacatcgtaaaagaggagctggccctgttggacggatctaacgtggtttttaaacttctcggccccgtactggtgaaacaggagcttggggaggccagggcaacagtcggaaagagattggactatattacagccgaaatcaagcgctatgaatctcagcttagggatcttgagcggcaatcagaacaacagcgggaaaccctcgcccagcttcagcaggagttccagagggcacaggcagctaaagccggggcacccggaaaagcatag

SEQ ID NO: 24506 - DNA, 390 bp, synthetic construct
  source 1..390: mol_type = other DNA; note = Synthetic coding sequence
atggccgagctgatccagaagaagctgcagggcgaggtggagaagtatcaacaacttcagaaggatctctcaaaaagtatgagtggcagacagaaacttgaagcacagctcaccgagaataatatcgtgaaggaggagcttgccctgttggatggctctaacgtggtgttcaagctgctcgggccggttctcgtaaagcaagagctgggtgaggctagggcaactgtcgggaagagactcgactatataacagctgagattaagcgttacgaatcacaactgagggatctggaacgccaatcagagcaacagcgagagactctggcccagctccagcaggagttccaacgagcccaggctgctaaggccggggctcctggaaaggcttag

SEQ ID NO: 24507 - DNA, 1512 bp, synthetic construct
  source 1..1512: mol_type = other DNA; note = Synthetic coding sequence
atgaagtgcgagcactgcacccggaaggagtgcagcaagaagaccaagactgatgatcaggagaatgtgtcagcagatgccccctcacctgcacaagaaaacggcgagaaaggcgagtttcataagcttgccgacgcaaaaattttcctttccgattgcttagcttgtgattcttgcatgaccgccgaggaaggcgtccaactcagccagcagaatgcgaaagatttctttcgggttctgaacctcaacaagaagtgtgacacttctaagcataaggttcttgtggtatctgtctgcccccagtccttaccttactttgctgccaaatttaaccttagtgtgaccgacgcaagcaggaggttatgtgggtttctcaagagcctgggagtccattacgttttcgatactactattgccgctgactttagtatcctggagtcccagaaagaatttgtgcgccggtacagacagcattccgaggaggaacggaccctacccatgctaacttccgcttgtccgggctgggttagatatgctgaaagagtgttgggtcgccccattactgcacacctgtgcactgccaaaagtccacaacaggttatgggcagcctggtgaaggattacttcgcacggcagcagaacctttcccctgagaagatattccatgtaattgtggcaccctgttacgacaagaagctcgaggctttgcaggagagcctgccacccgccctgcacgggtccaggggcgctgactgcgtgctcaccagcggaaaagtgctaatatcctggtggtgtacgccggtcattacagcaacccaggaggccgccgctcgagagagcctggagccagggcgccaacgactgcagagggataaaattgcaccacttgactccagcctcggcggggggggggagattgcccagattatggaacagggagatttgagcgtgagagatgccgccgtcgacacccttttcggggatctaaaggaggacaaagtaacaaggcatgatggcgctagctctgatgggcatcttgcacatatttttaggcacgcggccaaggagcttttcaatgaggatgttgaggaagtgacatatcgcgctctgcggaacaaggattttcaagaagtgacgctggaaaaaaatggcgaagtggtgctacgattcgcagccgcttatggtttcaggaacattcagaatatgatactaaagctgaagaaggggaaattccctttccattttgtcgaggtactggcttgcgccgggggctgcctcaatgggaggggacaggcacagactcccgacggccatgcagataaggctttgctgaggcagatggagggtatttacgcggatatacctgtccgcaggccggagtcctccgcacacgtgcaggagctttaccaggagtggcttgagggcatcaacagcccaaaagcacgggaggtgctgcacaccacataccaatcccaagaaagaggaactcatagcttagacataaagtggtag

SEQ ID NO: 24508 - DNA, 348 bp, synthetic construct
  source 1..348: mol_type = other DNA; note = Synthetic coding sequence
atggccaccgagcccgaggccgccgagcccgtggtgcccagcctggtggatcgctattttactagatggtacaagcccgacgtgaaagggaagttttgtgaggatcactgtatactccagcactccaaccgcatctgcgtgataacactggctgaatcacatcctgtcctgcagtccggcaaaaccattaaaagtatatcgtatcaaatcagcacaaactgttcgagactgcagaacaaggtttctggcaagtttaagcgcaggataatatacctggagaaggttgaagacgtgatcaaacgaaagatgatgccactgagcctggggctccatctaccacactcatag

SEQ ID NO: 24509 - DNA, 1566 bp, synthetic construct
  source 1..1566: mol_type = other DNA; note = Synthetic coding sequence
atgaacgtgagcctgagccagaagaccgtgaagatccaccggctgtttcccatgctcgcttttagtgagccttatgagttcgtaagtctggaatggttacagaagtggctcgatgaatccactcctacaaagccaatcgataaccacgcatgcttgtgctcccacgacaaactccaccctgataagattagtattatgaagcggattagcgagtatgccgccgacattttctacagtagatacggtggcggcccccggctaaccgtgaaagccctgtgtaaagagtgcgtggtcgagcggtgtcgtattctcaggcttaagaatcagttaaatgaggactacaaaacagtgaataacctccttaaggccgccgtgaaaggcgacggattttgggtggggaaatctagtttgcgctcatggaggcaactggccttggaacagctcgacgagcaggatggcgacgctgagcagtccaacggaaagatgaacggctctaccctgaacaaagatgaatcgaaagaggagcgtaaagaagaggaagaattgaatttcaacgaagatatcttgtgtccacacggggaactctgcatcagcgagaatgaacgccgcctggtgtccaaggaggcctggtctaagctgcaacagtactttccaaaggcgccagaattcccttcttacaaagaatgctgtagccagtgtaaaatccttgagcgggaaggggaggagaacgaggcattacacaaaatgatcgcgaacgagcagaagacatcgttgcccaaccttttccaggacaagaacaggccctgcctatcgaattggcccgaggacaccgatgtgctgtatatagtgtctcagttcttcgttgaagagtggcgaaaattcgtacgcaagcctacaaggtgtagccctgtctccagtgttggaaactctgctctgctctgcccacacggtgggctgatgttcactttcgcttctatgaccaaggaggatagcaagttgattgcactgatatggccatctgaatggcagatgatccagaaacttttcgtggttgaccacgttatcaagattacacgaatcgaggtgggagacgtcaatccgtcagagacgcagtatatttccgagcccaaactttgcccggagtgccgagaggggctgctatgccagcagcagcgtgatctccgggagtatactcaagccacaatatacgtgcataaagtcgtggataataaaaaggtcatgaaagatagcgccccggagcttaatgttagctcctctgagaccgaagaggacaaggaagaggcgaagcccgatggcgaaaaagatcccgacttcaatcagattatgcatgccttcagcgtggccccctttgaccagaacttgtcaattgatggaaaaattctgagcgacgactgcgcaacactcggcactcttggggttatccctgagagcgtcattctcctgaaggcagatgaacccatcgctgactatgctgccatggatgatgtcatgcaggtgtgcatgccggaagaaggctttaaaggcaccgggctcctggggcactag

SEQ ID NO: 24510 - DNA, 984 bp, synthetic construct
  source 1..984: mol_type = other DNA; note = Synthetic coding sequence
atgaccgccgtgggcgccgagcggctgaccagcgtgcgggcctggttgagttgctgcggcgcatgtgtctgcgtatttcttttcctttgcttatgtgtgttccctttaagagtgcacgtgcatgtatggggcggggaatgtagggttgacatagcagtttttgtgagtaagcacatgattgttgcactgatgcatgttactggtgcagcagggctcttgcggttatgcgtgcgggcctgtgtctgcatgcgggtctgcgcaaccgcacacatgtacagggtggataaatcttttacaagcagacgtagtgtgtggcggagtgatggccaaaaccagcactttcctcaggcactggatctctcacgggttaatttggtgccctcctatactccttccctgtatcccaaaaatactgacctcttcgaaatgatcgaaaagatgcagggtagcaggatggatgagcagcgatgcagctttccgccccccttgaagaccgaagaggactacatcccttaccctagtgtccacgaggttttaggtcgggaaggccccttccccctgatcctgctacctcagtttggcgggtattggatcgaggggaccaatcatgagatcaccagtattcctgagaccgaacccctccagtcccccactaccaaggtgaagctggaatgtaaccctaccgcacgtatctaccgaaaacacttccttggaaaggagcattttaactactacagccttgatgccgcgctgggacacctcgtcttcagcttgaaatatgacgtgatcggggaccaggaacacttgcgacttctgctgcggacaaaatgcaggacataccacgacgtgatcccaatctcatgcctgacagagttcccaaacgttgttcaaatggccaaattggtttgcgaagacgtgaatgtggatcgcttttaccctgtcctttaccctaaggtgtggcttgatctggggactgcccattag

SEQ ID NO: 24511 - DNA, 2079 bp, synthetic construct
  source 1..2079: mol_type = other DNA; note = Synthetic coding sequence
atgatcgagaagatgcagggcagccggatggacgagcagcggtgctccttccctccacccctgaagaccgaggaagattacattccctacccaagcgtacatgaggtccttggcagagagggcccctttcctctcatattgcttccacagttcggcggctactggattgaaggaaccaaccatgagatcacgtccatacccgaaacagaacccctacagtccccaactaccaaggttaaactggagtgcaaccctaccgcgcggatatatcgcaagcattttctcggaaaagaacacttcaactattacagtcttgatgccgccctggggcatctggtgttttcattgaagtacgacgtgatcggggaccaagagcacctgagactactgctgaggaccaagtgccggacctatcacgacgtgattccaatctcatgtctcacagagttccctaatgtggtccagatggccaagttagtctgtgaggacgtgaatgttgatcgcttttacccagtgctgtaccctaaagcctctcgactgatcgtgacatttgatgagcatgtgatcagcaacaattttaaattcggagtgatctaccagaagctgggacaaacctcagaagaggagctcttctctacaaacgaagaatctccagcctttgtagaattcttggagttcctcgggcagaaagtcaagcttcaggactttaagggtttccggggcgggctagacgtgacgcatggacagacagggacggaatcggtgtactgcaacttccggaataaggaaatcatgttccacgtcagcaccaagcttccctatacggagggagacgcacagcagctgcagcgcaagaggcatataggaaatgatatcgttgccgtagtgttccaggacgaaaacactccattcgtgcccgatatgatagcctccaactttctgcacgcttacgtggtcgtgcaggctgagggcgggggcccagatgggcccctctacaaggtctctgtgaccgctagagatgatgttccgtttttcggacccccactgccagatcctgcggtttttaggaagggccctgagtttcaggagtttctgttgacgaaacttataaatgcagagtacgcatgctataaagctgaaaaatttgccaagcttgaggagagaacccgcgctgccctccttgagactttgtacgaggaactgcatatccactcgcagagcatgatgggcctgggtggtgacgaggacaagatggagaacggttcaggagggggcggatttttcgagagtttcaaaagagtcatcaggagcagatcacaatccatggatgctatggggctatccaacaagaaacccaacaccgtgtcaacctcccactccgggtcattcgcccctaataaccccgatcttgcgaaagccgccggcatcagtctgcttatacccgggaaaagcgcctccaggtttggtcgtagaggatctgctatcggcattggaactgttgaggaagtggtagtcagaggagcagccgggtcaggaggctgccttcacgctttatttagtgcccgcagccaagacggcggccacataggcgatgtcgcccccttaccacccggccaagcacctggcagagccggatggtccggcggatcttcggacggcactcagcacctcctctggggactgagcctcattgtgcctgggaagtcccccacgagaaagaagtctggcccatttggatcccgccggagctccgccataggaatcgaaaacatacaagaggttcaagaaaaacgggagagccctccagcagggcagaagaccccagactctggccacgtctcccaggaaccaaaatccgagaatagctcaacacagagctcgcccgaaatgcccactactaagaatcgagccgaaacggccgcccagagagcagaggccctgaagttgcccctgctagttcagtgtcaacagctgagacagcgaggagggggggatggaggctgcgggcggcgcggtcaccgccctggcgagcgcgttattctaaggaatacacctcaggccggcctgctgcatctctag

SEQ ID NO: 24512 - DNA, 2085 bp, synthetic construct
  source 1..2085: mol_type = other DNA; note = Synthetic coding sequence
atggcccagctgcggcccgccgtgccccccggccggccccggcggggcagcctcccagccggggcttcctggcagaatacggacttattcgaaatgatcgagaaaatgcaaggaagtaggatggacgaacagagatgctcttttcctccacccctcaaaaccgaggaggactacattccctatccatccgtacatgaagtcctcggccgagagggtcccttccccttgatattattgcctcaatttgggggctattggattgagggcacaaaccacgagattacctcgattcctgagaccgagccactgcagtctcctacaactaaggtgaagctggaatgtaatcctacggcccggatctataggaagcatttcctggggaaggaacacttcaactactatagcctcgatgcagcccttggacacctggtgttttcattgaaatacgacgtgattggcgatcaggaacatctgagactgctgctccgcaccaagtgcaggacttaccacgatgtgatcccaataagctgtcttaccgagttcccaaatgtggtgcagatggccaaacttgtctgtgaggacgtgaatgttgatcgattctatcccgtgctgtatcccaaggcatctcgccttattgtgacttttgacgagcacgtcatttctaataatttcaagttcggggtcatttaccagaagctgggacagacgagcgaagaggaactcttctcaaccaacgaggagagcccggcattcgtggagttcctcgaattccttggccagaaagttaaactgcaggacttcaagggttttcgcgggggtctggatgtgactcatggccagaccggaactgagtcggtgtactgcaactttagaaataaggagattatgtttcacgtgtctacaaagctgccatacactgaaggggatgctcagcagctacagagaaaaagacacattgggaacgacatcgtagctgttgtcttccaggatgaaaacaccccgtttgtgccagacatgatcgcaagcaactttctacacgcctacgtcgtggtccaggctgagggaggggggcctgatggccccctctacaaagtgtccgtgaccgcccgtgatgatgttccattcttcggtcctcccctgcccgaccctgccgtgtttagaaaaggcccagaatttcaagagttccttcttactaaactgataaacgccgaatatgcctgctataaagctgagaaattcgcaaagctcgaggaaaggaccagggcagccttattggaaaccctttatgaagagctccacatccatagtcagtccatgatgggtctcggcggcgacgaggataaaatggaaaacggatccggcggaggtggatttttcgagtcttttaaaagagtcatcagaagccggtcacagtccatggatgctatgggcctctctaataagaagccaaatacagtcagcactagtcattccgggagtttcgcgcctaacaatcccgacctggcaaaggcggcaggcatatcgttaatagtgccaggcaagtctccaacccggaagaagagtggtcccttcggttccaggagaagctctgccattggaatcgagaatatccaggaagtccaggaaaagcgagaaagtccgcccgcgggacagaagaccccggacagtggtcacgtgtcgcaggaacctaaatccgagaattcaagcacccagtcatctcctgaaatgcccacaacgaagaatcgggctgagacggccgcccagagagctgaggctttgaaagacttttcaaggagctctagctccgcctctagctttgcgtctgtggtcgaggagacagagggagtggacggtgaagacactggcttagaatctgtgagctcatcgggtactccacataagcgagactcgttcatctacagtacttggctggaagatagtgtatctaccaccagtggcggctccagtccagggccaagtcgaagtccccaccccgatgccggaaaactcggcgaccccgcgtgtcccgagatcaagatccaactcgaggcctccgagcagcatatgccccaactcgggtgctag

SEQ ID NO: 24513 - DNA, 2082 bp, synthetic construct
  source 1..2082: mol_type = other DNA; note = Synthetic coding sequence
atggcccagctgcggcccgccgtgccccccggccggccccggcggggaagcctgcctgccggggccagttggcagaatacagatctgtttgagatgatagagaaaatgcagggttctcgtatggacgaacagagatgttcttttccaccgcccctgaaaacggaagaggattacatcccatatccttctgtccatgaggttctgggccgagagggcccctttccactgatcctcctaccccagtttgggggttattggattgagggcacaaatcacgagatcacatcgatcccggaaacagagcccctccagagtcctacgacaaaagttaagctggagtgcaatcctaccgctaggatctatcgcaagcatttcttgggcaaagagcatttcaattattattcactggacgcagccctgggacaccttgtgttcagcctgaagtatgatgtgataggcgaccaggaacacctccggttgcttttacggacaaaatgcagaacctatcacgacgtgattccaatttcctgtctgacggagtttccaaacgtggtgcagatggcgaagctggtctgcgaggatgtcaatgtggatcggttttacccggtactgtatcccaaagcgtcccgcctcatcgtgacgtttgatgaacacgtcattagcaacaatttcaagttcggcgttatttaccagaaactgggacagacaagcgaagaggaactgttctccaccaatgaggaatcaccagccttcgttgagtttcttgaatttctggggcagaaggtgaagctgcaggattttaaagggtttcggggagggctggatgtcacccacggacagaccggcacggaatctgtgtattgtaactttaggaacaaggagatcatgttccacgtttccactaagctgccttacaccgaaggcgacgcccagcttcagagaaagcggcacattggtaacgacatcgtagccgttgtgtttcaagatgagaacactcccttcgtacccgacatgatagctagcaacttcctgcacgcctacgtggtggtgcaagctgaaggcggaggtccagacgggcctctctacaaggtatccgttactgctagagatgacgtcccttttttcgggcctcctctgcctgacccagctgtgtttcgaaaagggccagagtttcaagagtttttgctgaccaagcttatcaacgccgaatatgcatgctacaaggccgagaagtttgctaaattggaagaacgcactcgcgctgcgctcctggagacgctgtacgaagaactccatatccactcccaatcaatgatgggattgggaggtgacgaagacaagatggaaaacggatccggaggcggaggattcttcgaaagctttaaaagagtgatccggtcaaggtcacagtccatggatgccatgggattaagcaataagaagcccaatacagtcagcacgtcgcactctggctcctttgcacccaacaaccctgatcttgcaaaggccgcaggcatcagcctcatcgttccgggcaagagccctaccagaaaaaagtctggccccttcggcagcagaagaagtagcgcaattgggatcgagaatattcaggaagtccaggaaaagagggagagcccccccgcaggtcagaagacccccgattccggacacgttagccaggagcccaaatccgagaactccagcacccagagcagtcctgaaatgccaaccaccaagaacagagcagaaactgcggctcaacgagcagaggccttgaaagactttagtcgctcttccagttctgcatcttccttcgcgtccgtcgtggaggaaacagaaggcgtcgacggtgaggatacaggactcgaatctgtgtcgtcgtcagggactccacataagcgcgacagcttcatttattctacctggctcgaggatagcgtgtcaactacatcaggggggagtagtcccgggccttcacgctctccacatcctgatgccggcaagttgggcgatcctgcatgtcctgagataaaaatccagctcgaagcgtctgagcagcacatgccccagctgggatgctag

SEQ ID NO: 24514 - DNA, 1992 bp, synthetic construct
  source 1..1992: mol_type = other DNA; note = Synthetic coding sequence
atgatcgagaagatgcagggcagccggatggacgagcagcggtgctcattcccaccccctctgaagaccgaggaggattacataccatacccctctgtgcatgaagtactcggacgggagggaccatttccccttatactgctcccccaatttggtggctactggatcgagggcacgaaccacgaaattactagcatccccgaaactgaacctctccagtccccaaccaccaaagtaaagttagagtgcaatccaaccgcaagaatttatcgcaagcacttcctcggaaaggaacactttaactattatagcctcgatgccgctctgggtcatctggttttttcgttgaagtacgatgtgattggagatcaggagcatctgcgcttgttgctgagaaccaagtgcagaacataccacgatgtgatcccaatctcttgtctgacagagtttcccaacgtggtgcagatggccaagctagtatgcgaagacgttaacgttgataggttttacccagtgctgtatcccaaggcctcccggctcatagtgacctttgatgaacatgtaatttctaataactttaagttcggggttatctaccagaagctgggacagacgtcggaggaggagctattttcgaccaatgaggagtctccagctttcgtagaattcctggagttcctcggacagaaagttaagctccaggactttaaaggctttcgaggggggctcgatgtcacccacggacagaccgggaccgagtctgtgtattgcaacttcaggaataaggaaatcatgttccatgtgagcactaagctcccctatacggagggggatgctcaacagctacagagaaaacggcatattgggaatgatatcgtagcagtggtattccaggacgaaaatacacccttcgtaccggacatgattgcgtcaaatttccttcatgcatatgtggtggtgcaagcggagggcggcggtcccgacggtcccctttataaagttagcgtcacggcccgggacgatgtgcctttcttcggtcctcccctccctgatcctgcagtattccgtaagggaccggaattccaggagttccttcttaccaagttaatcaacgccgaatatgcctgctacaaagccgagaagttcgccaagcttgaggaacgtacgcgtgctgcattgctggagacactgtacgaagagcttcatatacattcacagagtatgatgggactgggcggtgatgaagataaaatggagaatggctctggggggggcggtttcttcgagtccttcaagcgtgtgattcgctcacggtcccagtctatggacgcgatggggctgagcaataagaagcccaataccgtctctacttcccactctggcagttttgcgcccaataaccccgacctcgctaaggccgctggcatctccttgattgttccaggcaaatcccctactaggaagaagtctggaccattcggatcccgccgtagcagtgccattgggatcgaaaatattcaggaggttcaggaaaagagagagtcccccccagccggacaaaaaacaccagattcagggcacgtttctcaggagccgaaatccgagaactcatctacgcagagcagcccagagatgcctaccactaaaaacagagccgaaaccgctgcgcagagagctgaagccctaaaggacttcagccgttcttcctcttcggctagtagtttcgcatccgtcgtggaagaaaccgagggcgtagacggagaagacacaggtctagagagtgtttcctcatcaggcacacctcataaacgggactcctttatctacagcacctggctggaggattctgtaagcacgaccagtggcggtagttctccaggtcctagccgtagtcctcatccagatgcaggtaagctcggagaccccgcttgccccgagataaaaattcagttggaggcatctgagcagcatatgcctcaactggggtgttag

SEQ ID NO: 24515 - DNA, 744 bp, synthetic construct
  source 1..744: mol_type = other DNA; note = Synthetic coding sequence
atgctggtgctgcggagcgccctgacccgggccctggccagccggactctcgcccctcaaatgtgttccagcttcgctactggccctcgacagtacgacggaattttctatgaattccgcagttactatttaaagcccagtaagatgaatgaattcctcgaaaacttcgagaagaatgcgcatctaaggacagcacatagcgagttagtgggctattggtcagtggaattcggggggagaatgaacactgtgtttcatatctggaagtacgataacttcgctcacagaactgaagtcaggaaggccttggcgaaagataaagagtggcaggagcagttcttgattcccaatttggccctaattgacaagcaggaatccgagatcacttacctggtgccttggtgcaaactggagaagcctcctaaagaaggggtgtacgagctagctacattccagatgaagcccggagggcccgccctgtggggggatgcttttaagcgcgcagtgcacgctcatgtcaacctcggatacacaaagttggtgggagtgtttcatacggaatatggggcattgaatagagtgcacgtgctttggtggaacgagtccgctgattcccgggccgctggccgtcataagtcacacgaggatccacgcgtggtggctgccgtcagagagtctgtgaattacttggtgtcccagcaaaatatgctactcattccaacaagtttttccccactcaaatag

SEQ ID NO: 24516 - DNA, 3594 bp, synthetic construct
  source 1..3594: mol_type = other DNA; note = Synthetic coding sequence
atgcacatcaagagcatcatcctggagggcttcaagagctacgcccagagaacagaagtgaatgggttcgatccactgtttaacgcgattaccggactgaatgggagtggcaagtccaatatactcgactcaatttgtttcctgctgggaattagtaatctctctcaggttcgggcctcaaacttgcaggacctggtgtataaaaacggacaggctggtatcactaaagctagcgtttccattactttcgataactcagataaaaagcagtcccccctcggatttgaagtgcacgatgaaatcacggtaacacgtcaggtggtgatcggcggaagaaacaaatatctcatcaacggtgtgaacgccaacaacacacgtgtgcaggacctcttctgcagcgtcgggttgaacgtcaataacccgcatttccttattatgcaagggagaattacaaaggttctgaacatgaagcctcctgagattctgagtatgattgaagaggcagccggcactaggatgtacgaatacaaaaagattgccgcccagaaaacaatcgagaagaaggaggccaagttgaaagagattaaaaccattcttgaagaggaaatcacacccaccattcagaagctcaaggaggaacgatccagctatctggaataccagaaggtgatgagggagattgaacacctgtcgcgtttgtacattgcctaccaattcttgttggctgaggacactaaagtgcggagtgccgaggaactgaaagagatgcaggataaagtcatcaagctgcaggaagagctgtctgagaatgataaaaagattaaagcactgaaccacgagatagaagagctagagaagagaaaggataaagaaactggcgggattttacgaagccttgaggatgccctcgcagaagcccagcgagtgaacacgaaatctcaatctgccttcgacttgaagaaaaagaaccttgcttgcgaggaaagcaaaaggaaggaacttgaaaagaacatggttgaggatagcaaaaccctggccgctaaagagaaagaagtgaagaaaataactgatggactgcacgccctgcaagaggccagcaacaaggatgcagaagccttggccgcggcccaacaacatttcaatgctgtgagtgcgggtctttccagcaatgaggacggtgcggaagctactcttgctggtcaaatgatggcgtgcaaaaacgatatcagtaaagcgcagactgaggcaaagcaggcccagatgaagttgaagcatgcccaacaggaactgaagaacaaacaagccgaagtgaaaaaaatggattcggggtatcggaaagatcaggaggctcttgaagcagtgaaacggctgaaagaaaagctggaggcggagatgaagaagctaaattatgaagagaataaagaagagtctctgctcgaaaaacggcgtcaactgagccgggatattggtaggcttaaagaaacatatgaagctcttctagctcggtttcccaacctgcgtttcgcctacaaagaccccgaaaaaaattggaacagaaattgtgtaaaggggttggtggcaagcctcatcagcgtgaaagatacctccgcaacaaccgcgctcgaactcgtggcaggagagagactgtataacgtcgttgtcgatacagaagtgacagggaaaaagttgctcgaaaggggcgaactcaaacgccgatataccataatcccactcaataagattagtgcccgctgtattgccccagagacccttagggtcgcacagaacctagtcggtccggacaatgtgcatgttgccctatcattggttgaatacaaacccgagctgcagaaagccatggagttcgttttcggcaccacattcgtgtgtgacaatatggacaacgccaaaaaagtggcttttgataaaagaattatgacacgcaccgtgacgctcgggggggatgtctttgaccctcatggtaccctttctggcggggcaaggtcccaggccgccagcattctcaccaaattccaagaattgaaagacgtgcaggacgagctacgtattaaggaaaatgagctgcgggccctggaggaagagctggcaggcctgaagaatacagccgaaaagtaccgccagctgaaacagcagtgggagatgaaaaccgaagaagccgacctgttgcagaccaagctgcaacagagctcataccacaagcaacaggaggagttggacgccctgaagaaaaccattgaggagagcgaagagacactcaaaaacacaaaggagattcagcggaaggcggaggagaaatatgaggttttagagaataagatgaagaacgcagaagccgaacgagaacgcgagttgaaagatgcacaaaagaaactcgattgtgctaaaaccaaggcagacgcatcatctaaaaagatgaaagaaaaacagcaggaggtcgaggccataaccctagaactagaggagctgaagagagaacatacctcttataagcaacagctggaggccgtcaacgaagcaataaagagctacgagtcgcagatcgaagtaatggcagctgaggttgccaaaaataaagaatccgtcaacaaagcacaggaggaggtgacaaaacagaaagaagtgattacagcacaagacaccgtgattaaggcaaaatacgccgaagtggctaaacacaaagagcagaataacgactcacagctcaagattaaagaactggatcataatattagcaagcataaacgcgaagccgaagatggtgccgccaaagtgtctaagatgctcaaggattatgactggattaacgccgagcgacacttgtttgggcaacccaattccgcatacgactttaagactaataacccaaaagaagccggccagcggttgcaaaagctgcaggaaatgaaagagaaactcggcagaaatgttaacatgagggccatgaatgttctcactgaagccgaggagcggtataacgacctgatgaagaaaaagagaattgtagagaatgacaaatccaaaattctcaccaccatcgaggatctagatcagaagaaaaaccaagccctaaatattgcctggcagaaggtcaacaaggattttggtagcatctttagcaccttactccctggagccaacgcaatgttggcccctccagaaggtcagactgtgcttgatggtttagagtttaaggtggcgctaggaaacacatggaaggagaacctcactgagctctcaggcggccagcggagcttggtggcactatcactgatactaagtatgctcctgttcaagccagctcccatttacattctggacgaagtggatgcagctctggacctgtcgcacacgcagaacatcggacaaatgctgaggactcattttactcatagtcaatttatcgtagtctctctgaaggaaggaatgtttaacaacgcgaacgtgctgtttaaaacgaagtttgtcgatggagtatcgaccgttgcccgatttacgcagtgtcaaaatggcaagatttcaaaggaagccaagtccaaagccaaaccccctaagggcgcccacgtcgaggtatag

SEQ ID NO: 24517 - DNA, 3594 bp, synthetic construct
  source 1..3594: mol_type = other DNA; note = Synthetic coding sequence
atgcacatcaagagcatcatcctggagggcttcaagagctacgcccagaggacagaagtgaacggcttcgatcccctctttaatgccataacaggcctaaacggttccgggaagtcaaatatcctcgattcaatttgtttcttacttgggatctcaaacttgtctcaggtgcgggcctccaatttacaggatctggtgtacaaaaacggacaggcaggaataaccaaagctagcgttagtattactttcgacaacagtgataagaagcagtcccccttgggcttcgaggtacatgacgagattactgtgacccgccaagtagtgattggcggtcggaacaagtacctcatcaatggggtgaacgccaataatactagagtgcaggatttgttttgctccgtaggcctgaacgtcaataatccccactttctcatcatgcaagggaggatcactaaagttctgaatatgaagcctccggagattctcagtatgatagaagaagcagctgggacacgaatgtacgaatataagaagatcgctgcccagaagacaatcgaaaaaaaggaagccaagttaaaagagatcaagacaatcttagaggaagagattacaccgacaatccaaaaactgaaagaagaacgctcatcttatctggaataccagaaggttatgcgcgagattgaacatctgtcgaggctgtatatcgcataccaatttctgttggccgaagatacaaaagtacggagcgccgaggagcttaaagaaatgcaggataaggtcattaaactgcaggaggagttaagcgagaacgacaaaaagataaaagccctgaatcacgagatcgaggagctcgaaaaacggaaagataaagaaacaggcggcatcctgcgcagtttagaggatgccctcgcagaggcccagcgggttaacaccaaatctcagtcagctttcgaccttaagaagaagaatctggcatgtgaagaaagcaaaagaaaggagctggagaaaaatatggtggaggactcaaagactctcgctgccaaggaaaaggaggtcaagaaaattacggacggcttacacgcactgcaagaggccagcaataaggacgcagaggccctggctgcggcacaacagcacttcaatgctgtgagcgccgggctgtcctcaaatgaagatggtgccgaagccaccttggcaggccagatgatggcctgcaaaaacgatatctccaaagcacaaaccgaagcaaaacaggcccagatgaagttgaaacatgcccagcaagaactgaaaaacaagcaggcggaggtaaaaaagatggactctggctatagaaaggaccaggaagctctggaagcagtgaaacggctcaaagagaagctcgaggcagaaatgaagaaactcaactatgaggagaacaaagaagagtctttgcttgagaaacgcagacagctcagccgcgatataggtcgcttaaaggagacatacgaagctctgctggctcggttccctaaccttcgcttcgcgtacaaggatcccgaaaagaattggaacagaaattgtgtgaaggggctcgttgctagcctgattagcgtaaaggatacttccgccaccacagccctggaactggtagctggcgagaggctgtacaatgtcgtggtagataccgaggttactggcaagaagttgctggagcgtggtgaactgaagcgcaggtacactataattccacttaataaaatatctgcccggtgtattgcccccgagacacttagggtcgcgcaaaatctggtgggaccggacaacgttcacgttgctctctcactcgtggaatacaagcctgagttgcagaaagcaatggagtttgtgttcggcacaaccttcgtctgcgataacatggacaacgctaagaaggtcgcatttgataagagaattatgacccgaaccgttaccctcggcggggatgtgtttgatccccacggaacgctgtctgggggagccaggagccaggccgcctccattcttacaaaattccaggagctgaaggacgtccaggatgagttgagaattaaagaaaacgaactgcgggcactggaggaagagttggccggactaaagaacacggcagagaagtatcgacagttgaagcagcagtgggagatgaagaccgaggaagccgacctgctccaaaccaagctccaacagtctagttaccataaacagcaggaagaactagacgccttgaaaaagaccattgaagaatctgaggagacactaaaaaacaccaaagagatccagcgcaaagccgaggaaaagtatgaggttctggagaataagatgaagaatgccgaagctgagcgcgaacgagagctgaaagacgcccagaagaagctcgactgcgcaaagaccaaggccgacgcgagttccaagaagatgaaggagaaacaacaggaggtggaggctataactctggagttggaagaactcaaaagggagcacacctcctataagcagcaactcgaggccgttaatgaagccataaagtcttacgaatctcaaatcgaagttatggcagcagaagtcgctaaaaacaaggagtcagttaataaagcccaggaggaagtaaccaaacagaaggaggtgattaccgcgcaggatactgtcatcaaggcgaaatacgcagaggtggctaagcacaaggagcagaacaacgattcccagctaaagattaaggaactggatcataacattagcaaacacaagagggaggccgaggacggggctgccaaagtgtcaaagatgcttaaggactatgactggattaatgctgagcgacatctgttcgggcagccaaacagcgcctatgatttcaagaccaacaaccctaaggaagctggacagcggttgcagaagctacaggaaatgaaggagaagttgggcagaaacgtgaatatgcgagccatgaatgtgctcacggaagcagaggagagatacaacgatctcatgaaaaagaagcgcatcgttgagaatgataagagtaaaattctgaccaccatcgaagatcttgaccaaaaaaagaaccaggccctgaacattgcctggcaaaaggtcaacaaggacttcgggagcattttctccactttactgccaggcgcaaatgccatgctcgccccgccagagggacagacagtgttggacggactggaattcaaggtggcactgggtaacacatggaaggagaatttgacagaactctcagggggacaacgctcattggtcgccctcagcctcatcttgtcaatgctcctgttcaaaccagcccctatttatatcctggatgaggtagatgctgctctcgacctgtcacatacccagaatatcggccagatgcttcgaactcatttcactcacagccaatttatcgttgtctccttaaaggagggaatgtttaacaacgctaacgtcctgtttaaaactaaatttgtggatggtgtatctacagtggccagattcacgcaatgccagaatggcaaaatttcaaaggaagcaaagtcaaaagccaagcctcccaagggcgcccatgttgaggtctag

SEQ ID NO: 24518 - DNA, 1047 bp, synthetic construct
  source 1..1047: mol_type = other DNA; note = Synthetic coding sequence
atgagcctgccccggttccagcgggtgaacttcggcccctacgacaattacataccggtgtctgagctctcaaaaaagtcatggaatcagcagcattttgcgctgctgtttcccaagccccagcggcccggcaccaaacgcagatctaaaccttctcaaatccgcgacaacacagtttctattatcgacgaggagcaactgcgcggcgacagacgtcagcccttatggatgtatcgctcattgatgcgaatttccgaacgcccctctgtgtacctagcagcccggagacagcctctcaaaccgacacgcacagtggaagtcgattcgaaggctgcagaaattggcaaaaagggtgaggacaaaacgacacagaaagatacaacggactccgagtcggaactgaaacagggcaaaaaagactccaaaaaaggtaaggacattgagaaaggaaaagaagagaagcttgatgctaagaaagattccaaaaagggaaagaaggacgctgagaaaggcaaggattccgcaactgaatctgaggacgaaaagggtggcgccaaaaaagataacaaaaaagacaaaaaagacagcaataagggtaaggactcagccacagagtccgagggggagaagggggggactgagaaggactccaagaagggaaaaaaagatagcaagaaaggcaaagattccgcaatcgagctacaggctgtcaaagctgacgagaaaaaggatgaagatgggaaaaaggatgccaacaagggagacgaatcgaaagatgccaagaaggatgctaaggagattaaaaaagggaagaaagacaagaagaaacctagctctaccgactcggatagcaaggacgacgttaaaaaggagtctaaaaaagacgcaacaaaagacgcaaagaaagttgccaagaaggacacagaaaaagagtcggccgactccaagaaagacgccaagaagaacgccaaaaaggatgcaaagaaggacgctaagaaaaatgcaaaaaaggatgagaaaaaggatgccaagaagaagggcaaatag

SEQ ID NO: 24519 - DNA, 1515 bp, synthetic construct
  source 1..1515: mol_type = other DNA; note = Synthetic coding sequence
atgaacagccagccccagacccggagccccttcttccagcggccccaaatccagcccccacgtgccaccataccgaactctagcccttccatacgtccgggagcccagacgcctacagctgtttaccaggccaatcaacatattatgatggtcaaccatctgcccatgccctacccagttccccaaggccctcagtattgcattccgcaatacagacattcaggtccaccctacgtgggccccccgcagcagtacccagtgcagccacccgggccgggcccattctaccctgggccgggaccaggggattttcccaatgcatacggtacaccgttctacccttcgcagcctgtgtatcagtccgcgcctattatcgtgcctacccagcaacaaccaccccctgctaagagggagaaaaaaaccatcagaattagagatccaaatcaaggaggtaaggatatcactgaggagattatgtccggagggggcagcagaaatccgacaccacccataggaagacctaccagcacaccaacccccccccaacagctgccctcgcaggtgccggagcattccccagtggtctacggcaccgtagaatccgcacatctggcagctagtactcctgtcactgccgctagcgaccagaaacaggaggagaagcccaaacctgatccggtgttaaagagcccttccccagttctgagattggtactgtcaggcgagaaaaaggagcaggaaggacagacttcagaaacaacggccatcgtgtcaatagcagagctgcctctcccaccctcccctaccaccgtttcttccgtagcaagaagcactattgccgcacctacctcttccgccctttcttctcagcccatttttaccacagctattgacgaccggtgcgagctgtcatcaccaagagaggataccattccaatcccaagtttgaccagctgcaccgaaaccagtgaccccctcccaaccaatgagaatgacgacgacatctgcaagaaaccttgtagcgtggcacctaatgacatcccactcgtttctagtactaacctcataaacgaaatcaatggggtaagcgaaaagctctccgcaacagaaagtattgtggaaatcgtgaaacaggaagtgctccctctgacactcgagcttgagatcctggagaaccctccggaagaaatgaaactcgagtgcatcccagcacctatcaccccaagcaccgtcccctccttcccccccaccccgcccacccccccagccagccccccccacactcccgtgatcgtaccagccgcagccacaactgtgtcatcgcctagtgcggccattacagtgcagcgggttctcgaagaggatgagtccatcagaacttgtttgtcagaggatgccaaggaaatccagaacaagatcgaggtggaagctgacgggcagactgaggaaattttggattcacagaatctcaactcccggcgcagtcctgtgcccgagacctctaatgaatgctag

SEQ ID NO: 24520 - DNA, 744 bp, synthetic construct
  source 1..744: mol_type = other DNA; note = Synthetic coding sequence
atgctgaagttcctggtgtggttcctgcagtggtgcgtgtgcgtgctcgtccagcctgccaaagagcttcttcactgcctcaagatgcaaatgcgcatctcaaaatacacgaagtgcctgcaggcccagattgcaattaccgtgcccaaaacctggaagaaacctaaggatagaacacgtacgacagaggaaatgctagaggccgaactcgagctgaaggccgaagaagagctgagcattgacaaagtactcgagagcgagcaagacaaaatgtcccaggggtttcaccccgagcgggatccttcggacctcaagaaagtgaaggccgtggaggaaaatggagaagaggctgagcctgtgcgcaacggagcggagtccgtgagcgaaggagaggggattgatgctaatagcggatctactgattccagcggggacggagtgactttccccttcaagccagagtcctggaaaccaaccgatacagagggcaaaaagcagtacgacagagaatttctgctcgactttcagtttatgcctgcatgcatccagaagcccgaaggactcccacccattagcgatgtcgtattggataaaattaatcagcccaaactccctatgcgcacactggaccctcgcattctaccccgcggcccggatttcacccctgcttttgcagacttcggcagacagacacccggtggcagaggcgtaccagtgagtgcttcatcactgcagctaacctag

SEQ ID NO: 24521 - DNA, 3918 bp, synthetic construct
  source 1..3918: mol_type = other DNA; note = Synthetic coding sequence
atgaacagccagccccagacccggagccccttcttccagcggccccagattcagcccccccgcgccaccatacccaattcctctccctcaatcaggcccggcgcccaaacccccactgccgtgtaccaagcgaatcagcacatcatgatggtgaatcacctgccaatgccgtatcccgtccctcagggtcctcagtactgcatccctcagtatagacacagtgggccgccgtacgtcggccctcctcagcagtacccagtccagccccccggcccaggccccttttatcccggcccaggtccgggcgatttcccaaacgcttacggcacacccttttacccatcccaacccgtgtatcaaagcgctcccattatcgtcccaacccagcaacaacccccaccggctaagcgggaaaaaaagacaattagaattcgagaccctaatcaaggaggcaaggacatcacggaggaaattatgagcggtggaggcagccgcaatcctacacctcctattggcagacccactagcacccctacgcctccgcagcagttgccatcacaggtgccagaacattctcccgtcgtatacgggactgtggagtctgctcacctagctgcctcaacacccgtcacagctgctagcgaccaaaaacaggctcagattgctatcaccgtcccaaaaacctggaaaaaacctaaggataggactcggaccaccgaggagatgctcgaagctgaacttgagctgaaggcagaggaggaactaagcatcgataaggttctggaatccgaacaagataaaatgtcacaaggctttcatcctgagcgggatccgagcgatctcaagaaggtgaaagcggtggaggagaacggcgaagaggcagaacctgtgcggaacggtgcagaatcggtgtccgagggcgaaggcattgacgcaaactctggctccacggacagctctggcgacggcgtgacttttccattcaagccggaatcctggaaacccacagacacggagggaaagaagcagtacgacagagaattcctgctggacttccaattcatgcccgcctgcattcagaaacccgaaggcctgccacctatcagcgatgtcgtgctggacaaaatcaatcaaccaaagctgcccatgagaaccttggatcccagaattctccctcgagggccagactttacgccggcatttgctgacttcgggagacagacaccagggggccggggagtgccattgttgaacgtgggctcgaggagatcacaacccggacagcgtcgagaacccagaaaaatcattaccgtgtcagttaaggaggatgtgcacttaaaaaaggccgagaacgcttggaaaccttcacagaagagagacagtcaggccgacgaccccgagaatattaagacccaagagttgtttcggaaggttcggagtatcctgaataaactgacaccacagatgttcaatcaactgatgaagcaggtgtcaggtctgacagtggacacggaggagagactcaaaggcgtaattgacctggtgttcgagaaggccatcgacgagccttcctttagcgtcgcatacgccaacatgtgccgatgcttggtgacacttaaggtccctatggcagataaaccagggaacacagtaaatttcaggaaactgctattgaaccgatgccaaaaggagtttgaaaaagacaaagcagacgacgatgtctttgaaaaaaaacagaaagagcttgaggcagctagtgcaccagaagagcgtactcgcttgcacgatgagctggaggaggccaaggataaggcacgaagaaggagtatcggaaatattaagttcataggcgagctttttaaattgaagatgctcaccgaagcaatcatgcacgattgcgtggtaaagctgctgaagaaccatgatgaagagagcctcgagtgcctgtgccgcctcctgaccaccattgggaaggatctggatttcgaaaaggctaagccccgaatggaccagtatttcaaccagatggaaaaaatcgtgaaagagcgcaagacctcttcccgcattcgtttcatgttacaggacgtgatcgatttaaggctgtgcaattgggtctcacgaagggctgaccaaggccctaagaccatcgaacaaatacacaaggaggcaaagatcgaagaacaggaggagcagcggaaagtgcagcaactgatgaccaaggagaagcggcggcctggtgttcagcgcgtggatgagggcggatggaataccgtgcagggcgcaaaaaattctcgcgtactggatccgtctaagttcctgaaaatcaccaaacccaccattgatgagaagatacaactggtgcctaaagctcagctcggcagctggggcaaaggtagcagcggcggagccaaggcatccgaaacggacgccttgaggtcatcagcgtcaagcctgaaccgcttttcagctcttcagcctccagcgccatcgggatctacccctagtactccggtcgaatttgactctaggcgcacgctcacatcacgtgggtcaatggggcgcgaaaaaaatgataagcctctgcctagcgcaaccgctcgccctaacacttttatgcgtggtggctctagcaaggacctactggataaccagagtcaggaggaacaacgtagggagatgttggaaactgtcaaacaactgaccggcggggtggacgtggaaaggaactctactgaggccgaaaggaataagactcgagagtctgccaaaccagagatttccgccatgtcagctcatgataaggctgccctgtcagaagaagagttggagagaaagtcaaagagcatcatagatgagttcttacatataaacgatttcaaggaggcaatgcagtgcgttgaggaattaaatgcccagggactgctgcacgtatttgtgcgggtcggcgtagaatcaacactcgaacgtagtcagattacacgcgatcacatgggccaattactctaccagctagtgcagagcgaaaagttgtccaaacaggacttctttaaggggtttagcgagactctggagttggctgatgatatggctatcgatattccccacatttggctctaccttgccgagctggtgacgcccatgctgaaagaaggcggcatttctatgcgggagctgactatcgaattttcaaagcctctgctaccagttggtcgggccggcgtgctgctctccgaaatcctgcatcttctgtgcaaacaaatgtcacacaaaaaagtgggtgcactatggcgggaggctgacctgtcatggaaggatttccttcccgaaggcgaagatgtacataattttctgctagaacagaagcttgacttcatcgaatcggactccccgtgttcttcagaggcgctttccaaaaaggagctttctgccgaggagctctataagaggctggagaagttgatcatcgaggataaggcaaatgatgaacagattttcgactgggtagaagccaatctggatgagatacaaatgtcatcacccaccttcttgcgcgccctcatgaccgccgtgtgcaaggccgcaattattgcggatagctcgacattccgggttgacaccgccgtgattaagcaaagagtgcccatccttctgaaatatctggacagcgacacagagaaggagctccaggccctgtatgcactccaggcttccatcgtcaaactggatcagcccgctaatcttctacgcatgttcttcgattgcttgtatgatgaggaggtgatctcagaagatgccttctataagtgggaatcatctaaggacccagccgagcagaacggaaagggcgtggccttaaaaagtgtaacagcgttctttacttggttgcgggaagccgaggaagaatccgaagacaattag

SEQ ID NO: 24522 - DNA, 4776 bp, synthetic construct
  source 1..4776: mol_type = other DNA; note = Synthetic coding sequence
atgaacagccagccccagacccggagccccggcggcttccggcccattcagttctttcaaagaccccagatccaacccccaagagctaccatccctaactcctccccatccatccggccgggtgcccagaccccgaccgccgtgtatcaggctaaccaacatattatgatggtcaaccacctacctatgccgtatccggtgccacaggggccccagtactgtatcccacaatacagacactcgggacctccttacgtcgggcccccccagcaataccctgtgcagccaccgggccctggacccttctaccccggtcccggtcccggtgactttccaaatgcatatgggactccattctacccttcacagcccgtttatcagtccgcccccatcatcgttccaacccaacagcagccccctccagctaagcgcgagaaaaagacaattagaatacgcgacccaaaccagggggggaaggatattaccgaggagattatgagcggagggggtagcagaaatccaaccccccccatcgggcgccccacaagcacaccgacccccccccagctcccatcacaagtgccagagcacagcccagtcgtatatggcacggtggagagcgcccacttagccgcctccaccccagtcactgccgccagtgaccaaaagcaagaagagaagcctaaacccgatcccgtcctgaagagcccgtctcccgtgctccgactcgtgctctccggggagaaaaaggagcaggagggacagacatctgagaccacggccattgtgtccattgccgaactcccgctgccaccctctccaacaacagtgtcatccgtcgctaggtctaccattgctgccccaacctctagtgctctgtcatcccagcccatcttcaccacggcgatcgatgaccggtgtgaactgtcctcccccagagaggatactattccaatcccatcgctgacctcatgtaccgagaccagcgaccccttaccgacaaatgagaatgacgacgacatttgtaaaaaaccctgttccgtagctcctaatgatattcccctcgtgtccagtacaaacctcattaacgagattaacggcgtctcagaaaagctcagtgctacagagtctattgttgagatcgtgaaacaagaggtgcttccacttacgttagagctggagattctggagaaccccccagaagagatgaagcttgagtgtattcctgcaccaattacaccttcaactgttccctcttttcccccaaccccccccaccccgccagcctccccaccccataccccagttatcgtgcccgccgctgccacgactgtgtcttccccttctgctgcgataaccgtgcaacgtgtgctcgaagaggacgaaagcatccgcacatgcctgagcgaagatgctaaggaaatccagaacaaaattgaagtcgaggccgatggacagaccgaagagatactagattcgcagaacctgaactctcggagaagccctgtgccagctcagatcgcaatcacagttcctaaaacatggaagaagcccaaggacaggaccaggacgacagaggagatgctcgaagcggagctggaactgaaagcggaagaagagctgagtatcgataaagtgctcgaatccgagcaagataaaatgtcacaaggattccatccagaaagggatccatccgatctgaagaaagtgaaagccgtcgaagagaatggagaggaggccgaacccgttcgtaacggagccgagagcgtgagcgagggagaaggaattgacgccaactcagggagcactgatagcagtggggacggcgtgaccttcccctttaaacctgagtcgtggaagccaacggatacggaaggcaagaaacaatacgacagagagttcctgctggattttcagtttatgcctgcatgtattcagaagcccgaagggctgccccctatttcagacgttgtcctggacaagataaaccaacctaagctcccaatgcgcacacttgacccgcgaatcctgcccagggggcctgatttcacacccgctttcgccgattttgggaggcagacgcctggtggccgcggagtgcccctgcttaatgtggggtcacgcagatctcagcctggccagagacgagagccacgcaagattattacagtgagtgtcaaggaggacgtgcacttaaagaaggcagaaaacgcctggaagccaagtcaaaagagagatagccaggcggacgacccagaaaatataaagactcaggagttattccggaaggtgcgctccatcttgaataagctcaccccacagatgtttaatcaattgatgaagcaagtcagcggtctgacagtggacacggaagagcgcctgaagggcgtgatcgatcttgtcttcgaaaaagccatcgacgagccttcgttttcagttgcctatgccaacatgtgtaggtgtcttgttaccctcaaggtgcctatggcagacaaacccggtaacacggtcaatttccgcaagctgttgctgaatcgctgtcagaaggagtttgagaaggataaggcggacgatgacgtgtttgagaaaaagcagaaggaactagaagctgcctctgcccctgaagagaggacccgcctgcatgacgagctggaagaggccaaggacaaggccagaagaagaagcatcggaaacatcaaattcatcggagagctcttcaagctgaaaatgctgaccgaggctataatgcatgattgcgtggtgaaactgttgaaaaaccatgatgaagagtcgctggagtgtctgtgccggctcttaaccacaattggcaaagacctggactttgaaaaagctaagccaaggatggaccagtatttcaatcagatggaaaaaattgtgaaagagaggaagacaagctcaaggataaggtttatgctccaagatgttatcgacctgcggttatgtaattgggtgtctaggcgcgccgaccagggacccaaaaccattgaacaaatccataaagaagcaaagatagaagagcaggaggagcagcgcaaggttcaacagctaatgacaaaggagaaacggcgtccaggggtccaacgggtcgacgaaggcgggtggaacaccgtacagggggcaaagaactcaagggttctggaccccagcaagttcttaaaaattacgaaacctaccatcgacgaaaaaatacagcttgttcccaaagcacaactaggctcttgggggaaggggtctagcggtggagccaaagcctccgagacagatgccctccgttcaagtgcctcatcactcaatcgcttcagcgccctgcagccaccagccccgagcgggagcacccctagtacaccggtcgaattcgatagcagacgaactctcacaagcagagggtctatggggcgcgaaaagaatgacaaacccctgccttcagctacggctagacctaatacattcatgagaggcggctccagcaaagacctcctggataatcagtcacaggaagaacagcgccgggaaatgctcgagacagtcaagcagctgactggtggagtggatgtcgagcgaaattcaacggaggccgagcggaataagacacgtgagtctgcgaaaccggaaatctccgcaatgtcggcccacgataaagcagctttatctgaggaggagctggagagaaagtcgaaaagcataattgatgagttcctgcatataaacgactttaaggaggctatgcagtgtgttgaggaattgaacgcacaggggcttctccacgttttcgtgcgtgttggggtggagtcaaccttggaaaggtcgcaaattactcgcgaccatatgggccagttactttatcagctggttcagtccgaaaagctgtcgaaacaggacttctttaaaggattcagcgagaccttggaacttgccgatgatatggccatagatattccccacatttggctgtatctagccgaattagtgaccccgatgttgaaagagggcggcatctccatgagagaactgactattgagtttagtaagcctctgctgcctgtgggtcgcgctggcgtcctgttatctgaaattctgcatctcctctgcaaacagatgagtcacaaaaaagttggagctctgtggcgtgaggccgatctttcgtggaaggactttctgcctgagggagaagacgtgcacaactttttactggaacaaaaactggattttatcgaatcagactcaccctgtagctccgaggctctatcaaagaaagaactgagtgctgaggaactttacaagcgactggagaaattgataattgaagacaaggcaaacgatgagcaaatctttgattgggtggaggccaacttagacgagattcagatgtcctcaccgacattcttgagagccctgatgaccgctgtctgcaaagccgctataatcgcggacagcagcactttccgtgtggacacagccgtcattaagcaaagagtccccattctgttgaaatatctggacagcgatacagaaaaagaactgcaagccctgtatgcactgcaagccagtattgtgaagctggaccaaccggccaacctcttgcgcatgtttttcgattgcctgtacgatgaggaagtcatctccgaggatgccttctataagtgggagtcaagcaaggatcccgccgagcagaatggaaagggagtggccctcaagagtgtgacggctttttttacatggctgagagaggctgaggaagaaagcgaggacaattag

SEQ ID NO: 24523 - DNA, 1002 bp, synthetic construct
  source 1..1002: mol_type = other DNA; note = Synthetic coding sequence
atgagcggcgacgagatgatcttcgaccccaccatgagcaagaagaaaaagaagaaaaagaagccatttatgctcgatgaggagggagacacccagaccgaagaaacccagccctcagaaacaaaagaggtggagcccgagcccaccgaggataaggatcttgaggccgacgaggaagacacacgaaaaaaagacgcctccgacgatctggatgaccttaatttctttaaccaaaagaagaagaaaaagaaaaccaagaagatctttgacatcgacgaggccgaggagggggtaaaagacctgaaaatcgagagtgacgtgcaggaaccgactgaaccagaggatgacctagatatcatgctgggcaataagaagaagaaaaaaaaaaatgtcaaatttccagatgaagacgaaatacttgagaaggatgaggctcttgaggatgaagacaacaagaaggacgacgggatctctttttccaaccaaaccgggcccgcctgggcagggtccgagagggattacacatacgaggaactcctcaacagagtcttcaacatcatgcgtgagaaaaatcctgacatggtggccggagaaaagcgcaagttcgtcatgaaaccccctcaggtggtgagggtgggaactaaaaaaacatcctttgtgaactttactgacatctgtaaactactacatcgccagcccaagcatctgctggccttcttgttggctgagttaggaacaagcggaagcattgatggaaacaatcagctcgtgattaaggggcgatttcagcagaagcaaatcgagaacgtgttgcgcaggtacatcaaggagtacgtcacttgccacacctgtaggtctccagacaccatactccagaaagacactagactttacttcctccagtgcgagacatgccactcaagatgctctgttgcttctatcaagacagggtttcaggctgtgacaggtaagcgagcccagttgagggctaaagcaaattag

SEQ ID NO: 24524 - DNA, 2619 bp, synthetic construct
  source 1..2619: mol_type = other DNA; note = Synthetic coding sequence
atgggcgagggcggcctgccccccgccttccagctgctgctgcgggcatgcgaccaaggcgatactgagactgcccggcggctgcttgaacccggtgcagccgagcccgccgaaagaggggccgaaccagaggccggagcggaaccagccggcgctgaagttgccgggcccggggctgcagccgccggcgcagtgggggcgcctgtgcccgtggattgctctgacgaggccggaaatactgccctgcagttcgcagccgctggcgggcatgagccactggtccgcttcctgctgcgccgtggggcttccgttaatagcagaaatcattacggctggagcgccctcatgcaggccgcacggtttggccacgtgtcggtcgctcatttactgctggaccacggcgctgacgtcaatgcacagaaccggctaggagctagcgtccttactgtggcctctaggggaggccatttgggcgtggtcaaactgctccttgaagccggagccttcgtcgaccaccatcaccccagtggcgaacagttaggactggggggcagcagggacgagccactggacatcaccgccctgatggccgcaattcagcacggccacgaggccgtagtcagactgttaatggaatggggggccgatcctaatcacgccgccaggaccgtcggatggtccccactcatgctcgctgctctgactggccgcctgggagtggcgcagcaactagtcgaaaagggggccaacccggaccacctttctgttctggaaaagactgctttcgaagtcgctcttgattgcaaacaccgcgaccttgtggactacctggaccccctcacaacagtgaggcctaagaccgacgaagaaaagaggcggcccgatatttttcacgccctaaagatggggaacttccaattagttaaggagattgcggatgaagatccatctcacgtcaatttggtaaacggagacggcgctacccccctgatgcttgctgcagtcaccgggcagctagccctggttcagctgctcgtggagcggcacgctgatgtggacaagcaggattcagtgcatgggtggacagctcttatgcaggccacatatcatggcaacaaagaaattgtgaagtacctgctcaaccagggggcagacgtaacactccgtgcaaaaaatggatacacagcctttgacctcgttatgttactgaacgaccccgacactgagctggttagactgctcgcttctgtctgtatgcaggtcaacaaggataagggtagaccgtctcaccagcctcccctgccccatagcaaagtgcgccagccgtggtctatacccgtgttgccagacgataaaggcggactgaaatcttggtggaatcgaatgtccaaccgttttaggaaactgaagttaatgcaaacactacctagaggactctcaagtaatcagcctctgccattttctgatgagccagagcctgctcttgactctaccatgcgggcagctccccaagataaaacatcccgatcagcgctaccagatgctgcgccagtcaccaaggataatgggccggggagcactaggggggaaaaggaggacacactgctgacaactatgttacggaacggagccccactcacccgcttaccgagcgacaaactcaaagcagtaataccacccttcctgccgccctcaagtttcgagctttggtccagcgatcggagccgcacgcgccacaacggaaaagcagatcccatgaagacggcactacctcagcgggccagtcggggccaccccgtcggaggcgggggcaccgatacaacgccggtgcgccctgtgaagttcccctcactgcctcgcagcccagctagcagtgctaattcaggcaactttaaccacagtcctcatagctccggcggttctagcggggtgggcgtgagtcggcacggtggagaattgctcaatagaagcggcggctcaattgataatgttcttagccagattgcagctcaaagaaagaaagcggcggggctgctggaacagaaaccaagccaccgatctagccctgtgggcccagcccccggatcctcccctagcgagttgcctgccagcccagcagggggctcagcccccgtggggaagcagaaactggaaacgtcaaagcggcccccatctggtacgagtaccaccagcaaatctacaagtccaacactcacccccagcccctctcctaaaggtcataccgccgagtcttcagtttcgtcctcgagctcccaccgccagagtaagtcaagcgggggttctagttcgggtaccattaccgacgaagacgaactcacagggatactgaaaaaactatcactggagaaataccagccaatatttgaggagcaagaggtggacatggaggcattcctcactctcacagacggcgatcttaaagagctgggcattaaaactgatgggtcgcggcaacagatattggcggcgatctccgaactgaacgcaggcaagggtagggagcggcagattctgcaggagacaattcacaactttcacagctccttcgagtcgtcagcctcaaacacccgagcaccgggcaactcaccgtgcgcctag

SEQ ID NO: 24525 - DNA, 483 bp, synthetic construct
  source 1..483: mol_type = other DNA; note = Synthetic coding sequence
atggaggccgagcggccccaggaggaggaggacggcgagcagggcccccctcaagacgaagaggggtggccccctcctaattccaccaccaggccttggcggagcgcccctccatctccaccgcccccaggcaccagacataccgcactcgggccccggtccgcaagtctattgtcgctgcagacagagctgctgctggatctcgtagcggaggctcagtcccggaggctggaggagcagcgcgccacgttctataccccccaaaacccttctagcctcgcgcccgccccccttcgtcctcttgaggacagggagcagttgtacagtaccatcctctcccatcagtgccagcgcatggaggcacagagaagtgagcctcccctgcctccaggggggcaggaactgttagagcttctgctccgagtccagggcggggggcgcatggaggagcagcgaagtcgcccaccgacccacacgtgttag

SEQ ID NO: 24526 - DNA, 483 bp, synthetic construct
  source 1..483: mol_type = other DNA; note = Synthetic coding sequence
atggaggccgagcggccccaggaggaggaggacggcgagcagggcccccctcaggacgaggagggctggccccctcctaactctacaacccgaccctggcggagcgcccctccttctccacctcctcccgggacacgtcacacagctctgggacctcgctccgcttccctgctgagtctgcagacggaattactcctagacctggtggcagaagctcaaagcaggaggcttgaagaacaaagagctactttttataccccacagaatcctagctctctggcccccgcacccctccgcccactcgaggatagagaacagctttacagcacaatcctctctcaccagtgccaaaggatggaggcccaaaggtcagagccaccgctaccaccaggcgggcaggaactgctggagctgctcttacgcgtgcaggggggtggaaggatggaggagcagaggtcaaggccaccgacgcacacatgctag

SEQ ID NO: 24527 - DNA, 2790 bp, synthetic construct
  source 1..2790: mol_type = other DNA; note = Synthetic coding sequence
atgcagggcctgcccgacccccccagccagcggggcatcatcccccgggcctttgagcacgtattcgagtctgtgcaatgtgctgagaacacaaagtttctcgtccgggcgtcatacctggaaatctataacgaagatgttagagatctgttgggagcagataccaagcaaaaactggaactcaaagaacatccagaaaaaggagtctatgtgaaggggctcagcatgcatactgtgcactctgtagcacaatgcgaacacatcatggagactggctggaaaaaccgctcagtgggttataccctgatgaacaaagacagtagtagatcccactctatcttcactatttcaatcgagatgtctgcggtggacgagcggggaaaagatcatcttcgagcgggcaagctgaatctggtggatctcgccggaagtgagcgccaatctaagactggcgcaaccggcgaaaggctcaaggaagccactaagataaatctgtccttgtccgcgctgggtaacgtcatcagtgctctggttgacgggagatgcaagcacgtaccatacagagacagcaaactgacccgtcttctacaggattctctaggagggaatacgaaaaccctcatggtagcctgtctctcacctgccgataacaactatgacgagacattgtccacactgaggtatgccaaccgagccaaaaacattcgcaacaagccccggattaacgaagatccaaaagatgcattactgagggagtatcaggaagaaataaaaaaacttaaagctatcctgacccagcagatgagtccttcgtccctgtctgccttgctgtcacggcaagttcccccagaccctgtgcaagtcgaggagaaactgcttccacagccagtgatccagcacgatgtagaggcagaaaagcaactgatccgggaagagtatgaagagagactggcccgcctcaaagccgactataaagcagaacaggaatctcgtgcgagactggaagaagacatcacagcaatgcgcaatagctacgatgtgcgtttgtcaacactggaggaaaacctgcggaaggaaaccgaggccgttttgcaagtgggcgtattgtacaaagccgaggtcatgagtcgggccgaattcgctagcagtgcagagtatccccccgcctttcaatacgagaccgtcgttaagcccaaggtcttctccactaccgacaccctgccgtccgacgatgtttctaaaacacaggtgtctagtaggttcgcagagttacccaaggtggagccatctaagtcagaaatttccctcggatcttcggagtcaagcagtctggaggagaccagtgtctctgaggcattcccggggcccgaagagccttcaaacgtagaggttagtatgcccacggaggagtctagatctcgctacttcttggatgaatgcctaggtcaggaggccgccggtcatctcctgggagagcagaactaccttccccaggaggaacctcaggaagtaccactacagggactgctcggtttacaggatccattcgccgaagtcgaggctaaactggcccggttatcttctacagtggccagaaccgatgccccccaagctgacgtcccaaaggtccctgtgcaagtacctgctcccacagaccttcttgaaccctccgacgctaggccggaggctgaggcagctgatgacttcccacctcggccggaggttgacttggcctccgaggtggccctcgaggttgtgagaactgctgaacctggtgtatggttagaagcccaagctcctgtcgccctggtggcccaaccagagcctcttcctgctacagcaggggtgaaacgggaatcagtggggatggaggttgccgtcctcacagatgacccactgcccgtcgtggatcaacagcaggtactagctagactccagctcctcgagcagcaggtcgtcggaggagagcaggctaagaataaagacctgaaagaaaagcataagcggaggaaacggtacgccgatgagcggagaaagcagctggtggccgcgcttcagaatagtgacgaagactccggcgattgggtactactgaacgtgtacgacagcatacaggaagaagtgagggccaagagtaaactgctggaaaagatgcaacgtaagcttagagccgctgaggtggaaatcaaggacctgcaatccgagttccagttggagaagatagattatctggccacaatccgtcgtcaagaaagagattccatgttgctccagcagctgctggagcaggtccagcctttaattcgcagagactgtaactacagcaatctggagaaaatcctgcgagagtcatgttgggacgaggacaatggcttttggaaaatccctcaccctgtgatcacaaaaacctccctgcccgtggccgtctcaaccgggccccagaacaagcctgcccggaaaacaagcgcagccgataatggcgagccaaatatggaggacgatagatatcgacttatgctcagtcggtcaaatagtgaaaatatcgcttcgaattactttcgaagcaaaagagctagccagatactcagtaccgatgccaggaagtccctaacccaccataacagcccccctggcctttcctgtccactctccaataattctgccataccccccacgcaggcaccggaaatgccccaaccgcgtccctttagacttgagtcattggatattcccttcacaaaagccaagcgtaaaaagtcaaaatcaaatttcggttctgagcctctgtag

SEQ ID NO: 24528 - DNA, 426 bp, synthetic construct
  source 1..426: mol_type = other DNA; note = Synthetic coding sequence
atgaacaagcacgtgctgaagatccagaaggagctggaggaggccaaggaaaaactggcgaggcagcataagcgccgaagtgatgacgacgaccgatcgtcggatcgtaaagacggcgtcctcgaagagcagatcgagcggcttcaggagaaggtggaaagtgctcagagtgagcaaaaaaacctgttcctcgtgattttccagagatttattatgatactaacggaacatttagtccgatgtgaaacagacggaacttctgttctcactccttggtataaaaattgcattgaacggctccagcagattttccttcaggtgtgcggtgaacttcggctgggcaacaacaccattctgtcccacaaagacttttctctgaagaagatacttgtgaaattcgtcagacggttgtactccacctgctag

SEQ ID NO: 24529 - DNA, 2373 bp, synthetic construct
  source 1..2373: mol_type = other DNA; note = Synthetic coding sequence
atgagccggcggcggcacagcgacgagaacgacggcggccagccccacaaacgcagaaaaacgtccgatgctaacgagaccgaggaccatcttgaaagcctcatctgcaaggttggagaaaaatcagcttgctcccttgagtcaaacctggagggtcttgccggagtcctagaggctgaccttcctaactacaaatcaaaaatactccgcctcctttgcaccgtggcgaggctgctccccgaaaagttgacgatctacactacactggtgggcctgctgaatgcgcgcaactacaatttcggcggagagttcgtggaagcaatgatccgccagcttaaagagtccctgaaggccaacaattataatgaagccgtttatttagtgagatttctgagcgaccttgtgaactgtcatgtcatagcagccccatcaatggtggccatgttcgagaacttcgttagcgttacacaggaggaggacgtgcctcaagtgcggagagactggtatgtatacgctttcctttcttctctgccttgggtggggaaggagctttatgaaaaaaaggatgctgagatggataggatctttgccaatacagagagctatttaaaacggcgccaaaaaactcatgttcccatgcttcaggtgtggacagccgacaagccccatccccaggaagagtacctagactgtctctgggcccaaattcagaaacttaagaaagaccggtggcaagagcgacacatcctcagaccttaccttgcattcgatagcattctctgcgaggcattgcaacataacctccctcccttcacaccaccaccccacaccgaagatagcgtgtatcctatgcctagggttatatttaggatgttcgattatacagacgatcctgagggacccgtaatgcctggcagccactccgtcgagaggttcgtgattgaagaaaaccttcactgcataattaagagccactggaaagagcgcaagacatgtgctgcacagctggtcagctacccgggaaagaacaaaatccctctgaactatcacatcgtggaggtgatatttgcggaactcttccagttaccggctcccccccacattgacgtcatgtacactacccttctgattgaattgtgtaagttgcagcccggcagtctcccccaagtgcttgcacaggcaacagagatgttgtatatgaggttggataccatgaatacaacatgtgtggacagattcatcaactggtttagccaccatctctccaatttccagttccgatggtcttgggaggactggagcgactgcctgagtcaggaccccgaaagtcctaagcccaagttcgtccgtgaagtcctcgaaaaatgcatgcgtctttcctatcaccagcgaattttagacatcgtgccgccaacgttttcagccctgtgtcctgcaaatccaacttgcatctataagtacggcgatgaatcttcgaatagcctgcctggacactcagtggctctgtgcctagccgtggctttcaaatctaaagctaccaatgatgagattttctcaatattaaaagacgtccccaacccaaatcaggatgacgacgatgatgagggattcagctttaatcccctcaagattgaagtttttgtacagacgctgcttcaccttgccgctaaatcgttctctcattcattctctgccctcgcgaaatttcacgaggtctttaaaacactggccgaatcagatgagggaaaattacacgtcctcagggttatgttcgaggtctggcgcaatcacccacagatgatcgctgtgctggttgacaagatgatccggacccaaatcgtcgattgtgcggcagtggccaactggatcttctcatctgaactgagcagggattttactaggctgttcgtctgggagatcctccactcaaccatacgcaagatgaataaacacgtccttaagattcaaaaggagctggaagaggcaaaggaaaagctggccagacagcataaaaggaggagcgacgacgacgaccgcagctcggaccgaaaggatggagtgctggaggagcagattgagcgtctgcaggaaaaggtcgaatccgctcagtcagagcagaaaaacttgttcttggtgatcttccagcggttcataatgatcttgacagagcacctggtgaggtgtgagactgatgggacgtctgttcttacaccatggtacaaaaactgtatagaacggctccagcagatcttcctccagcatcatcagatcatacagcaatacatggtgacgctggagaatcttctgttcactgcagaactggacccacatattctcgctgttttccaacagttctgcgccctgcaggcatag

SEQ ID NO: 24530 - DNA, 699 bp, synthetic construct
  source 1..699: mol_type = other DNA; note = Synthetic coding sequence
atgagccaggtgctgagcatcctgggcatgcacaccctgatgagcaaccagcagtattaccaggctctgtctagctcaagcataatgaataaagagggtctgaactccgtgattaaacctacccagtataagccggtcccggacgaggagcctaatagtacagacgttgaggagaccctggagcgcatcaaaaataatgatcccaaactggaagaggtgaacttgaacaatatcaggaacattcccatcccaacattgaaagcttatgccgaggcccttaaggagaactcctacgtgaaaaaattttccattgtggggacccgctccaatgaccctgtcgcatacgccctggctgagatgctgaaggaaaataaggtgctcaaaacacttaacgtcgagagcaattttatatcaggggcaggtatcttaagactggtggaagcacttccctataatacttcacttgtcgagatgaaaattgataatcagagccaacctcttgggaataaggtggaaatggagatagtaagtatgctggagaagaacgctaccctcctgaagtttgggtatcacttcacccaacagggaccacgtctccgagcttccaatgctatgatgaacaataacgatttggtgcggaagagaaggctggccgatctgaccggccccatcatcccaaagtgccgaagtggcgtgtag

SEQ ID NO: 24531 - DNA, 2403 bp, synthetic construct
  source 1..2403: mol_type = other DNA; note = Synthetic coding sequence
atgagcagcctgggcgccagcttcgtgcagatcaagttcgacgacctgcagttctttgaaaactgtggtggcggatcgttcggcagtgtttatcgggctaagtggatctcccaggacaaagaggtagccgtcaagaagctcctaaagattgaaaaggaagccgagattctatcggtactgtcgcacagaaatattattcagttttacggcgtgatcttagaacctccaaactacggcatagtgaccgaatacgcctccctgggaagcctatacgactacatcaattctaatagaagcgaggagatggacatggaccacatcatgacttgggccaccgacgtggctaaaggtatgcattatctgcacatggaggcccccgtaaaggtgattcaccgtgacttaaagtcacggaacgtagtcatagctgcggatggagtgctgaaaatttgcgacttcggcgcatcccgatttcacaaccacactactcatatgtcacttgtggggacgtttccctggatggccccagaagttatccaatcgctacctgtgtcagagacatgtgacacctactcatatggggttgtcctgtgggaaatgctcactagggaggttccattcaagggtctggaggggctccaggtggcttggctcgtggtggagaaaaacgaacggctcacgataccaagctcctgtccccggtccttcgcagagcttcttcaccagtgttgggaagccgacgctaagaaacgccccagtttcaaacagattatcagcatcctggagtctatgagtaatgataccagcctgcctgacaagtgtaattcctttctgcacaacaaggccgagtggaggtgtgaaatcgaggccactctagagcgcctgaagaagttggaaagagacctgagctttaaggagcaagaattgaaggagcgagagagacgactgaaaatgtgggagcagaaactgacggagcagtctaacactccactgcttccgtccttcgagatcggcgcttggacagaggatgacgtttattgctgggtccagcagcttgttaggaagggcgattcctctgctgagatgtctgtgtacgccagcttatttaaggagaacaacattacaggcaaaaggttgctgctgctggaggaggaggatttgaaggatatgggcatcgtgtccaaggggcacattatccactttaagtccgcaattgagaagctgactcacgattacatcaatctgtttcactttccaccactgataaaggacagcggcggggagcctgaggagaatgaagagaagatagttaatctggaacttgtgtttggtttccaccttaaacctggaacgggacctcaggactgcaagtggaaaatgtacatggaaatggacggcgatgagattgccataacatacattaaggacgtgactttcaacacaaatttgccggatgctgagatcctgaagatgactaagcctcctttcgttatggaaaaatggatagtgggcattgccaaatctcagaccgtggagtgcaccgttacttacgaatccgatgtgagaaccccaaagagcaccaaacacgttcatagtattcagtggagcaggaccaagccacaggatgaagtgaaagcggttcagctagccatccagaccctgttcacaaattcagatggaaacccgggcagccgaagtgactcatcggctgactgtcaatggctggataccctgaggatgcgtcagatcgcctcaaatacgagcctgcagcggtcgcaatccaacccgatcctgggttccccctttttttcccacttcgatgggcaggattcttacgctgccgcggtgaggagaccccaagttccaatcaaataccagcagatcacaccggtcaaccagtctcggtcaagctctcccacgcagtatggactcacgaagaatttctccagcctgcacctgaacagccgggactccggctttagcagtgggaacacagatacatctagtgagcggggtcgctattcggaccgcagcagaaacaagtacggcagagggtcaattagtctaaactcatcgccacggggtaggtactcggggaaatctcagcactcgacacctagtagaggccgctatcctggcaaattctaccgggtttcacagtctgccctgaaccctcatcagtcacccgattttaaacgctcccctcgcgatctgcaccagccgaataccattcctggcatgcccctgcaccccgagactgatagtcgggcatctgaagaggacagcaaagtctctgaaggagggtggactaaggtcgaatacagaaaaaaaccacatagacctagtcccgccaagactaataaggaacgcgctaggggtgatcaccggggatggcggaacttctag

SEQ ID NO: 24532 - DNA, 1071 bp, synthetic construct
  source 1..1071: mol_type = other DNA; note = Synthetic coding sequence
atgcggcggttcctgcggcccggccacgaccccgtgcgggagcggcttaagcgagatctgtttcagtttaacaagacggtagagcatggctttcctcaccagcccagtgccctcggctacagccctagtctacgaatcctcgcaataggcacacggagcggcgcaattaaactctatggcgcgcccggggtggagttcatgggattacaccaggaaaacaacgccgtgacccagatccatttgcttcccgggcaatgtcagctggttacactgctggacgataactcactgcacttgtggagcttaaaagtgaagggcggcgcaagcgagctgcaggaagacgagtcatttacccttcgcggacccccaggcgctgccccttccgccacgcagatcaccgtcgttctgccacactctagctgtgaactcctatacctgggcaccgaaagcgggaatgtcttcgtagttcaacttcccgcttttagggctctggaggacagaacaatcagctccgacgctgtcttgcagcggttgcccgaggaagccagacaccgacgggtttttgagatggtggaggctctgcaagaacatcctcgggatcccaatcagatcttgattggttatagcagaggcttagtggtgatttgggatctacaaggcagccgagttctgtatcactttctgtcctcacagcagctggagaatatctggtggcagagagatggtagactgcttgtttcatgccacagcgatggctcttattgtcagtggcctgtctccagcgaagcccaacaacccgagcccctccggtccttggtgccttatggcccattcccatgtaaagcaattacaagaattctctggctcaccactagacaggggcttccctttacaatttttcagggagggatgcctcgagcctcatacggggatagacattgtatttccgtgatacacgacggacagcaaaccgccttcgactttaccagccgagtcattgggtttacagtgcttaccgaggcggaccctgccgctagtcggcgggcctccggtgtaggcgctcaggggtag

SEQ ID NO: 24533 - DNA, 2526 bp, synthetic construct
  source 1..2526: mol_type = other DNA; note = Synthetic coding sequence
atgggcgcccgggccgccggcaccagcagcggcggcggcccccggccttgcctggccagggggctgtctgccagcccgttcccagccaaacagcagcatccgcaggccggggcctcgcccgccgagctgcagcagcgcgcatattacagagcccgacaggatgctgcatcccagccagggctgggcttcctgatttccccctcaagttgttcctcctgggggccagggtcatttacaaggtcgtgtggttatcctactctctgcagttcatggatcagtaaaagggagccaggggaactctctggcgtgtggacgagcgcttggcgaacccacgccgctttcacaggatcccaggacctgtgtctgtacaaaggtctcgggtctatatacgaagacaaaactgcattgagcctactcggattaggtgaagaaacgaatgaggaagacgaagaagagtctgataatcagagtgtgcatagctccagtgaacccttgcggaacctccatttggacatcggtgccctgggcggggattttgagtacgaggagtccctgcgcacaagccagcctgaagaaaagaaggacgtcagcctcgattccgacgctgctggcccgcccaccccctgcaagcccagctctcctggggcggactcgtctctgtcttccgccgtggggaagggtcgccagggctcaggtgctcgtccaggcctgccagaaaaagaagagaacgagaaaagcgaaccaaaaatctgtaggaacctggtgacccccaaagccgaccccaccggctctgagcctgccaaagcgtctgagaaagaggccccggaagatactgtggacgccggcgaagaagggagtcgaagagaggaagccgccaaggagcctaaaaaaaaagcctctgcactagaggagggcagcagcgatgctagtcaggaactggagatcagcgagcacatgaaggagccccagctctccgacagcatcgcctccgatcctaagtccttccacggcttagattttggatttcgaagccgaattagcgaacatcttcttgacgtggacgtgctaagcccagtgttgggaggagcatgtcggcaggcacagcaaccgctgggaatcgaggataaggacgatagccagagtagtcaggatgaactccagtctaaacagtctaaaggactggaagagcgctatcaccggctgtcaccgccactgccccatgaagaacgggcacagagtcctcctcggagcctcgctactgaggaggaaccacctcagggtccagagggtcagcccgagtggaaggaagcagaggagctgggggaagattccgccgcttctttaagcctgcaactaagtttacaacgcaggtcaacagaacccgttgctcctcctgaacaactgtcagaggctgcattgaaggcgatggaggaggccgtggcgcaagttcttgagcaggaccagcgacatcttctggagagcaaacaggaaaagatgcagcaactaagggaaaagctatgtcaggaagaagaagaggaaatcctgaggctgcatcagcaaaaagaacagtccctgtcttccctgagagagagactgcagaaagcaatagaggaagaggaagcccgcatgcgagaagaggaaagccagcgcctttcttggctccgcgcacaggtacagagtagtactcaggctgatgaggatcagatccgcgccgagcaggaggccagcctacagaaactccgggaagaactcgaatcacagcagaaagctgaaagagccagcttggaacaaaagaatcgccagatgctcgaacagctcaaggaggaaatcgaggcttctgaaaaaagcgaacaggcggcactgaacgccgccaaggagaaggcactccagcagctcagagagcagctcgaaggagaaaggaaagaggccgtcgcaaccctggagaaagagcactcagcagagctggagagactatgcagcagcctcgaggctaagcatcgagaagtagtatccagcctgcagaagaagatccaggaggcccaacaaaaagaagaggcacagctgcaaaagtgtctagggcaggtggaacatagggttcaccagaagagttaccatgtggctggttacgagcatgaactgtcttccctcctgcgcgaaaagcggcaagaagttgaaggcgagcacgagcgtcgcctggataaaatgaaagaggaacatcaacaggttatggcaaaagcccgggaacagtatgaggccgaagagaggaagcaacgcgccgagctgctaggacacctgaccggcgagctggagcgtctgcagagggctcacgagcgggagctggaaaccgttcgccaggagcagcacaagcgattggaagacttgaggcgacgtcaccgtgagcaggaacgcaaacttcaggacctcgagttggacttggagaccagggccaaggatgttaaggcaaggctggccctgctggaagtacaagtccgcgacctccaagaatcccttacgtctgaaagttag

SEQ ID NO: 24534 - DNA, 1053 bp, synthetic construct
  source 1..1053: mol_type = other DNA; note = Synthetic coding sequence
atgatccggggcttcgaggcccccatggccgagaaccccccccccccgcctccacccgtcattttttgtcacgactcccccaaaagagtcctagtgagtgtgatccgcactaccccaatcaagccaacttgcgggggcggcggggaacccgaacctcccccaccactaattcctacttccccaggcttctccgactttatggtctacccatggcggtggggagagaacgcacacaacgtcactctcagccctggcgccgccggagcagcagcgtccgcagctttgcccgctgccgcagccgccgagcactcgggcttgcgcggtaggggagcaccgccccccgcggctagcgcatctgctgcagcttcaggaggggaggacgaagaggaggcctcgagccctgacagcggtcatcttaaagacgggatccgccgtggccgccctcgagccgataccgtccgggatcttataaatgagggagagcattcgtcaagcaggatacggtgcaatatctgcaatagagtattcccccgagagaaatccttgcaggctcacaaaaggacccatacgggcgagagaccctacttgtgtgactacccggattgtggaaaggctttcgtgcagagtggtcagcttaagacccatcagcgcctgcatactggcgaaaaaccctttgtgtgttctgagaacggctgcctatcacgatttacccatgcgaaccggcattgccccaagcatccctacgcgaggctcaaaagagaagagcctacggacactctatccaagcaccaggccgctgataacaaagcggcagccgaatggcttgcaagatactgggaaatgcgggagcagaggactcccacactgaagggcaagttagttcagaaagcagaccaggagcagcaagaccccctggaatatctgcagagtgacgaggaggacgatgaaaaaaggggcgcccagaggaggcttcaggaacagcgggaacggttacacggcgccctggccttgatcgagctggctaatctgacaggggcccctttgcgtcagtag

SEQ ID NO: 24535 - DNA, 1137 bp, synthetic construct
  source 1..1137: mol_type = other DNA; note = Synthetic coding sequence
atgaacatgatctggcggaacagcatcagctgcctgcggctgggcaaggtgccgcatcgctaccagagtggctatcacccagttgcacctttaggctcccgcatccttacagatcccgctaaagtgtttgaacataacatgtgggatcatatgcagtggtccaaggaggaagaggctgccgcccgtaaaaaggtgaaggagaacagcgctgtgagagttttactggaggaacaagtaaaatatgaaagggaggcctctaagtactgggatacattctataagatccataaaaataaatttttcaaagaccgcaactggttgcttagggagttcccagaaatcctgcccgtcgatcaaaagcccgaagaaaaggctcgcgagtcgagctgggaccacgtcaagactagcgccactaacagattttcacgaatgcactgccctactgtgcccgacgagaagaaccactatgaaaagagctcagggagctctgagggccaaagcaaaaccgagtccgacttttccaacctggattccgaaaaacacaagaaggggcctatggagactggcttgtttcccgggtctaacgcgacattcagaatactggaagtcggctgcggagcaggtaactcagtctttcccattttaaataccttggaaaacagtccagagtcttttttatactgttgcgacttcgcctcaggagccgtggagctagtaaagtctcactcttcctacagagcaacccagtgtttcgcttttgtccacgatgtgtgcgatgatggcctgccctaccccttcccggatgggatccttgacgtcatcttgctggttttcgtgctttcatccatccaccccgatcgcatgcagggggttgtgaaccggctgagcaagctcctcaagcctggcgggatgctcctctttcgggactatgggcgttacgacaaaactcagctgaggttcaagaaggggcattgccttagcgaaaacttttatgtacgtggtgacgggactcgcgcttacttctttaccaagggagaagttcactctatgttctgcaaggcgagtctggatgaaaagcagaaccttgttgataggcgcctccaggtgaatcgaaagaagcaggtcaaaatgcactag

SEQ ID NO: 24536 - DNA, 1797 bp, synthetic construct
  source 1..1797: mol_type = other DNA; note = Synthetic coding sequence
atgggcctgcgggccagccggcccagcaagctgacctggaagaagtgggccaccaccgcggcgtcaaactcctgctcccgctccgtttcgtcatgtcgtaggtgtactggtggccgcctcatgaaggaaccctggcggcggccttcctcttctatttgctacacctccagaagttccacaatcaagttctcttcaaataagtttaaaacgctgtcggtgctcctgagccacttgcacctcttccggctccatgttaaaatttcacagccttcactgccaatcagcagccgtggcgcagcatcatccagccaatttcagggcctccccagcagatcagcgatttttcagcagcagcccgagaactgcagttctcccccaaatgtggccctcacatgcctgggcatgcagcagcctgcccagtcccagcaggtgaccatccaggtgcaggaaccggtagacatgctgtcaaatatgcctggtaccgcagccgggtcctccggcaggggcatttccataagtccgtcggcaggacagatgcaaatgcaacaccggacaaacctgatggccactttgtcctacgggcaccgcccgttgtcaaagcagctgagcgctgattcagcggaggcccactctgcccaccagcaacccccccactataccacaagcgccttgcagcaggcactgctgagccccaccccacctgactacacgagacaccaacaggtgccacacattcttcagggacttctgagtcccaggcactcacttacaggtcattcagatattcgcctccccccaacagaattcgcccagctcattaaacgccagcagcagcagcgccagcaacaacagcaacagcagcaacaacaggaataccaggaactgttccggcatatgaaccagggggacgccggaagcttagccccgtctctcggaggacagagtatgacggagcgacaggccctcagttaccaaaacgccgattcctatcaccatcatacgagccctcagcacttgctgcagattcgggcacaggaatgtgtctcccaggcctcctctcccacaccccctcatggctacgctcaccagcctgcactaatgcacagcgagtctatggaggaagattgttcttgcgagggcgcaaaagacgggttccaagattcgaagtcttcctcaaccctgaccaagggctgtcacgattctcctttgctgttgagcactggcggtcccggggaccctgagtccctgctgggcacggtttcacacgcacaagagttaggcattcacccttatggacaccagcctacagctgctttcagcaagaataaagtgccgtctagggaacctgtcatcggcaactgcatggacagatcaagccccggtcaagcggtggagctgcctgatcataacgggctagggtatcccgcgcggccttcggtgcacgaacatcaccggccccgcgctctgcagcgacatcacaccatacagaacagtgatgacgcttatgtccagttagacaatctgccaggaatgtcactggttgctggcaaagcactgtcaagcgcacggatgagcgatgcagtcttgagtcagtcaagcttaatgggcagccagcagtttcaggacggagagaatgaggagtgcggcgcgtccctaggcgggcatgagcaccctgacctgtcagacgggagtcagcacctgaacagttcctgctatccgtctacatgcattacagacatccttttaagttacaagcatccggaagtatccttctcaatggagcaggccggtgtgtag

SEQ ID NO: 24537 - DNA, 3966 bp, synthetic construct
  source 1..3966: mol_type = other DNA; note = Synthetic coding sequence
atggccgccgccgccgccagcggcgccggcggcgccgccggcgccggcaccggcggcgccggcccagccggccgacttcttcctcctcctgctcctggctctcctgcagctcctgccgccgtaagtccagcggcaggccagcctagacctcctgcaccggcgagcagaggacccatgcccgcaaggattggatattacgagatcgataggaccattggaaagggtaatttcgcggtggtcaaacgcgccacccacttggtgactaaggccaaagtagccatcaaaatcatcgacaagacgcagctggatgaagaaaacctcaagaagatctttcgagaggtgcagattatgaaaatgctgtgccacccccatattataagattgtatcaggtgatggagaccgagagaatgatttacttggtgacagagtacgcgtcaggcggggagatctttgaccacctggtagctcatggcagaatggccgaaaaagaagccaggcgcaaattcaagcagatcgtcaccgccgtgtacttttgtcactgccggaacatcgtacatcgcgacctgaaggccgaaaatctgttgctggatgctaacctgaacatcaaaatcgcagatttcgggttttcaaacctgtttactccaggccagctgctcaaaacatggtgcggaagtccaccttatgccgccccagaactgtttgagggtaaagaatatgatgggcctaaggtggatatatggtccttaggcgtggtgctgtatgtcctggtgtgtggcgccctcccattcgacggctccaccttgcagaatctcagagccagagttctgtccggcaagttccggattcccttttttatgagcaccgaatgtgagcacctgattaggcatatgctcgtcctcgatcccaacaagagactaagtatggaacaaatctgtaagcataagtggatgaagctgggggatgccgacccaaacttcgacaggctcatcgcggaatgtcaacagctgaaagaggaacggcaggtcgatcccctcaacgaggatgtccttttggctatggaggatatgggtctggataaagagcagactctacaaagcctgagaagcgatgcgtacgaccactacagcgccatctacagtctactgtgcgatcggcacaaacgtcataagactttgagactgggggccttgccgtcaatgcctagagcgctggcctttcaggcacctgtcaacattcaggctgagcaggccggaacagctatgaacataagcgtcccccaagtgcagctgattaaccccgaaaatcagatcgtggagcctgatggcacactcaacctcgattcagacgaaggggaggagcctagtcctgaggcactcgtacgctacctctccatgagaagacatacagtgggtgtcgccgacccgcgaactgaggtgatggaggacctgcaaaaattgctaccgggattccccggggtgaacccccaggcacccttcctgcaggtggcaccaaacgtaaactttatgcataacttgctgcctatgcagaacctgcaacccactgggcagctcgaatataaggagcagtctctgctacagccccctacattgcaactgctgaacggtatgggaccccttgggagacgggcgagcgatggaggagctaacattcaactgcatgcacaacagctgctcaagaggcccagggggccctctccactggtcaccatgacccctgccgtacccgcagttactcccgtggatgaagagtcaagcgatggcgagcccgaccaggaggcagtccagtctagcacatataaagactccaataccttgcaccttccaacagagaggttttcacccgtgaggcgcttttctgacggagctgcatccatacaagcattcaaggcccacctggaaaagatgggtaacaattcatcaattaaacagctgcagcaagagtgcgaacagctgcagaagatgtatggggggcagattgacgaaaggacactcgagaagacacagcagcagcatatgctgtatcagcaggagcagcatcatcagatcctccagcagcagattcaggattcaatatgtcctccacagccttcaccacctcttcaggctgcgtgtgagaatcagccagctctgctgactcaccagctgcaaagattaaggatccagccctcgtcccctcctccaaatcacccaaataatcacctgttcaggcagccatccaattcgcccccccctatgagctctgcgatgatacagccacacggagcggcaagctcttcacagtttcagggtctgccttcaaggagcgccatcttccagcaacagcctgagaactgctcaagcccccccaacgtcgcgctcacatgtctgggcatgcagcagccagcacaatctcagcaggtaacaattcaagtccaggagcccgtggatatgttgagtaacatgccaggaactgccgcaggatcatccggtagagggattagtataagcccaagcgccggccagatgcaaatgcaacaccggacaaacctgatggccactcttagctacggccatcgcccactcagtaaacaactttcagcagactccgctgaggcacattcactgaacgtgaaccgattctcccccgccaattacgatcaggcccatttacacccccacctcttttctgatcagtctaggggatcaccttcttcttattcccccagcacaggtgtgggcttctcacctactcaggcccttaaggtgccacctttagatcaattcccaaccttccctccatcagcgcaccaacagcccccccattacacaacctctgctctccagcaagctctgttgagtcctactccccccgattacacacgccaccaacaggtccctcatattctccaaggcctgctcagcccccgacattccctgactgggcactcagacatcagactgcctcccacggaattcgcacagctgatcaagaggcaacagcagcaaaggcagcagcaacagcagcaacagcagcagcaggaataccaggaactctttcggcacatgaaccagggagacgctgggtcactcgcaccatcactcggaggccaaagcatgacagaacgacaggcgctttcttaccagaacgccgacagctatcatcaccacacctctccgcaacatttgctgcagattagggcacaggagtgcgtgagtcaggcatcaagccctaccccaccacacggatacgcccaccaaccggctctgatgcactccgagagcatggaggaagattgttcatgtgagggtgctaaggacggttttcaggactcgaagagttcctccacattgaccaaaggttgccacgattcaccactgctgctcagcactggggggccaggggaccccgagtccctccttggcactgtgagtcacgctcaggagctgggcatacatccttatggacatcagcccactgcagcgttttcgaaaaataaggtccctagcagggagcctgtgattggcaactgtatggaccgaagctcaccgggacaggctgttgaactcccagatcataacgggctgggttaccccgcccgaccctctgtacatgaacaccaccgcccccgcgctctgcagagacatcacaccattcagaattccgatgacgcctacgtacagctggataacttgcctggaatgagcctggtcgccggaaaagccctgagctccgccagaatgagcgacgctgtgttgtcccagagcagcctgatgggatcacaacaattccaggatggcgagaatgaggagtgtggcgccagcctgggcgggcacgaacatcctgacctctccgacggctcccagcacttgaattccagctgttatcccagcacgtgcatcaccgacattctgctgtcctataagcatcctgaagtctcattctccatggagcaagctggcgtgtag

SEQ ID NO: 24538 - DNA, 1569 bp, synthetic construct
  source 1..1569: mol_type = other DNA; note = Synthetic coding sequence
atgccccggaagaaggccgccgccgccgcctgggaggagcccagcagtggcaatggtacggccagagcaggacccaggaaaagggggggtcccgcaggaaggaagcgtgagcggccagagcgatgcagttctagctccggcggcggctcatccggagatgaagacggactcgaacttgacggcgcaccagggggtggaaaaagagccgcgagaccggccaccgctggtaaggctggtggcgccgcagtcgtaatcacggagcccgagcacaccaaggaaagggtgaagctcgaaggctctaaatgcaaaggccagctgcttatcttcggggccaccaactgggatctaatcggacgcaaagaagtgccaaagcagcaagccgcgtacaggaacctgggccagaatctgtggggaccccatcgttacggatgtttagctggagtgcgggtgagaacggttgtgagtgggtcttgcgcagcacactccctcctgattactacagaaggtaagctgtggagttggggaaggaacgaaaaaggacagctggggcatggagatactaaacgggtggaggcccctcgactgattgagggcctgtctcatgaagtgattgtgtctgccgcatgcggccgcaatcatacactcgcccttacagagacaggctcagtgtttgcattcggggagaataaaatggggcaactcgggctgggcaaccagactgacgccgtcccatccccagctcagattatgtataatggtcagccaatcaccaagatggcatgcggtgcagaatttagtatgattatggactgtaagggtaatttgtactcctttggatgtccagagtacggtcaacttggacacaatagcgatgggaaattcatagctagagcccagcgcatcgagtacgactgtgagctcgtcccgcgacgcgtggcaatcttcatcgaaaaaacgaaggatgggcagatcctgcctgtccccaacgtggtggtccgggatgtcgcctgcggagctaatcatacccttgtcttagactcacagaagcgggtcttcagctggggcttcggcggctacggcagacttggccacgcagaacagaaggacgagatggtgcccagactggtgaagctattcgacttcccgggccggggggcctcccaaatttacgccggctacacctgcagttttgcagtctctgaggttggcggccttttcttctggggtgctacaaacacatctcgcgaaagtacgatgtaccccaaggctgtgcaggacttatgcggctggcgcataagatctcttgcttgcgggaagagcagcattatagtggcagcagacgagagcacaatcagttggggaccttcgccaacttttggggagctagggtatggtgaccacaaaccaaagagcagcaccgccgcacaggaagtcaaaacccttgatggaatcttctcagagcaggtggccatggggtattcacattcccttgtcatagcccgagatgaaagcgagacagaaaaggaaaaaatcaaaaaattaccagagtacaatcctcgcactctgtag

SEQ ID NO: 24539 - DNA, 1569 bp, synthetic construct
  source 1..1569: mol_type = other DNA; note = Synthetic coding sequence
atgccccggaagaaggccgccgccgccgcctgggaggagcccagcagcggaaacggcactgcccgcgcagggcccaggaaaagaggaggcccagcgggaagaaaacgcgagcgacccgagaggtgttcaagcagctcgggcggcggaagcagcggagatgaggatgggctcgagctggatggagcacccggtggtggtaaacgggcagctcgacctgcgaccgctggtaaggcaggcggcgcagcagttgtgattaccgagcctgagcacacaaaagaaagggttaaactggagggctctaaatgtaaggggcagttactcatcttcggcgccacaaattgggacctcatcggccgcaaggaggtgccaaagcagcaggccgcttataggaacttagggcagaatctgtggggaccccaccgatacggatgcctggcgggggtgagagtccgcactgtggtatcaggatcctgcgccgcacatagcttgctcatcacaacagaggggaaactgtggtcatggggtcgcaacgagaagggccaacttgggcatggcgacacaaagagagtcgaggccccaagactgattgagggactgtcccacgaggtgatcgtttctgctgcctgcggtagaaaccacaccctcgccttaacagagactggttcggtatttgcattcggggaaaataaaatggggcaactggggctgggtaatcagacggatgcagtgcctagccccgcccagatcatgtacaatgggcagcccatcactaagatggcttgtggcgcggaattttccatgataatggactgtaaagggaacctttacagcttcggatgcccagaatatgggcagctgggacacaattctgacggaaagtttatcgctcgcgcccaacgaatcgagtatgactgcgaactcgtgccccggcgcgtggcaatattcattgaaaagacaaaggacgggcagatattgcctgtgccaaatgtcgtggtgagagacgtcgcctgcggcgcaaaccatacactcgtgttagacagtcaaaaaagagtctttagctggggctttggtgggtacgggagactcggacatgcagagcaaaaagacgagatggtccctcgattagtaaagttgtttgatttccccggtcgtggggccagccaaatttatgccggctacacatgctcattcgccgtgtcagaggttgggggactctttttctggggtgccacaaacaccagtagagaatcaacaatgtaccctaaagcggtgcaggatttatgcgggtggcgaattagaagcctggcctgtgggaaaagttctatcatcgttgccgccgatgaatctactattagctggggacccagccccactttcggagagctgggctatggcgaccacaagccgaaaagcagcacagcggcccaggaggtgaaaaccctggacggaattttctctgaacaggtcgccatgggctactcccattcattggtcatcgcaagggatgaaagtgagacggagaaggagaaaatcaaaaaactccccgagtataaccctcgcaccctgtag

SEQ ID NO: 24540 - DNA, 552 bp, synthetic construct
  source 1..552: mol_type = other DNA; note = Synthetic coding sequence
atgaccgaccagacctactgcgaccggctggtgcaggacaccccctttctcacaggacacgggcggctatccgagcaacaggtcgataggataattctgcaactcaataggtactatccacagatattgacgaataaggaagcagagaaattccgtaacccgaaagcatctctcagggttcggttgtgcgacctgctgagccatctccagcgctccggagagagagattgtcaagagttttatagggctttgtatatccacgcacaaccactccacagccggctcccctctcgccacgccctgcagaactcagattgcaccgaattggactccgggtcacagagcggagagctttctaacaggggtcctatgagttttctcgccgggctaggattggcagtcgggctcgcgctccttctctattgctaccctcccgatccaaagggacttcccggcacgcgccgcgtgctgggattctctcccgtgatcatcgaccgtcatgtttcccgctatttactagcgttcctggctgacgacctcggaggcctttag

SEQ ID NO: 24541 - DNA, 492 bp, synthetic construct
  source 1..492: mol_type = other DNA; note = Synthetic coding sequence
atgctggacctgctggacatcgagggcctgtaccccctgtacaaccgggtggagagatatttggaagagttcccagaggagcgcaagacactgcagattgacggaccatatgacgaggcattttaccaaaagttgctggacctgagcacagaggatgacggaacagtggctttcgccctgaccaaggtgcagcagtaccgagtcgcgatgactgccaaagattgtagtattatgatcgcactgagcccttgtctccaggatgccagctccgaccaacggccggtggtgccgtcctctcgatcccgattcgccttcagtgtgtcagtgctggatctcgatcttaaaccatatgaatctattccacaccaatacaagctggacgggaaaatcgtgaactactatagtaagactgtgcgggccaaagacaatgccgtcatgtctacccggtttaaagagtccgaggactgcacgttagttttgcataaggtgtag

SEQ ID NO: 24542 - DNA, 777 bp, synthetic construct
  source 1..777: mol_type = other DNA; note = Synthetic coding sequence
atggcccggccccccgtgcccggcagcgtggtggtgcccaactggcatgagagcgcagagggcaaagagtacctcgcttgcatcttaaggaaaaacaggcgcagggtctttggtctgctggaacggcctgtactgttgccacctgtgagtattgacacagcatcatacaaaatcttcgtatctggaaagtccggcgtgggtaagaccgcactcgtcgcaaagcttgccggactcgaagtgcccgtggtgcatcacgaaacaaccggcatccaaacaacagtggtgttctggcccgccaaactccaggcgtcctcccgggtggtgatgttccgatttgaattttgggactgtggagagtccgctctcaagaagtttgaccacatgctgctggcttgtatggagaataccgacgcttttctctttttgttttcttttactgatagagcgtcatttgaagatttgccgggccagctcgccagaatcgccggcgaagctccaggtgtggtgcgcatggttatagggtctaagttcgatcagtacatgcatactgacgtgcctgagagggacctgacagcattcagacaggcgtgggaactcccactgttaagggtcaaaagcgtgccggggaggcgactggcggacggacgcaccctagacggccgggccgggctggcagacgtagcccatatattaaacgggctggcggaacaattatggcaccaagatcaggtggcagccggtctgctccctaatccaccggagtctgcacctgaatag

SEQ ID NO: 24543 - DNA, 333 bp, synthetic construct
  source 1..333: mol_type = other DNA; note = Synthetic coding sequence
atggccgacaaggtgctgaaggagaagcggaagcagttcatccggtcagttggggaagggaccattaacggtctgttaggagagctgctggagacacgggtgctcagtcaggaggagattgagattgtgaagtgtgagaatgcgactgtgatggataaggcgcgagcattgcttgacagcgtgattagaaagggggcgcctgcttgtcagatttgtatcacttacatttgcgaggaagattcccacttagcaggcactctcgggctgtccgcaggacccacaagtggcaaccatttaaccacacaagattctcagatcgtgctgccgtcctag

SEQ ID NO: 24544 - DNA, 924 bp, synthetic construct
  source 1..924: mol_type = other DNA; note = Synthetic coding sequence
atggagcccagcagcctggagctgcccgccgacaccgtgcagcggatcgctgctgagctgaagtgccaccccactgacgagcgggtggcgcttcatttggatgaagaagataagctaaggcattttagggagtgtttttacatccccaagatccaggatctgcctcccgttgacctgtcactggtgaataaagatgaaaatgctatttatttcttgggtaacagccttgggcttcagccgaaaatggtgaagacttacctcgaggaagagttggataaatgggcgaaaatcgccgcgtatggccatgaggtgggcaaaaggccttggatcactggtgatgaaagtattgtggggctgatgaaggacatcgtaggtgcgaatgaaaaagagattgccctgatgaacgctttgaccgtcaatctgcacctcctgatgctttctttcttcaaaccgacgccaaaacggtacaaaatcttacttgaggcaaaggcttttccgtcagatcactacgcaatagagtcccagctgcagctgcacgggctaaatatcgaggaatcaatgcgcatgatcaaaccgcgtgagggcgaggagacactgcggatcgaagacatactcgaggtgatcgagaaagaaggcgacagcatagcagtgatcctgttcagcggggtgcatttttacaccggccagcatttcaacatcccagccatcacaaaggctgggcaagctaaggggtgttacgtagggttcgacttagcccacgctgttggcaatgtcgaattgtacctccacgactggggtgtggatttcgcctgttggtgtagctataagtatctaaacgcaggtgcgggcggcatcgccggcgcgtttattcacgagaagcatgctcacacaatcaaacctgcgcgtagtgaatttttcaactag

SEQ ID NO: 24545 - DNA, 3060 bp, synthetic construct
  source 1..3060: mol_type = other DNA; note = Synthetic coding sequence
atggagcccggcgaggtgaaggaccggatcctggagaacatcagcctgtcagtgaagaaactgcaaagctactttgcggcatgcgaagatgaaatccctgccatccggaatcacgacaaagtgctgcagagactgtgcgaacacttagatcatgcactcttatacggactccaggacctgagcagcggctattgggtgctcgttgtgcacttcacccgccgggaggccattaaacagatcgaagtgttacagcatgtggccaccaacctgggcagaagccgcgcttggctatatctggccctaaatgagaattcactcgaatcttacctgcgcctgttccaagagaatctgggattactccataagtattacgtaaagaatgctttggtttgctcgcatgaccacctgactctctttttgactctcgtgtccggattggagttcattaggttcgaattagacctcgacgctccttacctggacctggccccatacatgcccgattattacaagccacaatacctgctggatttcgaggaccgcctaccatcttccgtgcatggaagcgactcactgagcctgaacagtttcaattccgtcacatcaaccaacctggagtgggatgattctgcgatagccccgtcctctgaagactacgactttggcgacgttttcccagcagtgcccagcgtgccaagtacggactgggaggatggagatctgaccgacaccgtatccggtccacgctcaacagcttccgacctgacgtctagcaaagctagtactcggagtcccacacaacggcaaaatccctttaacgaggagccagcagagaccgtctcctcaagtgacaccaccccagtccataccacctcccaggaaaaggaagaagctcaggctctggatccaccagatgcctgcacggaactggaggttatcagggtcaccaaaaaaaaaaagattggcaagaaaaaaaaatccagaagtgacgaggaagcctccccgctgcatcccgcttgctctcagaaaaaatgtgctaagcagggggacggcgacagcagaaacggctctccctcactgggacgggattctcctgacactatgctggcgtcacctcaggaagagggggagggtccttcaagtaccacagagtctagcgaacgctccgaaccaggcctgctgattcccgagatgaaggatacttctatggaaagactcggacagcctctctctaaggtgatcgaccagctgaatggccaactggacccttctacgtggtgttcccgtgccgagccgcccgatcaaagcttccggactgggtctccgggggacgcccccgagcgccctcccctgtgtgactttagcgagggactgtccgcaccgatggacttttaccgctttactgttgagagcccctccaccgttacatctgggggggggcatcacgacccagccgggttgggccagcctctgcatgtgccaagctcccctgaagccgctggacaggaggaggaagggggtggaggagaaggacaaaccccgagacctctggaggacaccacaagagaggcacaagaactcgaggcacagctgagtcttgttagagaagggcccgtatcagagcctgagcccggcacacaagaagtcctttgccaactcaaacgtgaccagccttcaccttgtctgagttctgccgaggattcaggcgtcgacgaaggacagggatccccttccgagatggtgcactcctctgagttcagagtggataacaatcacctactactcctaatgattcatgtttttagggagaatgaggagcagttgtttaagatgatcaggatgtcaaccggtcatatggagggaaatctgcaactgctgtatgtgcttctgacggactgttacgtgtacctgctgaggaagggtgcaacagaaaagccatacctggtggaagaggcagtgagctacaatgaactcgattatgttagtgtcggcttggaccagcagactgtgaagctggtatgcaccaaccgtcgaaagcagtttctgcttgataccgccgatgtcgccttggccgagttttttctcgcttcactgaagagtgcaatgataaaaggctgtagagagcccccctacccctcgatccttaccgatgccaccatggagaagctggccctggctaagttcgtagctcaggaatccaaatgcgaggcttctgccgtaaccgttcgcttttacggactagtacactgggaggatccaacagacgagtccttgggaccaaccccctgtcactgttccccccctgaaggcaccattaccaaggaaggtatgctgcactacaaggctgggaccagctatctgggcaaggagcactggaagacttgctttgtggtcctgtctaatggaatcctatatcagtacccagatcgcaccgacgtgattcccttgttgagtgtaaacatgggcggcgagcagtgcggagggtgtcgcagagcaaacaccaccgacaggccccatgccttccaggttattctgtcggacaggccgtgtctggagctctcggccgagagcgaagcagagatggccgaatggatgcagcacctttgccaggctgtttctaaaggggtgatacctcagggcgtggccccttctccttgcattccttgttgtctggtcctcacagacgatcggctttttacttgtcacgaggattgccagactagttttttccgttctctgggtaccgccaaactgggagacatatcagccgtgagcacggaacctgggaaggaatattgcgttctggaattcagtcaggacagccaacagcttctcccaccgtgggtcatctatcttagttgtacctctgaattggaccgccttctgtccgcactcaattcgggctggaaaaccatttaccaggtagacttgcctcacacggccatccaggaagcctctaacaagaagaaatttgaagatgcattgtccttaattcatagcgcctggcagcgttccgattccctgtgccgtggccgcgcctcacgtgatccctggtgctag

SEQ ID NO: 24546 - DNA, 318 bp, synthetic construct
  source 1..318: mol_type = other DNA; note = Synthetic coding sequence
atgaagcccttcgaggacgccctgaagaaccagcccctgggccccgtgctgtccaaggctgccagcgtcgagtgcataagcccagtgtccccccgggctcctgatgccaaaatgctggaggagttgcaggcagagacatggtaccaaggggagatgtcccgcaaagaggcagaaggactgttggagaaagatggcgattttctcgtgagaaaaagcaccactaatccaggcagttttgtgttgacgggcatgcacaatggtcaagccaagcacttgctcttagttgatcccgaaggtacccgctcaaactcatattag

SEQ ID NO: 24547 - DNA, 318 bp, synthetic construct
  source 1..318: mol_type = other DNA; note = Synthetic coding sequence
atgaagcccttcgaggacgccctgaagaaccagcccctgggccccgtgctgtctaaggcagcatcggtcgagtgcatcagccctgtctccccaagagcaccagatgccaagatgttggaagagctacaggctgaaacttggtaccaaggggagatgtctcgcaaagaggcggagggcctgctcgagaaagacggtgacttccttgtgcggaagtcaacaactaatcctggcagctttgtgttaaccggtatgcacaatggtcaggccaagcacctgctcctcgtggacccagagggcacaagatctaattcttattag

SEQ ID NO: 24548 - DNA, 1785 bp, synthetic construct
  source 1..1785: mol_type = other DNA; note = Synthetic coding sequence
atgctgccccggaccaagtacaaccggttccggaacgacagcgtgacaagtgtagacgatctgctccacagtctgtcggtgagcgggggcgggggcaaagtttcagcagctagggcaactcctgccgcggctccgtatttggtaagtggcgaggctctccggaaggcacccgatgatggtcccggctcactgggccatctactgcataaggtgtcccacttgaaactgagctcctcaggcttaagagggctctcctcagccgcccgagagcgggcgggtgccaggctgtctggatcttgctccgcgccaagtctcgcagctcctgacggcagcgctccgagcgccccacgtgctcccgccatgagtgccgcccgcaaagggagacctggagacgagccgctgccgaggcccccaagaggagcacctcacgcatcagatcaagtcttggggcccggagttacctatgttgtcaaataccttgggtgcattgaggtgcttcgaagcatgcgcagtcttgacttttcaaccaggacacagattacgcgcgaagcaatttctagagtctgtgaggcggtgccgggagccaagggggcatttaaaaagcggaagccaccgtcaaagatgctgagcagcatattggggaagagtaacctgcagttcgctggcatgagtatctcccttactatcagcactgcaagcttgaacctacggacaccggattcaaaacaaataatcgctaaccaccacatgcggtcaatctctttcgcctctgggggtgatcccgacaccacagactacgtggcatacgtcgcaaaagatcccgttaaccgcagggcatgtcatatcctggagtgctgtgatggactggctcaggatgtgattggatctattggtcaggcttttgaattgaggttcaaacagtatctgcagtgtcctacaaagatccccgcactccatgaccgcatgcagtctctggatgagccctggaccgaggaggagggggacgggagcgaccacccctactataactcgataccaagtaagatgcctccccccggaggctttctggacaccagattaaagcctcgtccacacgcgccagataccgcgcagtttgccgggaaggaacagacttattaccaaggccggcacttgggtgacacatttggcgaggactggcaacagacacccctgcgtcaggggagttcagacatctacagcacgcctgagggcaagctacacgtggcaccgaccggagaagccccgacatacgtcaacacccagcaaatccctccccaggcttggcccgcagccgtttcctccgccgagtcttcccccaggaaagacctgttcgacatgaaacctttcgaagacgctcttaaaaaccagccccttggtcccgtcttatcgaaggctgctagcgttgaatgtatctcaccagtgtcccctcgggcccctgacgcgaagatgctcgaggagctgcaggccgaaacctggtaccagggcgagatgtcccgtaaagaagcagagggactactcgaaaaggacggggatttcctggtaaggaagtccactaccaatcccggaagttttgtcctcactggaatgcacaatggtcaggccaagcatttgctgctcgtggaccccgagggaacaattcggactaaggatcgggtttttgacagcatttcgcatctgataaaccaccaccttgaaagctctctgcctattgtctctgccgggtccgagctttgcctgcagcagcctgtcgaaagaaagcaatag

SEQ ID NO: 24549 - DNA, 693 bp, synthetic construct
  source 1..693: mol_type = other DNA; note = Synthetic coding sequence
atgaacaccctgatggacgtgctgcggcaccggcccggctgggtggaggttaaggatgagggagagtgggacttctattggtgcgacgtttcatggttgagggagaattttgatcatacctatatggacgagcatgtgaggattagtcatttccggaatcactatgaactcactagaaaaaattacatggtgaaaaacttaaaaagattcaggaagcagctggagagagaagccggaaaattagaggctgccaagtgcgatttcttcccaaaaacatttgaaatgccatgcgaatatcatctcttcgtcgaggagttcagaaaaaacccaggaatcacgtggattatgaagcccgacacccggtctagcgatgaccagaaggatgacatcccagtggagaattacgtcgcacagcggtatattgagaacccgtatcttatcgggggccgaaagtttgatttaagagtctacgtcctcgttatgagctatatccccctccgcgcatggctgtatcgcgatggctttgcccgtttctcgaacacaagattcacgctcaacagtatcgacgaccagtacgtacatttgacgaatgttgcggtccagaagactagcccggactatcatcccaaaaaagtggcgcctggaggacagtgtgtgcccattactgacagccagcagcccggaaggctgtag

SEQ ID NO: 24550 - DNA, 1068 bp, synthetic construct
  source 1..1068: mol_type = other DNA; note = Synthetic coding sequence
atgaacaccctgatggacgtgctgcggcaccggcccggctgggtggaagtgaaagacgaaggagaatgggacttctattggtgcgatgtgagctggctgcgggagaatttcgaccacacctacatggatgagcatgtgaggatctcacactttcgcaatcattacgaactgacccggaagaactacatggtgaaaaacctgaagagattccgaaagcagctggaacgggaggccggcaaactcgaagcagctaagtgcgatttcttccctaaaacattcgagatgccctgcgaataccatctgtttgttgaagagtttcgtaagaacccgggaatcacttggatcatgaagcccgatacaaggtcttctgatgaccagaaagacgacattccggttgagaactacgttgcccagcgatatatcgagaatccgtacctaataggagggaggaagttcgatctgcgggtgtacgttctggtcatgagctatattcccctccgtgcttggctgtatcgagatgggttcgctcgctttagcaacacacggttcacactgaatagtatcgatgaccagtacgtccatctcacgaacgttgcagttcagaagacaagcccagattatcaccccaagaagggatgtaaatggaccctgcaaagattccgccagtatttggccagcaagcacggaccagaagccgtggaaactctattccgggacatagataatattttcgtgaaaagcttgcagtctgtgcaaaaagtgatcatcagcgataaacattgctttgagctctacgggtatgatatcttgattgaccaggatttgaaaccatggcttctggaggtcaatgcttccccatcgttaaccgcgtcgtcccaggaggattacgaacttaagacctgcctccttgaagatacactccatgtcgttgacatggaggcacgcctgcgtcagcggagcgaggagacaaccgaagctgccctgctgctgccaagttcctcagaggaatcttttcaattaattccctcctgccaagaggaaatcagcctctcccgcccttgcgtctag

SEQ ID NO: 24551 - DNA, 840 bp, synthetic construct
  source 1..840: mol_type = other DNA; note = Synthetic coding sequence
atgagccggcccaagaaccagaactacaagggccacggcctgagcaaaggaaaagagcgggagcagcgggcatcaataagattcaaaacaacacttatgaacaccctgatggatgtcttaagacatcgaccgggctgggtggaggtgaaggatgagggcgaatgggatttttattggtgcgacgtgtcttggctccgcgagaattttgatcacacatacatggatgagcacgtgaggatttctcattttaggaatcattatgaacttacccgcaagaactatatggtgaagaatctcaaacgatttcgtaagcagctggagcgtgaggctgggaaactggaagcggctaaatgcgactttttccctaaaacctttgaaatgccctgcgagtaccacctattcgtggaggagttcagaaagaacccaggcattacgtggataatgaagccggttgcccggtcccagggaaaaggaatttttctcttccgccgcctaaaggacatagtggactggcgaaaggacacccgtagctcagacgaccaaaaagacgacatccccgtggagaattacgtcgcccaacgttatattgaaaacccctacttgatcggaggccgaaaatttgatctccgcgtatacgtcctggtgatgagcatgttcacgtcaccaacctggctgtgcaaaaagcatttgcctaccacaactcagaggagagcggcttctggaaggtgctcagcttctggctccacctggagacctaatacggggcccaggcagtggcgacattcttccggaacatcaactacttctctgagcaaagcctgccgtgtgtgccgacgatag

SEQ ID NO: 24552 - DNA, 1116 bp, synthetic construct
  source 1..1116: mol_type = other DNA; note = Synthetic coding sequence
atgagccggcccaagaaccagaactacaagggccacggcctgagcaaaggcaaagagagggaacaaagggcctccattaggtttaaaaccaccctcatgaacactctgatggacgtgctgcgacatagacccggttgggtggaggtgaaagatgaaggggagtgggacttttattggtgtgacgttagctggctacgagagaacctggaaagggaggcaggtaagcttgaggctgctaagtgcgatttctttcccaaaacgtttgagatgccatgtgaataccacctgttcgtggaggagttccggaaaaatcctgggatcacttggatcatgaaacccgttgcgagatcacagggaaaagggatcttcctgttccgtagactcaaagacatcgtggactggcggaaggacacacgctccagtgatgatcagaaagacgacattcctgtagaaaactacgtggctcagcgctacattgaaaatccttacctaatcgggggccggaagttcgacttgcgcgtgtatgtcctggtaatgagctatatcccattgcgtgcttggctctacagagatgggttcgctcgcttctctaatacccgattcactctgaattccattgatgaccagtacgtgcatttaaccaacgtggccgtgcaaaagaccagtcccgactaccatcctaagaaactacacccaaccgtaggacccctgtgcatccatagccctgaaaacggtagcttaagcgtgactccatggccttgggatgctcatatgggctgcaagtggacactccaacgattccggcagtacctggccagcaagcatggaccggaggctgtcgagacactgtttcgcgatatcgataacatcttcgtgaagagcctgcagtccgtgcagaaggtgatcatctctgataagcactgcttcgaactctatgggtacgatattctaatagaccaggatttaaagccttggctgcttgaggtcaatgctagtccatccctaaccgcgagcagccaggaggactacgagttaaaaacctgcctgctggaggacacactccacgtggtggacatggaagcatccttcagtcccatcattcccgcggaggtgtag

SEQ ID NO: 24553 - DNA, 1320 bp, synthetic construct
  source 1..1320: mol_type = other DNA; note = Synthetic coding sequence
atggtgcccagccgggaggccctgctgggccccggcaccaccgccattaggtgtcccaagaagcttcaaaatcagaattataagggacacgggctgtcaaaaggcaaagagcgagaacagcgcgcctcaatcaggttcaagaccacactgatgaacactctcatggatgtgcttcgccataggccagggtgggtagaggtgaaggacgagggtgaatgggatttctactggtgtgatgtcagctggctgagagaaaatttcgatcacacctacatggatgagcatgttaggattagccactttaggaaccactatgagcttacacggaagaattacatggtcaaaaatctgaagaggtttcggaaacagctcgaacgagaggccggtaagttagaggccgctaagtgtgacttctttccaaaaacatttgagatgccctgtgaataccacctttttgtggaggaatttcggaaaaatccaggaatcacatggattatgaagcccgtggcccgatcccagggcaagggtatattcctatttcggcggctgaaagacatcgttgattggcggaaggatacaagatcctctgatgatcagaaggacgatattcctgtggagaactatgtggctcagagatatattgagaacccgtatttaattggagggcgcaaattcgatctgagggtttatgtgctcgtgatgagtgtatttgcggagtgtctcctgtggtcaggacatagaaggcaagacgtgcatttgactaatgttgccgtgcagaagacttctccagactaccacccaaaaaagggctgcaagtggaccctgcagcgattcagacagtacctggcttctaagcacgggcctgaggctgtagagactctcttccgggatatcgataacatttttgtgaaaagtttgcaatccgtccagaaagtgattataagtgacaagcactgtttcgaactgtacggctacgatattctgatcgaccaggatctgaaaccctggctcctggaagtgaacgcgtccccctctctcaccgctagctcccaggaggactatgagctcaagacatgtctgctagaggacacccttcatgtggtcgacatggaggccaggcttacaggacgggaaaagagagttggggggttcgatctgatgtggaacgatggccctgtgtcccgcgaggaaggtgcgccagacctgtctgggatgggcaatttcgtgacaaatacgcatctgggatgtgtgaatgaccgcaaaaagcagcttagacagctattttgctcactacaggttcagaagaaggcttcctcgtag

SEQ ID NO: 24554 - DNA, 501 bp, synthetic construct
  source 1..501: mol_type = other DNA; note = Synthetic coding sequence
atgaaggagatgctggccaaggacctggaggagagccagggcggcaagtcctccgaagtgctttccgcaacggaactccgggtgcagttagcccagaaggagcaggaactcgctagggcaaaggaagcattgcaggccatgaaggcagaccgtaagcgcctgaaaggcgaaaaaaccgatcttgtgagccagatgcagcaactctatgctacacttgagagccgagaggaacagcttcgtgacttcattcgtaattatgagcagcatcgcaaggagtctgaggatgccgttaaggccctcgcgaaagaaaaagacttgcttgaaagagagaagtgggaactccgtaggcaggctaaagaagcgaccgaccatgccactgctctgcgaagccagcttgatctgaaggataaccggatgaaggaactggaggctgagctagccatggccaaacagtcactggccactttgactaaggacgtcccaaagcggcacagcctctag

SEQ ID NO: 24555 - DNA, 2328 bp, synthetic construct
  source 1..2328: mol_type = other DNA; note = Synthetic coding sequence
atgatggaggacaacaagcagctggccctgcggatcgacggcgccgtccaaagcgcatctcaagaggtcacaaacctgagggctgagctgaccgcaaccaaccgtcggctagccgaactaagtggcggcgggggccccgggccggggcctggcgctgccgcgagcgcctctgctgctggcgattcagccgccactaatatggaaaaccctcagctcggggctcaggtgttattgagagaagaagtgagtcgcttgcaggaggaggtccatctcttgcgccagatgaaggagatgctggcaaaagatctagaggagtcacaaggcggtaaatcctcagaggtgctctctgccaccgagctgagagttcaactcgcccagaaagagcaggagctggcacgcgccaaggaggctctgcaggccatgaaagccgaccggaagcgcctgaagggagaaaagaccgacctggtcagtcagatgcagcaactttatgccactctggagtctagagaagagcagctgcgagatttcatccgcaattacgagcagcaccggaaagaatctgaggacgcggtgaaggctcttgccaaggagaaggacctgctggaacgcgaaaagtgggaactaaggaggcaggcaaaggaagcaacagatcacgctacagcattgcgcagccagcttgatctcaaggacaaccgcatgaaagaattggaggccgaactggctatggccaagcagtcgctggccaccctgaccaaggatgtccctaaacgtcattccttggctatgcccggtgaaactgtgctaaatggaaatcaggagtgggttgttcaggcagatctcccccttacagcggccatccggcagagccagcagacactctaccactctcatccccctcatccagctgaccgccaggccgttagagtttccccctgtcacagcaggcaaccatctgtgattagcgacgccagcgccgccgaaggtgaccgaagcagtactccatctgacataaacagcccccggcatcggactcactccctctgtaatggcgactcccccgggccggtgcaaaagaacctgcacaatcctatcgtacagagtctggaagacctcgaagaccagaagaggaagaaaaaaaaggagaagatgggctttggcagcatctctcgagtatttgcccgtgggaaacagcggaaaagcctggatccaggactgtttgatgattctgactctcaatgcagtcccaccagacaatctctctctctgagcgaaggcgaagagcagatggatcggctccagcaagtggaactggtgaggactacgccaatgtcccactggaaagctgggaccgttcaagcatggcttgaggttgtaatggcaatgcccatgtacgtaaaggcatgcaccgaaaatgtaaagtctggtaaagtcctgctttctctgtcggatgaagatctgcaattaggcttaggagtgtgctcttcgctccatcgccggaagctgcggctggcgatcgaggattacagagacgccgaggctggacggtccctttccaaggcagctgagttggatcaccattgggtagcaaaggcttggctgaacgacataggtctatcacagtacagccaagcattccaaaaccatctcgtagacggaaggatgctgaacagtttgatgaaacgggacctcgaaaaacatctcaatgtgtctaaaaaatttcatcaggtgtccatcctgctgggaatcgaactgctctatcaggtcaatttttctcgagaagcattgcaggagaggagagcacggtgcgaaacccagaatattgatcctgtagtttggacgaaccagcgtgttctcaagtgggttcgtgacattgacttaaaagaatatgccgataatctcaccaacagcggggtgcatggggccgtgctggtgcttgagcccacctttaacgcagaggcaatggcgaccgctcttggcataccatctggaaagcacatactccgtcggcaccttgctgaggaaatgagtgcggtattccacccggcaaactctacgggtattcgagaagccgaacggttcggtacaccccccggccgggcttcaagcgtgacgagagccgggaaagaggaaaactcctcggggctcaagtacaaagctggaaggcttcctctaggcaagatcggacgggggttttctagtaaagaccccgatttccacgatgattatgggagccttcagaatgaggattgcggagatgatgatccccagagtcggctggagcagtgtagactggagggttacaactccctcgaagtgaccaacgtttag

SEQ ID NO: 24556 - DNA, 861 bp, synthetic construct
  source 1..861: mol_type = other DNA; note = Synthetic coding sequence
atgtacagcctggaccggatcttcgccggcttccggacccggagccaaatgctgttaggacacatagaggaacaggataaggtgctccattgtcagttcagcgataactcagatgacgaggaatcagagggccaggaaaagtctggtactagatgccggtcacggtcttggatccaaaagccagactctgtgtgttctctagtggaactctccgatacacaggatgagacccagaaatccgacctcgagaatgaggacctaaagatcgattgtctgcaggagtcacaggagctcaacctgcaaaagctgaagaactcagaaaggattcttactgaggctaaacaaaagatgagagaactgacaatcaatatcaagatgaaggaagatttgatcaaggagttgatcaagaccgggaatgacgcaaagagcgtatccaagcaatatagcttaaaggtaactaaacttgaacacgacgccgagcaggccaaagtggagctgatagagacccagaaacaacttcaggagcttgagaataaggacctgtccgacgttgctatgaaagtcaaacttcagaaagagtttaggaagaagatggatgcagccaagctccgggtgcaagtccttcaaaagaagcaacaagatagcaagaaactggcctccctatcaattcagaatgaaaagagagccaatgagttggaacaatctgttgaccatatgaaataccagaaaatacagctccagcgcaagctccgcgaggagaatgagaagcgtaaacagctcgatgccgttatcaagcgggaccagcagaaaatcaaagtgattttgtcctacatacctgctaaatacaatatgaagtgctag

SEQ ID NO: 24557 - DNA, 1662 bp, synthetic construct
  source 1..1662: mol_type = other DNA; note = Synthetic coding sequence
atgaacaagaacaccagcaccgtggtgagccccagcctgctggagaaagaccctgcttttcaaatgattaccattgctaaagagactggactggggcttaaagtgctgggaggcataaataggaacgaaggtcctcttgtgtacattcaggagattatccccggcggggactgctacaaggacggacgcctcaagccaggagaccagctggtctccgttaataaagaatctatgatcggggtgagtttcgaagaagctaaaagcattatcaccggtgcaaagttgcgcctggaaagcgcctgggaaattgcctttattcggcagaagtccgacaatattcagcccgaaaatctgtcttgtacctccctgatcgaggcttccggtgagtatggtccccaggcatcaacactctcactgttttcgagccctcccgagatcctgatacctaagacaagctccactcccaagactaacaatgatattctgtccagctgtgaaatcaagacaggatacaacaagacagtccaaattccaatcacctccgagaacagcacagtgggtctgtcaaacaccgatgttgcgtccgcctggactgagaactacggcctccaggagaagatcagcctgaatccaagcgtccgatttaaagccgagaaattagagatggcattgaattatctcggaatacagcccacgaaagaacagcatcaggcactgcggcagcaggtgcaggcagacagcaagggcaccgtctcctttggggatttcgtccaggtcgcacgtaatctgttttgtcttcagctggacgaggtgaatgtgggcgctcacgaaatctccaatatcttagatagccagttactcccttgcgacagcagcgaagccgacgaaatggaacgcctgaaatgtgaacgagatgacgcgcttaaggaagtaaacacattgaaggaaaagttgcttgaaagcgataagcagcggaaacagctgaccgaggaattacagaacgtcaaacaggaagctaaggccgtcgttgaagagaccagagctttgagatctagaatccatctggccgaggctgctcagaggcaggcgcacggaatggagatggattacgaagaagttatccgcctcctcgaagcaaaaattaccgaattgaaagctcaattggccgactattctgatcagaacaaagaatccgtacaagacctcaagaaacgaataatggtgctcgattgtcagctacgtaagagcgaaatggcacggaagacattcgaggcgagcacagagaagctccttcactttgtggaggccattcaagaggttttttctgacaactccacccccctgagcaacctgtctgagagaagggctgtgctggcttcgcaaacgagcttaactcccctgggtcgaaatgggcgatccattcccgcaactctcgccctggaatccaaggaactggtgaaatccgtgcgggcactcctggacatggactgcttaccctacggttgggaggaggcctacactgccgatggaatcaaatatttcatcaaccacgttacacaaacaaccagctggattcacccggtgatgtcggtactgaatctatctaggagcgaggaaaatgaagaagattgcagccgtgagctgcccaatcagaaatcctag

SEQ ID NO: 24558 - DNA, 564 bp, synthetic construct
  source 1..564: mol_type = other DNA; note = Synthetic coding sequence
atggccgcccccggcgccctgctggtgatgggcgtgagcggcagcgggaagagcaccgttggtgccttgctagcttctgagctgggctggaagttttatgacgcagacgactatcatccagaggaaaaccggcgtaaaatggggaagggtattcccctcaatgatcaggatcgcattccctggctttgtaaccttcacgatattctgctccgcgatgtggcgagcggccaaagagtcgtcttggcctgttcggcgttaaagaaaacctatcgggacattctaacccagggcaaggatggagtagcccttaaatgcgaagaaagtgggaaggaagccaagcaggccgagatgcagctcctggtggttcacctgtctggaagttttgaggtcattagcggcagactgctgaaaagggaggggcacttcatgcctcctgaattactgcagagccagttcgaaactctagaaccccctgccgcaccagaaaacttcattcagatatccgttgataagaacgtgagcgaaattatcgctactataatggagaccctcaaaatgaaatag

SEQ ID NO: 24559 - DNA, 1134 bp, synthetic construct
  source 1..1134: mol_type = other DNA; note = Synthetic coding sequence
atggccaccatccccgactggaagctgcagctgctggcccggcggcgccaggaagaagcgtctgtacgggggcgcgagaaggccgaaagagagcgtctcagtcagatgcccgcgtggaaaagaggactgctcgaaagaagacgggccaagctgggcctgtccccaggcgagccaagtcccgtgttgggtactgtggaagcaggtcctcctgatcccgatgaatctgccgtcttgctggaggccattggcccagtgcatcagaatcgattcattagacaagagagacagcaacagcagcagcagcagcagaggagtgaagaactcctggcagaacgcaagcccggtcccctggaggccagggaacgcagaccctcaccaggggaaatgcgtgaccagagccctaaaggcagggagagtagagaggagcgcctgagtcccagagagacaagagagaggcgcttgggcataggaggcgcacaggaattgagtctgcgcccactggaggcacgcgattggaggcagagtccgggggaagtcggggatcggtcatctaggcttagcgaagcttggaagtggagactgtcgcccggggaaacgccggaacgatccctccgcttagccgagagtcgggagcagtcacctcggcgcaaggaggttgagtctcgattgtcccctggcgagtctgcttatcagaaactaggtctgaccgaggcgcacaaatggagacccgacagtagagaaagccaggaacagtctttagtgcagttagaagctaccgaatggcgcctgcggtctggcgaagagcgccaggattacagcgaagaatgcggtaggaaagaagagtggcctgtgcccggcgtggcacccaaagagaccgcggagctgagcgagacactgacaagagaagctcagggaaacagttctgccggagtggaagcagctgagcaaaggcctgtggaggacggtgagcggggcatgaagccaactgaaggatggaagtggacgctgatcatgagcctggccggaaaaggcaaccagcacctggtcacgtgcttcccccatcccgtgagtggtgggcgagctaattgtccgatttctactctgatccagagcccctggtgtggttggggatag

SEQ ID NO: 24560 - DNA, 2223 bp, synthetic construct
  source 1..2223: mol_type = other DNA; note = Synthetic coding sequence
atggaggccgacggcgacggcgaggagctggcccggctgcggagcgttttcgcagcttgcgacgctaaccgcagcggccgtctggaaagagaagaattccgggcactttgcaccgaactccgggtcaggcctgctgacgcagaggccgtgtttcagagactggacgccgaccgagatggggccataaccttccaagagttcgcgagagggtttctcggatccctgcgcgggggccgtcggcgcgattggggacccctcgatccagctcccgccgtctcggaggccgggcctgaaacccatgactctgaggaggacgaaggcgacgaggacgcagccgccgcccttgcaaccagttgcggccccgccagtccgggccgagcctggcaggacttccaagccaggctgggggatgaggcaaagtttattccacgcgaagagcaggtgtctacgctgtatcagaacattaacctcgtggaaccccggctgattcaaccgtatgagcacgtgatcaaaaattttatccgagagattcgattgcagtccaccgaaatggagaacctagccatcgcggtgaaacgtgcacaagataaagcggctatgcaactttcggagcttgaagaagaaatggaccagcggattcaagccgccgagcacaagacacgcaaagacgagaaacggaaggcggaagaggccctttctgacttgagacgccaatacgagacagaagtgggagacctgcaggtgactatcaagaagctgcgaaaattagaggaacaatccaagagggtttctcaaaaggaagatgtggccgcccttaagaaacaaatctacgacctgtcgatggaaaatcagaaggttaaaaaggatctcttagaagcccagacaaatattgcatttctgcagagcgagctggatgccctcaaatccgattatgcagatcagtcactgaatacagagcgcgatctggaaataattcgcgcttataccgaggatagaaattccctggagcggcagatcgaaatcctacaaactgccaacagaaagctgcatgactccaatgatggtttaagaagtgctttggagaatagctattccaagttcaatcgtagcctccacattaataatatctcaccaggcaatactatttcccgaagtagtccgaaattcatcggccacagtccacagccactgggatacgaccgaagcagcagatcttcctatgtggatgaggattgcgatagcctggccctctgtgatccactgcagaggaccaactgcgaagtcgattctctgcctgaatcctgctttgacagtggcctctctactctcagggacccaaacgagtacgatagcgaagtggaatataagcaccagcgaggcttccagcggtcccatggcgtgcaggaaagtttcggcggtgatgcgtcggataccgatgtccccgatataagagacgaggaaacatttggcctcgaggatgtggcgagcgtacttgattggaagcctcagggttccgtctccgaggggtctatcgtttccagttctaggaagcctattagtgccctatccccccagaccgatctcgtggacgacaacgcaaagtccttttcttctcagaaggcatacaagattgtgctggccggggacgcagccgtgggtaaatcaagttttctgatgcgactgtgtaagaatgagttccgagagaatatctccgccaccctaggggtggacttccaaatgaagacactcatcgtggatggtgagaggacagtgctgcaattatgggataccgccgggcaagagcggttccgctctattgctaagtcctactttcgtaaggcagacggtgtacttttgttgtacgacgttacatgtgagaaatctttcttgaacattagggagtgggttgacatgatcgaggacgctgcccacgagaccgtgcccattatgcttgttggcaataaagcggacatccgagacactgctgcaacggaggggcaaaaatgcgtgccgggacacttcggtgagaagttggccatgacctatggagccttgttttgtgagacgtccgccaaagatggcagtaacatcgtagaggccgtactgcatctagcgagggaggttaaaaaacgcacggacaaggatgattcacggtccattaccaacctgaccggcacgaacagtaagaagagccctcagatgaaaaactgctgcaatgggtag

SEQ ID NO: 24561 - DNA, 4125 bp, synthetic construct
  source 1..4125: mol_type = other DNA; note = Synthetic coding sequence
atggaggagaacgagagccagaagtgcgagccctgcctgccctacagtgccgacagacgtcagatgcaggagcagggcaagggcaacctgcatgtcacatctccagaggacgccgagtgccgaagaaccaaggaacgcctttccaatggaaattcccgaggatccgtgagcaagagtagcagaaacattccaaggagacataccctcgggggtccacggtcttctaaagagattctgggaatgcagacctcagagatggacagaaagcgggaggccttcctggagcatctgaagcagaaatatccgcatcatgctagcgctattatggggcatcaggagaggcttagggatcagactcgcagtcccaaactgtcccattccccacagcctccgtccctgggtgacccagtggagcatctctcggaaacatccgctgactctctcgaagccatgagtgaaggtgatgcccccacgcctttttctcgaggcagccgtaccagggccagtttgccagtcgtccgatccacgaatcagactaaggagcggtcactgggtgtcctgtatttgcagtatggggatgaaacaaaacagctcagaatgcctaacgaaattaccagcgcagataccattcgcgccctgtttgtgtcagcttttccccaacagctcaccatgaagatgctggagtctccttctgtagccatttatattaaggacgaatctcgtaatgtttactacgagcttaacgatgttcggaatatccaggatcggtccctgctgaaagtctataacaaagaccccgcccacgcatttaaccacacacctaagaccatgaatggcgacatgagaatgcagagagaactagtgtatgccaggggagatggacccggagcaccacggcccgggtcgaccgcccatccaccacacgccattccaaactccccaccgagtacacccgtgcctcatagcatgcccccatccccaagtcgtataccctatgggggcacacgctcaatggtggtgcccggaaacgccaccatacctcgcgataggattagcagcctaccagtgagtcgcccaatctctcctagcccttccgcaatccttgaaaggagagatgtgaagcccgatgaggacatgtcaggtaaaaatattgctatgtaccgcaatgaagggttctatgccgacccatacctttaccacgaaggccgtatgtcaatcgcaagctcacatggcggccacccactggacgtacccgaccatataattgcttatcatcgcactgcaatccgatccgccagtgcttactgcaatccgagcatgcaggcagaaatgcacatggagcagtccctgtacaggcagaagtccaggaagtatccggattcccacctgcctaccttggggagcaaaacacctcctgcttcacctcatcgggttagcgacctgagaatgatagatatgcacgctcactacaacgcccatggccccccacacaccatgcaacccgacagagcctccccaagtcgtcaggcattcaagaaggagccaggcactctggtttacatcgagaagcctaggagcgctgcaggcttgagcagtctggtggatcttggtccacctttgatggagaagcaggtgtttgcatactctacagccacaatcccaaaagacagggaaacttccgaaaagatgatgaaaacaacggccaatcgcaatcacacagattcagccgggacaccacacgtatcaggcggcaagatgctatccgctctggagtctactgtgcccccctctcagcctccccccgttggaaccagtgcaatacacatgtcccttttggaaatgcggcgttcggtggcggaactgcgactgcagctgcagcagatgaggcagctccagctccaaaatcaagagctgttacgagcgatgatgaaaaaggctgagttggagatttccgggaaagtaatggaaaccatgaaaaggctggaggacccagttcaaagacaaagagttctcgtcgaacaagaacgccagaagtacctgcacgaggaggaaaaaattgtcaagaagctgtgcgagctggaagattttgtggaggacctgaagaaggattccaccgcagcctctcgacttgtcactctgaaggacgtggaggatggcgcctttctgctgaggcaagttggggaggcagtcgccacacttaagggagaattccccactctccagaacaaaatgagggccatcttgcgcatcgaggtagaggccgtgaggttcctgaaggaagagcctcacaagttggacagtctcttaaagcgggtgcggagcatgaccgatgtgctcacaatgcttaggaggcatgtaactgatggcctcctgaaggggacagacgcggcccaagcagcccagtatatggctatggagaaggccacagcagccgaagtgcttaaatcgcaggaagaggctgcacatacatcaggccagcctttccactcaactggcgccccgggggatgccaaatcagaggtggttcccctctctggcatgatggtgaggcacgcacaatcttctcctgtggtcatccagccaagccaacacagcgtggcactcctgaatccagctcagaacctccctcacgtcgcatcttccccggccgtcccccaggaagccacttccactctgcaaatgagccaggctccacaatcaccacagatacccatgaatgggtcggctatgcagtcgctgttcatagaagagattcactcggtgtcagccaagaatagggcagtctctattgagaaggccgaaaaaaagtgggaagaaaagaggcagaatctggaccattataacggaaaggagttcgagaagcttttggaggaggcgcaggccaacataatgaaatcaattccaaatctcgaaatgccaccagctacagggccattgcctcgcggggacgctccggtagacaaagttgaactgagtgacagtcccaactcagagcaggaccttgaaaaactcggaggaaagagcccgcctcctccgccccctccgcccagacggtcttacctcccaggaagcggactgacgacaactaggtctggagacgtggtttataccggaagaaaagagaacattacagctaaagcttcctcggaagatgccggaccaagtccacaaaccagggctacgaagtacccggccgaggagccagcatctgcctggaccccatccccgccgcccgtcacaactagttcctccaaggacgaggaggaggaggaggaagagggagacaagatcatggctgagttgcaggcattccaaaagtgcagtttcatggacgttaactctaattctcacgcagagccatcgcgggcagactcccacgttaaggatacaaggagcggcgccacagttcctcctaaagagaagaagaaccttgagttctttcacgaggacgtgaggaaatctgatgttgagtacgagaatgggcctcagatggaatttcagaagggatcctcaggagccccccaaacttccagaatgcctgtgcccatgtcagcgaagaatcgaccgggtacgttggacaagccaggaaagcagagcaagctgcaggacccacgacagtatcgccaagccaacggcagtgcgaagaagtcaggcggggacttcaagcccacttccccatctttgccagcatcaaagattcccgccctgtccccgtcttctggaaaaagctcatccttgccttcttcttctggtgattcctccaatctgccaaacccccccgccactaaaccctctatagcaagcaatcctctgagcccacagactgggcctccagcacactccgctagcctgattccctccgtttccaacggctccctgaaatttcaaagcttaacacacactggaaagggacatcatctgtcattcagtccacagtctcagaatggacgtgcaccaccacctctgtccttcagctcatctcctccatctcctgctagtagtgtctccctaaatcaaggggcaaaaggcacgaggaccattcacacacccagcctcacaagctacaaggctcagaatggcagtagttccaaggctactcccagtaccgcaaaggaaacatcttag

SEQ ID NO: 24562 - DNA, 5832 bp, synthetic construct
  source 1..5832: mol_type = other DNA; note = Synthetic coding sequence
atggaggagaacgagagccagaagtgcgagccctgcctgccctactctgccgaccggcgccagatgcaggagcagggaaagggtaacctgcacgtaacatctccagaggatgccgaatgtcggcgtacgaaggagcgattgtccaatggcaatagtcgggggtccgtcagcaaatcttccaggaacataccgcggcgtcacaccctgggcggacccagatcctcaaaggagatcctgggcatgcagacatccgaaatggatcggaaacgggaagctttcctcgagcatctcaagcagaaatacccccatcatgcatctgccataatggggcatcaggagcgtctgagggatcagaccagatctccaaaattgagtcactcaccccaacccccttcactgggagaccccgtggaacacctgagtgaaacctcggccgactctctcgaggcaatgtcagagggagacgctcctactccatttagccggggctctagaacacgagcgagtctgccagtcgtgaggtccacaaatcagaccaaagagcgttcccttggtgttctctatctgcaatatggagacgagacaaagcagctgcgcatgccgaacgaaatcactagcgcagacactattagggctctgtttgtttcagccttcccccaacagctcacaatgaaaatgttggaaagcccttccgtcgctatttacatcaaggacgaatcacgaaacgtctattacgaacttaacgatgtcagaaatattcaggacaggtccttactgaaggtatataacaaagaccctgcacatgcgttcaaccacaccccaaagacaatgaatggggacatgagaatgcagcgagaacttgtttacgctagaggcgatggcccaggcgctccccggcctgggtcaactgcacatcccccacacgccattcccaactcaccaccgtcaacacctgtcccccactctatgcccccttcccctagccgtattccctacggaggtacacggtccatggtggttccagggaacgccactatcccgcgggaccggatcagcagcctccccgtatctcggcctatttcaccctcgccatcggctatcctcgagcgccgcgatgtcaaaccggatgaagacatgtctgggaaaaacatcgctatgtaccgaaatgagggattctacgcagatccatacctgtatcatgagggaaggatgagcattgcctcatctcacggcggacatcctctggacgtcccagaccacataatagcgtaccaccggacagctatacggagtgcctcggcatactgtaacccctctatgcaggcagagatgcacatggagcagtccctgtaccgacaaaaatccaggaagtatccagactctcacttgcccactttggggtcaaagacaccccccgccagccctcaccgtgtctccgacctgagaatgatagatatgcacgctcattacaacgcccatgggccgccacacactatgcagccagaccgggcctctcctagccgccaggcttttaaaaaagagccggggaccctcgtctacattgagaagccgagatccgcagctgggctctcctcactggtcgacttggggccaccgctgatggagaagcaggtattcgcgtattccaccgccaccatccccaaggatagggagactcgcgagcggatgcaggcgatggaaaagcagatagcgtctttaacaggactggtccaaagcgccctattcaagggccctattacttcttattcaaaagatgcatcatctgagaagatgatgaagaccacagcaaaccggaatcatacagattcagctggaaccccgcacgtcagcggaggtaaaatgctgtctgccctcgagagcaccgttccaccgagccagccccctcctgtgggcacctcagccatacacatgagtctgctggagatgcgtagaagtgttgcagagctgcgccttcaattgcaacagatgaggcagctgcagctccagaaccaggagcttcttcgagcaatgatgaagaaggccgagttggagatctctgggaaggtgatggaaacgatgaaacgtctggaggacccagtacaaagacaacgagtgctggtcgaacaggagaggcagaagtacctgcatgaagaagaaaagattgtcaagaagctctgtgaactcgaagatttcgtcgaagacctcaaaaaagatagcaccgctgcgagtcgcctggtcacactgaaggatgttgaggacggggctttcctgctgcgacaagtcggggaggcggtggccaccctgaagggggaattccctacactgcaaaataagatgagagccatcctgagaatcgaggttgaggccgtcagatttctgaaagaagagcctcacaagttagacagtctgctgaagcgcgtgcgttccatgactgacgtgttgaccatgctcagacgacatgttacagacggcctgttaaaaggcaccgacgccgcccaggccgcccagtacatggctatggaaaaggcaacggctgccgaagttctgaaaagccaggaagaggcagctcatacatccgggcaacctttccatagcactggggctccaggagatgctaaaagcgaggtagttccactatctggcatgatggtgaggcacgcccaaagctcaccggtggttatccagcccagccaacactcagtggccttgctgaacccagcccagaacctgccccacgttgcgtcatcaccggctgttcctcaagaagcgacgtcaacgttgcagatgtctcaggcccctcagagtcctcagattcccatgaacgggagcgccatgcagagcctgtttattgaggagattcacagtgtgtctgctaagaatagagcagtgtcaatcgaaaaagcggagaagaagtgggaggaaaaaagacagaatctcgaccactacaatggcaaagaattcgagaaactactcgaggaagcacaggcgaacatcatgaagagtatccccaacctcgagatgccaccggccacagggccattgccccgcggggacgctccagtggataaagttgaattgagcgaagattcgcccaactccgaacaggatttggagaagcttggcggcaaaagccctcctccacccccgccaccccctaggcgatcttatcttcccggctctggtctcaccactactcgctctggcgacgtggtgtacacaggccgcaaggaaaacatcacagcaaaagcctcctctgaggacgctgggccctctccacagacacgggctaccaaatatccggccgaggagccagctagcgcttggactccgtcgcccccccctgttaccacatcatcgtctaaggatgaggaggaagaggaggaagagggggataaaattatggctgagctgcaggcgttccagaaatgttccttcatggatgtgaattccaacagtcatgcagagcccagccgcgctgactcacatgtgaaagataccagatccggggccactgtacccccaaaagaaaagaagaatcttgaattctttcatgaagatgtgaggaaatccgatgtcgagtatgagaatgggccacagatggaattccagaaggtgaccactggagccgtgcgaccttctgatccacctaagtgggaacgtggcatggagaactcaatttctgacgcaagccgaacctcagagtataagaccgaaattatcatgaaagaaaattccatctcaaatatgtcacttctgcgagattccagaaattatagtcaggagacagtccccaaagcctcatttggattctcgggcatatctcctttagaggacgagataaacaagggctctaagatttctggtctccagtactccattcctgatacagaaaaccagacccttaactacgggaagacgaaggagatggagaaacagaacaccgacaagtgtcacgtctcttcccacacaaggttgactgaatccagtgtgcatgattttaagaccgaggaccaagaggtgataaccaccgactttgggcaggtggtgctgcggcccaaggaggcaaggcacgccaacgtgaacccaaacgaggatggcgagtccagctcctctagtccgactgaagaaaacgctgctacagacaacatagcctttatgattactgagacaaccgtgcaagttttgtcgtctggagaggtgcatgacatcgtttcccagaagggggaggacatacagacagtcaatatcgacgcgcgcaaggagatgacccctcgccaagagggaacagacaacgaagaccccgtcgtgtgcctggataaaaaacctgtaattattattttcgacgaacccatggacattagaagcgcctacaaaagactgtccacgatcttcgaagaatgtgacgaggaattagagcggatgatgatggaggagaaaatcgaagaggaagaagaagaggagaatggcgattccgtcgtccagaacaacaacacctcacagatgtcccacaaaaaggtggcccccggaaatctcaggacggggcagcaggtggaaacgaaatcccagcctcacagcctagctactgagacacgaaatcccggcggtcaggagatgaacagaactgagctcaacaaatttagccatgtggactctccgaacagcgagtgcaaaggagaggatgccacagacgaccagttcgaatctcctaaaaagaagtttaaatttaaatttcctaaaaagcagctggccgcccttacccaggccataagaactggcaccaagacaggcaagaaaaccttgcaagtggttgtgtatgaagaggaagaagaagacggcacgctgaagcagcacaaggaggctaagcgatttgaaatagcccgctcccagcctgaagatacccccgagaacacagtgcgacgccaggagcagccgtcaattgaatctacgtctcccataagtcgcaccgacgagatccgtaagaatacgtacagaacactcgatagccttgaacagactatcaagcagctggaaaacacaatttctgagatgagtccaaaagccctcgtggacactagttgtagctctaaccgggacagcgttgcctcttcatcacatatagctcaagaggcttctcccagacccctcctggtgcccgacgaaggccccacagcactcgaaccacccactagcattccctctgcatcccgcaaaggctcctctggtgcccctcagacaagtagaatgcctgtgcccatgagtgccaaaaatcgccctggcacgctcgataaacctgggaaacagtcaaagctacaggatcctcgacagtatcgacaagcaaacggcagcgccaagaagtcagggggggacttcaagcccacgtcaccctctttgcctgctagtaaaatccccgctcttagcccctcctccgggaagtcctcctcactgccatcttccagtggggacagctccaacctgccgaaccctcccgccactaaaccgtccatcgcctctaatcccctgagcccccagaccggtccccccgctcattcggcaagcctgatccctagtgttagtaacggtagcctgaagtttcagtccttaacccatactgggaaaggtcatcacctctcgttttcaccacaatcgcagaacggccgggcgcccccgcctctaagttttagctctagcccacccagcccagcctctagtgtatctctgaaccagggcgctaaggggactcggacaattcacactccaagtttgacctcctataaagcacaaaatggctcttcctcaaaagcaaccccgagtacagctaaagagaccagttag

SEQ ID NO: 24563 - DNA, 3795 bp, synthetic construct
  source 1..3795: mol_type = other DNA; note = Synthetic coding sequence
atgcagaccagcgagatggaccggaagcgggaggccttcctggagcacctcaagcaaaagtatcctcatcatgcctccgccatcatgggccaccaggaacgcctccgcgaccaaactcggtcacccaagctgtcccattcgccccagccaccgagtctgggcgaccccgtggagcatctgagtgaaacctctgccgattccctcgaagccatgtcagagggcgatgcccccacaccattctctcgagggagccgtacccgtgcttctttacccgtggttcggtccacaaatcagaccaaagagcggagccttggagtactgtacctgcagtatggggacgaaactaagcagctccggatgccaaatgagattacatctgcagatactatacgtgctctcttcgtgagtgcgttcccccaacagctcaccatgaaaatgctcgaatctccttctgtagccatttacattaaggacgagagcaggaatgtgtattatgagctgaatgacgtaagaaacattcaggaccgctcattgttaaaagtttacaacaaggaccctgcccacgcattcaatcatacacctaagaccatgaacggcgacatgaggatgcagagggagctcgtctacgcacggggcgacggacccggtgcgccacgccccgggtccactgcacatcctccacacgccattccgaactcccccccatcaaccccagtgccacattccatgccaccctccccctcacggataccctacgggggcacacgaagcatggtagtgcctggaaacgccactattcctcgggaccgtattagctctcttcccgtatctaggccaatctcaccttccccaagtgcaattctggaacgcagagacgttaagcctgatgaggacatgtctggtaagaatattgctatgtatagaaatgaaggattttacgctgacccctacttgtaccatgagggaaggatgagcatagccagcagtcatggtggccatcccctggatgttccggaccatattatcgcatatcaccgaaccgccatcaggagcgccagtgcctattgcaatccaagcatgcaggccgagatgcacatggagcagtcactgtatagacagaagagtcggaaatacccggattcccacttacccacccttggatccaaaactccacctgccagtccccaccgtgtgtcagacttgcgtatgattgatatgcacgcccactacaacgcccacggccctccacatacgatgcaaccggatagggcaagcccaagtcgccaggcgtttaagaaagagccgggtacattagtctatattgagaagcctagaagtgcggccgggcttagcagcttggtcgacttgggcccccctctgatggagaaacaggtgtttgcctatagcaccgcaactattcctaaggaccgggagacacgagaaaggatgcaggccatggagaaacagattgcctcactaacagggctggtacaaagcgctttattcaaaggccccatcacctcctatagcaaagatgccagtagtgagaagatgatgaaaaccacagccaatcgcaaccatacagactcggctggcaccccacacgttagcggcgggaagatgctatctgccttggagtctactgtgcccccaagtcagcctccacctgttggcacctcagcgatacacatgtccctgctagagatgcggcggtcagtagcggagctgcggctccagctgcagcaaatgcgacaattgcagttacaaaaccaagaattgttgcgtgccatgatgaaaaaagccgaattagaaataagtggaaaggtcatggaaactatgaagcgtttagaagatccggtccagagacagcgagtacttgtagaacaggaaagacaaaagtatctacacgaagaggagaagattgtgaaaaagctgtgtgaactcgaggattttgtggaggaccttaagaaggactccaccgcagcaagcaggcttgtcaccttaaaagacgtcgaggacggagccttcctgctgcgacaggtgggcgaggccgtggccactctcaagggagagttcccaaccctgcagaacaagatgcgtgccattcttcgtatcgaggtcgaggccgtgagattcctgaaggaggagccgcacaagcttgattccttgttgaaacgtgtcagaagcatgaccgacgtcctaacaatgcttaggcgtcacgttactgatgggctgctgaaaggcaccgacgccgcacaagctgctcagtatatggccatggaaaaggccacagcggcagaagtgcttaaatcacaggaggaagcagctcacacgagtgggcaacccttccattccaccggtgccccgggagacgccaagagtgaggtggtccccttatcaggaatgatggtccggcacgcccaatcatcacccgttgtcatccaacctagccagcattctgtagctttgctgaatcctgcccaaaatttgccgcatgtcgcctcaagtccagccgtgccccaggaagcgacatctacattgcagatgagccaggcgccacagtcccctcagatcccgatgaatgggtctgctatgcagtctttgtttattgaggaaatccattcagtcagcgcgaaaaacagagctgtgtcgattgaaaaggccgagaagaagtgggaagagaaacgccaaaatctggaccattacaatggcaaggagttcgagaagctgcttgaagaggctcaggccaatattatgaagagcattccaaaccttgagatgccgcctgctacaggcccactgcctcggggcgacgctcctgtggacaaggtcgaattaagtgaagacagtcctaactctgagcaagacctggaaaaactgggaggtaagtcgcctcctccaccccccccacccccgcgccgctcctacctccccggcagcggcctgacaacaaccagatctggggacgtagtgtacactggccggaaagagaacatcaccgctaaagcttcgtcagaggacgccgggcccagcccccaaactcgcgcaaccaaatatcctgccgaagagcccgcctctgcctggacccccagccctccaccagtgactacatcctcctcaaaagacgaggaagaggaggaggaagagggtgataaaatcatggccgagctccagggcagtagcggcgcgcctcagacctccaggatgcctgttcccatgtctgccaaaaaccgccctggaacacttgacaaacctgggaagcagtcaaaactccaagatcccaggcagtaccggcaggccaatggatcagccaaaaaaagcggaggcgacttcaagccaacgagcccttccctcccggccagtaaaatccccgctctatccccaagctcagggaagagctcgtcattgccatcctctagcggggatagcagtaacctcccaaaccccccggcaacaaagccctccattgcatccaatcccctgagccctcagaccggtccacctgcccactcagcgagtctgatccctagcgtaagcaacgggtcccttaagttccagagtctcactcatactggaaaaggccatcacctgtcttttagccctcagtctcagaatggcagagcaccgcctcctctgagtttctcttccagccccccaagtccggctagtagcgtctcgctgaatcagggtgccaaagggactcgaaccatccatacaccatctctgacctcatacaaagctcagaacggctcctcctctaaagcaaccccctccacggcaaaggaaacctcttag

SEQ ID NO: 24564 - DNA, 531 bp, synthetic construct
  source 1..531: mol_type = other DNA; note = Synthetic coding sequence
atgggctgctgcggctgcagcggcggctgcggcagcggctgcggcggatgtgggagcggttctggtggctgtggcagcggctgtgggggatgcggaagttcttgttgcgtgccaatctgttgctgcaaacctgtgtgttgctgcgtccctgcctgttcgtgctcctcatgcggaagctgtggtggcagcaagggagggtgtgggtcgtgtggtagttctaaaggcggctgtggatcctgcgggtgtagccagtccaattgttgcaagccatgctgttcatcctccggttgtggatcattttgttgtcagtcctcttgcagcaaaccatgttgctgccagtcgagctgctgccagagctcatgctgtaaaccctgctgttgccagagctcttgctgccagagtagctgctttaaaccctgttgctgtcaatcctcatgttgcgtgcctgtatgctgccagtctagctgctgcaagccttgctgcagtcagtcctcctgttgcgtgccaatctgctgccagtacaagatatag

SEQ ID NO: 24565 - DNA, 513 bp, synthetic construct
  source 1..513: mol_type = other DNA; note = Synthetic coding sequence
atgggctgctgcggctgcagcggcggctgcggcagcggctgcggcgggtgcggttcaggctgtggaggatgtgggagcggatgcggtgggtacggcagcggctgcggaggttgtggaagttcctgttgcgtgccagtttgctgctgtaagccggtgtgctgttgtgttcctgcttgctcctgtagcagctgtgggtcttgcggaggaagcaagggcgactgcggctgcggcagctgtggcggatcgaaagggggttgtggaagttgtggctgcagtcaatgcaactgctgcaagccatgctgttgcagctccggctgtggcagctgttgccagtcttcatgctgcaacccctgctgttgccagtcgtcttgctgtgtgcccgtgtgctgtcaaagttcgtgctgcaagccttgttgctgccaaagctcctgctgcgtgccatcttcctgctgccgttcttgctgttcgaagagctcttgttgcgtgcctatctgttgccaatataaaatttag

SEQ ID NO: 24566 - DNA, 2169 bp, synthetic construct
  source 1..2169: mol_type = other DNA; note = Synthetic coding sequence
atgatcgacagcgtgaagctgcggcgggacagcgccgccgacttcttcagtcactacgaatacctctgcgccctccagaactcagtgccattacctgcggtgcgggcctgtttgcgggagggtgtactggacttcaatgctgatcgtctacgcggcgttgattgggcccctctcctgagtacgctgaaaataaataaagatctaccactggtcagcatcaagtccttcttccagccttggctgggtgacactgggagcgatatgaacaagttctgcaggtctcgtgtgccggccattcggtataaagacgtgacctttcaactgtgcaaggccctcaagggctgcttgtcaataagctccgtgctgaagaatcttgagcttaacggtctgatactccgcgagagagatcttaccattctggcaaagggactgaacaagagcgcatctcttgtacacttgtccctcgctaactgcccaatcggagatggaggcttggagatcatttgtcagggcatcaaatcctcaatcaccctgaagaccgtgaattttacaggatgcaatctgacctggcaaggtgctgaccacatggccaagattctgaaatatcagactatgcgccggcatgaagagacttgggcagaaagtctgagataccgccgccccgacctggattgcatggccggactgcgaagaatcaccctaaactgcaacactctgattggggatttaggagcttgcgcttttgccgattcgctgtctgaggatttgtggctgcgtgccctagacctccagcagtgcggacttacgaacgagggagctaaggcgttgttggaagctctcgagactaacacgacactggtggtgctcgatatccgcaagaaccctctcatcgatcatagtatgatgaaggcagtgattaaaaaagtgctgcaaaatgggcggtccgctaagtccgagtaccaatggatcacttccccatcggtcaaagagccatctaaaactgccaagcagaagaggaggacgattatcctggggtccggccataagggtaaggctactatcaggattgttggcctggccaccaaaaagccagtcagcagtggacgcaagcattcccttggcaaagagtattacgcccctgctccactccctccaggcgtgtccggtttcttgccctggagaaccgccgaacgggccaagcgacatcgcggctttcccctgattaaaacacgggatatttgcaaccagctccagcaaccagggttcccagttaccgtcactgtagaatcgccttcctcctcagaagtagaagaggtggacgattcgtccgagtcagtccacgaagtgccggaaaagacctccattgaacaggaggctttacaggagaagctcgaagagtgtctaaagcagcttaaagaagagcgagtcatccggttgaaggttgataagcgggtgagcgaactagagcacgaaaatgctcagttaaggaacatcaatttttccctgtccgaggcgttgcacgctcagtccttaactaatatgatcctcgacgacgaaggcgttctgggctctatcgagaattctttccagaaatttcacgctttcttggatctgctgaaggatgcaggacttgggcagctggcgacaatggctggcatcgatcaatcagattttcagttgttgggccatccccaaatgacatccaccgtgtctaatcctccgaaggaagaaaagaaggccctggaggatgagaagcctgagccaaagcagaatgctcttggacagatgcagaatattcaggtgagcatttgtatgcagagcgcctataatgaagggacattgatgaagttccagaagattaccggggacgcccgtatcccactgcccctggactcgttccctgtgccggtatcgactccagaaggcttaggcacatctagcaataatctcggtgtaccagccaccgaacaaagacaggagtctttcgaaggattcattgctcggatgtgcagcccgtcgcctgatgccaccagcggcaccggatcccagcggaaagaagaggaactgtctagaaactcgaggtccagctcagaaaagaaaactaagacgggagaatacacgaaaaagcattcagataaacagcacccaggcaaagatctccactcctag

SEQ ID NO: 24567 - DNA, 1122 bp, synthetic construct
  source 1..1122: mol_type = other DNA; note = Synthetic coding sequence
atggccctgaacgtggcccccgtgcgggacaccaagtggctgaccctggaggtctgcaggcagtttcagagaggcacctgtagtagatcagatgaggagtgcaagtttgctcaccccccaaagtcgtgccaagtcgagaatggccgcgtgatagcatgttttgattctctaaagggccgatgtagtcgtgagaattgtaagtatctccacccaccgacacatcttaagacacagctcgagatcaacggaaggaataatctgatccagcagaagacagccgccgccatgttggctcagcaaatgcagttcatgttccctggcactccattgcatccagttcctacgttccctgtcggaccagctattgggaccaatacagctattagtttcgctccttatttagcacctgtcactccgggtgtcggcctcgtgcctacagagatcctacccaccacacccgtcattgttcctggctccccgccggtaaccgtgccagggtctacagccacccagaagttacttagaaccgacaagctggaagtttgcagagaatttcaacgaggaaactgcgcaagaggcgaaaccgattgtcgtttcgcacatcccgctgattctactatgatcgatacatctgataacacggtgaccgtatgtatggattacataaaaggccggtgtatgagagagaagtgcaagtatttccaccccccggcccacctgcaggccaagattaaagccgcccaacatcaagctaaccaggctgcggtcgcagcccaagccgcagccgcagctgcaactgtcatggctttcccccctggtgcgctgcacccactacccaagcggcaggcactggagaagtcaaatggcacaagtgccgtatttaacccttcagtgctgcattaccaacaagctcttacaagcgcccaactgcagcagcacgctgcatttatcccaactgggagcgtgctgtgtatgactccagctacgagcatagacaattccgagataatctcaagaaatggtatggagtgtcaggaatctgctctacgcataaccaagcactgctactgtacctactaccccgtaagcagtagcattgagttgccacaaacagcgtgttag

SEQ ID NO: 24568 - DNA, 321 bp, synthetic construct
  source 1..321: mol_type = other DNA; note = Synthetic coding sequence
atgacccagagcaccgccaaggccatgaagcggcccctggaggccaccgtcgacttggcttttccgccaggggccctgcacccgctgccaaagcgtcaagcgctcgagaagtcaaacggaactagtgcggtgttcaaccctagtgtactacattaccaacaagcactcacctcagcgcagctgcagcagcacgccgcctttattccgactgtgcctatgatgcactctgcgacaagcgcaactgtgagtgccgcaacaacacctgccacttcagtaccgttcgccgccacagccaccgccaatcaactggtgtactcgtag

SEQ ID NO: 24569 - DNA, 915 bp, synthetic construct
  source 1..915: mol_type = other DNA; note = Synthetic coding sequence
atggccaagatcgagaagaacgcccccaccatggagaagaagcccgagctgtttaacattatggaagtcgatggggttccaacgttaattttgtccaaggaatggtgggagaaggtgtgtaactttcaggccaaacccgacgatttgatactagccacctaccccaaaagcgggactacatggatgcatgagattctggacatgattttgaacgatggtgacgttgagaagtgtaaacgagcccagacccttgaccgtcacgccttcttggaactgaagtttccccacaaggagaagcccgatctggagttcgtgctggaaatgtctagcccacagctgataaaaacacatttaccaagccaccttatcccaccttcaatctggaaggagaactgcaaaatcgtttatgtggctaggaacccaaaagattgtctagtctcctactatcattttcatagaatggcttccttcatgcctgatccccagaatctggaggaattctacgagaagttcatgtcagggaaagtggttgggggctcctggtttgaccacgtgaagggctggtgggctgccaaagacatgcatcgcatcttgtatctattctacgaagatattaagaaaaaccccaagcacgagatccacaaggtgctggagttcctggagaaaacctggagtggcgacgtaatcaataagattgtgcaccatactagcttcgatgtaatgaaggacaatcctatggcgaaccacacggccgtgcctgcccatatctttaaccactccatctccaagttcatgcggaagggcatgcctggagactggaaaaaccatttcactgtggcgctaaatgaaaactttgataaacattacgagaagaagatggcggggtctactcttaacttttgtctcgagatctag

SEQ ID NO: 24570 - DNA, 1188 bp, synthetic construct
  source 1..1188: mol_type = other DNA; note = Synthetic coding sequence
atggccagcgccgccagcgtgaccagcctggccgacgaggtgaactgtccgatctgccagggcacgttgagggagccagtaacgattgactgtgggcataacttctgtagggcctgcctgacacgctactgcgagataccgggacccgatctggaggaatccccaacatgcccactgtgtaaagagccatttaggccagggtccttccgcccaaactggcaactggctaacgtggtggagaacatcgagaggcttcagctcgtgagcacattggggctcggcgaggaagatgtgtgtcaggagcatggcgaaaagatctactttttctgcgaagatgacgaaatgcagctctgcgtggtttgccgggaggccggggagcatgccacccacacaatgagatttttggaggacgccgcagccccatatcgcgagcagattcataagtgtctcaagtgtctcagaaaggagagggaagagatccaggaaatacagtctagagaaaataaaagaatgcaagtactgcttactcaggtatcaaccaaacggcagcaagtgattagcgagttcgcgcaccttcgaaaatttcttgaggagcagcagtccatcctcttagcgcagctggaatcacaggacggggatattctgaggcaacgagatgaattcgacctgctggtcgccggcgaaatatgtagattttctgctttgatagaagagttggaggaaaaaaacgagcgcccagccagagagctcctcactgatattagatccactctcattaggtgcgaaactcgtaagtgtcggaagcccgtggccgtgtcacccgaattaggacagcgaatccgcgactttccacaacaggctctgcccctccagagggagatgaagatgttcctggagaagctatgctttgagctggattacgagccggctcacatttcgcttgacccccagacctctcatccaaaacttttactgtcggaggatcaccagagggcccaattctcctacaagtggcagaactcgccagataatcctcagcggtttgaccgggccacctgcgtcctcgcgcataccggtattactggaggtcgccacacgtgggtttggatggcccgggtgcccggagattccggttgttgtcagttttgtagcccaccatcagtcctgggaactgaggtggctgcctag

SEQ ID NO: 24571 - DNA, 1446 bp, synthetic construct
  source 1..1446: mol_type = other DNA; note = Synthetic coding sequence
atggccagcgccgccagcgtgaccagcctggccgacgaggtgaactgccccatttgccaaggaaccctgcgcgaaccagtgactattgactgtggacacaatttttgtagggcctgcctgacacgctattgcgaaatccctgggcccgacctcgaggaatctcctacctgtccactctgtaaggagccattccgccccggctccttccgacctaactggcaattagccaatgtagtggagaacattgagaggctgcagcttgtctccacactcggactgggcgaggaggatgtgtgccaagagcatggcgagaagatatacttcttctgcgaggacgatgagatgcaattatgcgtcgtgtgcagggaagccggggagcacgccactcatacaatgagatttttagaggatgcagcagctccctatagggaacagatccataagtgcttaaaatgccttagaaaggagcgggaggaaattcaggaaatacaatcgagggaaaataaacgcatgcaggtcctcctcacacaagtttcaacgaaacgccagcaagtcatttccgagttcgcccaccttagaaagtttctggaggagcagcaaagcatcctactcgctcagctggagagccaagacggcgacatcctcagacagagggacgaattcgacctgctcgtggcaggtgagatctgcaggttttccgccttgattgaggaactggaggagaagaacgagaggcctgcgcgagaactcctcacagacatccgttcaacgttgattcgctgcgaaaccaggaagtgtcggaagccggtggccgtctctcccgaactgggtcagcggatccgggactttccccaacaggccctgccactgcagcgcgaaatgaaaatgttcctggagaacctacccaatcacttggtgatacccacagcccatatcagcttagatccacagacctctcacccaaagctcctcttgtctgaagatcaccaacgcgcacagtttagctataaatggcagaatagtcccgacaatcctcaacgctttgaccgcgccacctgtgtcctggcccacactggtataaccggcggccgtcatacatgggtggtctctatagacctggcacacggaggaagttgcacagtgggtgttgttagcgaagacgtccagcgaaagggtgagttgaggcttcggccagaggaaggagtctgggcagttcgcctggcctggggtttcgtctccgctctagggtcctttcctaccagactcacattgaaggagcaacctcgacaggtgagagtcagtctggactacgaagtgggatgggtgaccttcacaaatgccgtgactagggagcccatttatacatttaccgcatcgttcactagaaaggtaattcccttcttcgggctttgggggagggggagcagcttcagtctgagctcttag

SEQ ID NO: 24572 - DNA, 2604 bp, synthetic construct
  source 1..2604: mol_type = other DNA; note = Synthetic coding sequence
atgcaggccgaggccgccgactggttcagcagcatgcccttccagaagcacgtgtactaccccctggcatctggaccagagggacctgacgtggctgtggccgctgccgccgctggcgcggcttcaatggcctgtgctccaccgtctgccgctagcgggcctctgccctttttccagttcagaccacgcttagagtctgttgattggcgtcgactgtctgcaatcgatgtggacaaggtcgcgggcgctgtcgacgtgctgacccttcaggaaaacatcatgaatattacattttgtaagttagaggatgaaaagtgcccccattgccagtccggcgtggatcccgtgttactcaaactgatcagactcgctcaatttacaattgagtacctgttacactcccaggaattcctaaccagccagttgcacactttagaggagagactgcgcttgtcccactgcgacggtgagcagtccaagaaattactaaccaagcaggctggcgagatcaagacactgaaggaggagtgtaaaagaagaaagaagatgatctcaacccaacagctgatgatagaagccaaggccaactattaccagtgccacttctgcgataaagcctttatgaaccaggcctttctacagtcacatatccagcgcagacacactgaagagaactcccacttcgaataccagaagaacgcccaaatcgaaaagctgcgcagtgaaatcgtggtgctcaaagaggaactacagctgacacgttctgagttggaggccgcgcaccacgcttctgccgtacgtttcagtaaggaatacgagatgcagaagaccaaggaggaggatttcctaaaattgttcgaccgctggaaggaggaagaaaaggagaagttggttgacgagatggagaaagttaaggaaatgttcatgaaagagtttaaggagcttactagcaagaactctgccttggaataccaactgtctgaaatccaaaaaagtaacatgcagatcaaaagtaacatagggacattaaaagacgcacatgaatttaaagaggatcgatcaccatacccccaagactttcacaatgtaatgcaactcctcgactctcaagaatccaaatggaccgcgcgagtccaagccattcaccaggagcacaaaaaagaaaagggacgactactcagccacatagagaagctgcgcacgtccatgattgatgatctcaacgcaagcaatgttttttacaagaaaaggatagaggagcttggtcagagactccaagaacagaatgagctgattattacacagaggcagcagatcaaggactttacctgcaacccgctgaactctatttccgagcctaagggtaatccactggcatggcaagccttcgagtctcagcccgctgccccagcagtaccaatgaacgcccctgcactccataccctggagactaagagctcattgcccatggtccatgagcaagctttctcgagccacatactagagcctattgaggaactttccgaggaagaaaaagggagagaaaacgagcagaaacttaacaacaacaaaatgcacctgcgcaaggctctcaagtccaactctagtctcacgaaagggttacgtacaatggtggagcaaaacctgatggaaaaacttgagaccttggggataaacgctgacattaggggaatttctagcgatcagctgcaccgcgtgctcaaaagcgttgaatcagagagacacaaacaagagagggagattcccaacttccatcagatccgcgagttcctggagcaccaagtgtcatgcaaaattgaagagaaggcgttgttgagcagcgaccagtgttcagtatctcagatggacactctgagcaccggagaagtgccgaagatgatacagctacctagtaagaatcgacagctcattcggcagaaagctgtctcaacagaccggacgtccgttcctaagattaagaaaaatgtcatggaggacccgtttccaaggaagtcctcgactatcacgactcctcctttctcatccgaggaagaacaagaagacgacgatttgatacgtgcctacgcttctccaggccctctgccagtacctccaccacagaacaaaggctccttcggaaagaatactgtcaaatctgatgcggacggcacagagggtagcgagatcgaggacacagacgatagcccaaagcctgccggtgtcgcagtgaaaactcccactgaaaaagtcgaaaagatgtttccccacagaaagaacgttaacaagccagtcggcggaaccaacgtgcctgaaatgtttatcaagaaggaagagttgcaggagttgaagtgcgccgacgtggaggacgaggactgggatatctccagcttggaggaggaaatttcccttggcaaaaagtccgggaaggaacagaaggaacctcccccagccaagaacgaaccgcatttcgctcatgttctgaacgcttggggtgcatttaacccaaaaggcccaaagggcgagggactccaggagaatgaatcctccacactgaaatcctctctcgtaaccgtcaccgactggtctgatacatctgacgtgtag

SEQ ID NO: 24573 - DNA, 279 bp, synthetic construct
  source 1..279: mol_type = other DNA; note = Synthetic coding sequence
atggccaccccccccaagcggcgggccgtggaggccaccggcgagaaggtgctacgctacgaaaccttcatctccgacgtgttgcagcgggacctgcggaaggtgctggatcaccgggataaagtctatgagcagctcgctaaatatctgcaacttcgaaatgtgatcgagcggttgcaggttaaaacaatgggtctaggaaccatttttttggtatgtgtgggcaaggggggtaaatgggaagagcgtcttcagacgcagccttgccaccttacatag

SEQ ID NO: 24574 - DNA, 2532 bp, synthetic construct
  source 1..2532: mol_type = other DNA; note = Synthetic coding sequence
atggccgtggaggacagcaccctgcaggtggtggtgcgggtgcggccgccgacgcccagagagctggactcccagcggaggcccgtggtgcaagtcgtggacgagcgcgttttggtgttcaatcccgaagaacccgatggcggttttccggggctcaagtggggcgggacccatgacggacccaagaagaaggggaaagatctcacattcgtgttcgatcgtgtgttcggtgaagccgcaacgcagcaggacgtctttcaacacactactcattcagtgctcgacagttttctccaaggttataactgtagcgtcttcgcctatggagccactggagctgggaagacccacaccatgctcggtcgcgaaggcgatccaggcatcatgtacctgaccactgtcgagttgtaccgccgcttggaggcgcgccaacaagagaagcattttgaggtcctgatcagctatcaggaggtctacaacgagcagatccacgacctgctggagccaaagggtcctctggccatccgggaggatccagataaaggtgtggtcgtccaggggctgtcatttcaccaacccgcaagcgcagagcagctactggaaatcctgactcggggtaatcgaaacaggacgcagcatcctaccgacgcaaatgccacctcctccaggtcccatgcgattttccagatcttcgtaaaacagcaggaccgcgtgcctggcctcacccaggcagtgcaggtggctaagatgtctcttatcgatctggccggctcggagcgtgctagtagtacccacgctaagggtgagcggcttagagagggggcgaatataaataggtccctcttggccctcattaacgtcctgaacgcccttgctgacgcaaaaggccgaaagacacatgtgccatacagggactccaagctgacccgcctcttgaaggactcgctcggcggcaattgtcgtactgtgatgattgcagcgatatccccctcatcgctaacctacgaggatacatacaatactcttaaatacgccgacagagccaaggagatccgcctctctctgaaatcaaatgtcaccagtctggattgtcacatctctcagtacgccaccatctgccagcaacttcaggctgaagtcgcagcccttcgtaagaagctccaggtttacgaggggggcggccagcctccgcctcaggatctccctgggagtcctaagagtggtcccccccctgaacacctgccttctagcccgctcccacctcaccctccctcgcagccctgtactccggagctgcctgccgggccaagagccctccaggaggagagcctcggcatggaggcacaggtggagagggccatggagggaaactcaagtgaccaggagcaatcaccagaagacgaagatgagggacctgccgaggaggtgcccacccagatgccagagcagaaccctactcatgccctcccggaaagcccccgtctcacattgcagccgaaacctgtggtgggccatttctctgcccgcgagctcgatggcgatcgtagcaagcagttagccctgaaagtgttatgtgtggctcagcgccagtattctctattacaagctgccaacctactgacgccagatatgatcaccgagttcgagaccctgcagcagctggtgcaggaggagaaaattgagcccggggcagaggctctgagaacgagcggacttgctaggggggccccacttgcacaggaactgtgcagcgaatccattcccgtgccttctcccctgtgtcccgaaccacccggatatacaggccctgtgactaggaccatggcccgcagactgtccgggcccctgcataccctcggaataccccccggacctaactgcaccccagctcaaggctctcgctggcccatggagaagaagagaaggcggccctcagctctcgaagcagattcgcccatggcccccaagaggggaaccaaacggcagagacagtcatttctgccttgcctgaggagggggtcattgcccgacacccaaccttcacagggtccttctacccccaaaggcgagcgtgcttcaagcccatgtcattccccccgcgtctgtccagccactgtgattaaaagccgcgtgccgctgggcccctccgcaatgcaaaactgttctacacccctggcgcttcccaccagggacctaaacgcaacttttgatcttagcgaggaaccgccttccaagccgagctttcacgagtgcatcggttgggataaaatccctcaggaactgagccggctggatcagcctttcattcccagggccccagttcccttgttcactatgaagggccctaagcctacttctagtctgcctgggacgagcgcctgcaagaaaaagcgcgtcgcctccagttcagttagtcacggccgctcccgaatcgcaaggcttccttcatcaaccttgaagcgccctggtccattgtatagccaggtaactggcacacgtgacagagattcactcgggcacggtggaaggtag

SEQ ID NO: 24575 - DNA, 561 bp, synthetic construct
  source 1..561: mol_type = other DNA; note = Synthetic coding sequence
atggagcccccccggggcccccccgccaacggcgccgagcccagcagagccgtggggaccgtgaaggtatacctcccgaacaagcagcggacagtggtgacagtgcgagacggaatgtccgtgtatgactcactcgataaggccttgaaggtcagaggcctcaatcaggattgctgcgtcgtctatcgccttattaaagggcggaagaccgtcacagcttgggacaccgcaatcgcccccctggatggagaggaacttattgtggaggtactcgaagatgttcccctaacgatgcataacttcgtgagaaaaactttcttttcattagctttttgtgacttctgcctgaagtttctttttcatgggtttagatgccagacctgtggttacaagttccaccaacattgttcgagcaaagtccctaccgtctgtgttgatatgtctacaaatcgccagcagttctatcacagcgtccaggacctctctggagggagcagacaacacgaagcaccttccaatcgccccttaaatgagttgctaacaccccagggccccagatag

SEQ ID NO: 24576 - DNA, 1821 bp, synthetic construct
  source 1..1821: mol_type = other DNA; note = Synthetic coding sequence
atggagcccccccggggcccccccgccaacggcgccgagcccagccgcgccgtgggaacagttaaggtctatctccctaataaacagagaaccgtggttaccgtccgggatggaatgagtgtatacgacagcctcgataaggcccttaaagtccggggacttaaccaggattgttgcgtggtgtatagactcatcaaaggcaggaagacagtgaccgcctgggatacagccatcgctcccctggacggagaggaattaatcgtggaggtattggaagacgtacctttgactatgcataactttgtacgcaagacttttttttctctcgccttctgcgacttttgcctgaagtttctgttccatggtttcaggtgtcagacatgtggttacaaatttcatcagcattgtagcagtaaggtgcccacagtgtgcgtcgatatgagtaccaatcgccagcagttctatcattccgtgcaggacttgtccggtggctccagacagcatgaggctccgagtaaccggcctttgaacgagttgctgactccccagggaccttcacctcggacacaacattgtgatccagagcactttccgttccctgcacctgctaatgcccctcttcaacgaatccggtctacttctaccccaaatgtccatatggtatccacaaccgcccctatggactctaacctgatccaactgaccgggcagtccttttcaacagatgcggcagggtcacgcggtgggtccgacgggacacctcgcggctcaccgagtcctgcgtccgtgagtagcgggcgcaaatctccacacagtaaaagtcctgcggagcaaagggagaggaagtcactggcggatgataaaaaaaaggtaaaaaacctcggatatcgtgatagcggctactactgggaagtgccacctagtgaggtacagctgctgaaaaggatcggcaccggctcctttgggacagtatttcgggggaggtggcatggggacgtcgctgtgaaagtgctcaaagtgagccagcccacagctgaacaggcacaagccttcaagaacgagatgcaggttttgcgcaaaacaagacacgtgaacatactgctgtttatgggtttcatgactcgacctgggttcgccatcataacacagtggtgcgaggggagtagcttgtaccaccacctgcacgttgccgacactcgcttcgacatggtacaactcattgacgtcgcccggcagaccgcacagggaatggactacctccacgcgaaaaacattatccaccgagacctaaagagcaataatatttttcttcatgagggcctgacagtgaagattggcgactttggactggcaaccgtcaagaccagatggtccggcgcccaaccgttggagcagcccagcggcagcgtgctctggatggccgcggaggtgattcggatgcaagaccctaatccttacagctttcagagtgatgtctacgcatatggtgtagtcctctacgagttaatgaccggctctctgccgtattctcacatcggttgccgcgaccagattattttcatggttggccggggatacctcagccctgacctgtcaaaaatctctagcaactgccccaaggctatgcgcaggctcctctctgattgtctcaagttccaaagggaagagcggccactctttccacagatactggccactatagaacttctccaacggtccctgccaaagattgaaaggagtgccagcgagccttctctgcacaggactcaggcagatgagctgccagcctgtttgctgtccgctgcccgcttggtgccctag

SEQ ID NO: 24577 - DNA, 3036 bp, synthetic construct
  source 1..3036: mol_type = other DNA; note = Synthetic coding sequence
atggtgagcagcgaccggcccgtgagcctggaggacgaggtgagccactctatgaaagaaatgatcggcggctgctgtgtctgctctgacgagagggggtgggcagagaatccgttggtatactgtgatggccacggttgcagtgtggccgtgcatcaggcttgctacggcatcgtccaggtcccaaccggaccctggttctgccggaaatgcgagtcccaggagagagcagcaagagtccggtgcgaactgtgtccacacaaggacggtgctcttaaacgcacggataatggaggctgggctcatgtggtctgtgcactctatattcccgaagtgcagtttgctaacgtgtcaaccatggaaccgatagttctgcagagcgttccacatgaccggtataacaaaacctgctatatctgcgacgagcaggggcgggagtcaaaggccgctactggcgcctgtatgacatgcaataaacatggatgcagacaggctttccacgtgacttgcgcccaattcgcgggcctcttatgtgaagaggaaggaaacggcgcagacaatgtccagtactgtggatactgtaagtatcacttctctaagttaaaaaaaagcaagcgagggagcaacagatcctacgaccagtccctgtcagactcgtcttcccattcccaagataaacaccacgagaaagaaaaaaaaaagtataaggaaaaggataagcataagcagaagcacaagaaacaacccgagccctcacctgctctggtaccttccctgactgtcaccacagaaaagacttacacctctacttcaaataactccatctccggtagccttaagcgcctggaggatacgactgctagatttacaaatgcaaatttccaggaggtgtcagcccatacctccagcggcaaagacgtttctgagaccagggggtcagaaggtaaagggaaaaagagctcagcccatagtagtggccaaagagggcgaaagccgggcggcggaagaaatcccgggactacagtcagcgcagctagtccatttccccagggctccttcagtggcaccccgggctcagttaagtctagttccggcagcagcgtacagtcaccccaggatttcctgagtttcacggactcagaccttaggaacgactcctattcccactcccagcagagcagtgccactaaggacgtgcataaaggagagtctggatcccaagaagggggcgtgaactctttctcaacccttatcggcttgccaagcactagtgccgtcactagccaaccaaagagcttcgaaaacagtccaggtgacctcggcaactcgtcgctgcccaccgctggttataagagggcgcagacctccggtatcgaggaggaaactgtcaaagagaagaagcgtaagggcaacaaacagtcaaaacacggtcctggcagacctaaaggtaacaagaatcaggagaatgtaagtcatctgagcgtttctagtgcgagtcctaccagttccgtggccagtgctgctggctcgatcacttccagctctttgcagaagtcgcccactcttctacgcaatgggtcattgcagagtctgagcgtgggaagcagcccagtggggagcgaaatttcaatgcagtaccgacacgatggcgcatgccctaccaccaccttctcagaactgctgaatgctatccacaatggcatctacaactcaaatgatgttgctgtctcgttcccgaatgtggtcagtggctccgggagctccacccctgtgtcctcctctcatctgccacaacagtcatctggccatttacagcaggtgggagctctctcaccttcagccgtgtcgagcgctgcccctgctgtggcaactacacaagctaataccctgtcaggaagtagcttgtcgcaggctccttcccatatgtacgggaatcgttccaattctagcatggccgccttgattgcacaatctgaaaacaatcagacagatcaggaccttggagataactctagaaacctcgtggggcgcgggagctctccccggggatccttgtcacccagaagccctgttagttctctccagatccggtacgaccagccagggaattcttctttggaaaacttgcctccggttgctgcatcaatagaacagctgttagagcggcagtggagtgaaggccaacagttcctcttagagcaaggaacccccagcgacatcctcggtatgctgaagtccctgcatcagcttcaagtcgagaatcggaggctggaggagcagattaagaacctgacagccaagaaggagcgactccagctgctcaacgctcagctgagcgtgcccttccccactatcacggctaacccctccccgagtcatcagatacatactttctccgcacagacagcccctactacagacagcctcaattccagtaagtctccccacattggcaattcatttctgccagataactccctacccgtcctcaatcaagatcttaccagcagcggacaaagtacgtcctcctcctccgcgctgtcaaccccaccgccagccgggcaatccccagcccaacagggaagtggagtctcaggcgtccaacaggtgaatggcgtgaccgtcggagctctagcatccggcatgcagcctgtgacctccacgatcccggcagtcagtgccgtggggggcattatcggggcactgcctggaaatcagctggctattaatggtatcgtcggggccctgaatggcgtgatgcagacccccgttacaatgtcccagaatcccacccctctgacgcataccactgtccctcccaacgctactcacccaatgcctgctaccttaactaactctgccagcggcttgggcctcttaagcgatcagcagaggcagattttaatccaccagcaacagtttcagcagctactgaatagccagcagctcacacctgttcatagacatccccattttacacaattaccaccgactcatttttcaccttccatggagatcatgcaggtccggaagtag

SEQ ID NO: 24578 - DNA, 3084 bp, synthetic construct
  source 1..3084: mol_type = other DNA; note = Synthetic coding sequence
atggtgagcagcgaccggcccgtgagcctggaggacgaggtgagccactcgatgaaagaaatgatcggaggctgttgcgtgtgctccgatgagaggggttgggccgaaaacccccttgtatactgcgatggccacgggtgctccgtcgccgtgcaccaagcgtgttatggaatcgtgcaggtcccgactggtccttggttctgcaggaagtgcgagagccaggagcgtgctgcccgggtgcggtgtgaattgtgtccgcacaaggatggcgctttaaagaggaccgacaatgggggatgggcccacgtggtatgcgccctgtatatacccgaggtgcagttcgccaatgtttctaccatggagccaatcgtgctgcagagtgtcccgcatgatagatacaacaagacctgctatatttgtgacgaacaaggaagggagtctaaagcggcaacaggggcctgtatgacatgcaataaacacggttgtcgacaggccttccatgtgacttgtgcccaatttgcagggctcctgtgcgaggaagagggcaacggggctgataacgtgcagtattgcggatattgcaagtaccatttttctaagctaaaaaagtctaagcgcggttccaatcgctcttatgaccagagcctgagcgactcgagtagtcacagccaagataaacatcacgagaaggagaagaaaaagtataaagaaaaagataagcacaagcagaaacacaagaagcagcccgagccaagccccgcactcgtcccttcgctcacagtaactactgagaaaacgtataccagcactagcaataactccataagcggctctcttaagcggctcgaggatacaacagctcgattcactaacgccaatttccaggaagttagcgctcacactagttccggaaaagacgtcagtgaaacgagaggcagcgaaggcaaaggaaagaagtcttccgcgcacagttccggccaacgtggtaggaaaccgggcggtggtcggaatcctggcaccacagtctctgccgcctccccattcccccagggatccttttccggcacccccggatcggtgaaatctagcagtggctcttctgtgcagtctccacaagacttcctcagtttcaccgattctgatttgcggaatgatagctacagccatagtcagcagagctctgccaccaaagacgttcacaagggagaatcagggtcccaggagggtggtgtaaactctttctctaccctgatagggctacccagcaccagtgcagtcacttcacagcccaagtcctttgagaattcaccgggagatctcggcaactcatcattgccgacagcagggtataaaagagcgcagaccagcggtatcgaggaagaaactgtaaaggagaaaaaacggaagggtaataaacagtcgaaacatggcccgggaaggccaaagggcaataaaaaccaggagaatgtcagtcatctgtctgtcagcagcgcatcacccacgtctagtgtagcatcggctgcaggtagtatcacatcgagctctctccaaaagtctcctaccctacttcgcaatggaagtctgcagtccctgtcagttggatctagcccagttggtagcgagatatcaatgcagtaccgccacgacggtgcctgtcctaccaccacatttagcgagctgttgaatgcaatccacaatgataggggagacagctcaaccctgacgaagcaagaactgaagttcatcggaatttataacagcaacgatgtggccgtgtcattccctaatgtggtgagtggatcaggaagttccactcctgtgtccagcagccatcttccacagcagagcagtggccacttgcagcaggtgggagccctctcaccctcagctgtaagcagtgctgctcccgcagtcgccacaacgcaggctaacaccctctccggatcttccttatctcaagcacctagtcacatgtacgggaatagatctaactccagcatggccgccctaattgcccagagcgaaaacaaccaaacggatcaggatctaggggataacagtcgaaatctggtcggcagggggtcatctccccggggctcactctccccccggtcacctgtgagctctttgcagataaggtacgatcaacccggcaattccagcttggaaaatctacctcccgtcgctgccagcatcgagcaactgctggaacggcagtggtcggagggacagcagttccttttggaacaaggcacgcctagtgatattttaggtatgctaaagtcactccaccagctacaagtcgaaaaccgacgactcgaagagcaaattaagaatctaacagccaaaaaggagagactgcaactcttgaacgcccagttgtctgttccgttccccactatcacagccaatccaagtccttcgcaccagatacacacattttcggcccagacagctccaaccaccgattccctgaattctagcaaatctcctcatattgggaactcattcctccccgataatagtctccctgtgcttaatcaggatttgacttcttcgggtcagagtacctctagttcatctgcgctgagtactcccccacccgccgggcagtctcccgcacaacagggcagtggagtgtcaggagtccaacaggtgaacggcgtgacagtcggtgccctggcaagcgggatgcagcccgtcacttctactatccctgctgtgtcggccgtgggcggaatcatcggggcgctgcccggaaatcaactggcaattaacgggatcgtcggagcactgaatggcgtgatgcagacccctgtgaccatgtctcagaaccctactccgctcacacataccactgtgcctcccaacgcaacccaccccatgcctgcaacactgacaaatagcgcttcagggcttgggctcctatccgatcagcaacgccaaatcttgattcatcagcagcagtttcagcaactcctgaactctcaacaactgactccagtccacaggcatccacactttacacagctgcccccaacacatttttctccctccatggaaataatgcaggtccgcaagtag

SEQ ID NO: 24579 - DNA, 567 bp, synthetic construct
  source 1..567: mol_type = other DNA; note = Synthetic coding sequence
atgaccgcccccagctgcgccttccccgtgcagttccggcagccctccgtgtccggcctctctcagattaccaagagcctctacataagcaacggagtagcagcgaataataagcttatgctatcatctaatcagattaccatggtgattaacgtcagcgttgaggtggtgaacacactttatgaggacatccagtacatgcaggtaccggttgctgattctcccaactctcggttatgcgacttctttgatcctatcgcagatcatatccatagtgtcgagatgaaacagggacgaaccttgctgcactgtgccgctggagtgtccagatctgccgcattgtgtttggcctatctgatgaagtatcatgcaatgtccctcctcgacgcccacacttggactaagtcttgccggccaatcatccgacccaacagcggtttctgggagcaactcattcactacgagtttcagctatttggcaagaatacagtgcacatggttagcagtccagtgggaatgattccggacatctatgaaaaggaagtccgcctgatgatcccactgtag

SEQ ID NO: 24580 - DNA, 381 bp, synthetic construct
  source 1..381: mol_type = other DNA; note = Synthetic coding sequence
atggtgagcagcgaccggcccgtgagcctggaggacgaggtgagccatagcatgaaggaaatgattgggggttgctgcgtttgttccgacgagcgaggctgggccgagaaccccctggtttactgcgatggccatgggtgtagcgtagcggtgcaccaagcctgctacggtatcgttcaggtcccaactggaccctggttttgtcgcaaatgcgagtcccaagaacgcgccgcgagagtcgccgagtcaagaagcgtggctcaggccaaggtacagtggtgcgacttgtctccacttcagcccctgctgcctggattcaaacgcttctcctgcctcagcctgccaaacggaatgcagtttctcctcgtgagcctcatctag

SEQ ID NO: 24581 - DNA, 540 bp, synthetic construct
  source 1..540: mol_type = other DNA; note = Synthetic coding sequence
atggtgagcagcgaccggcccgtgagcctggaggacgaggtgagccacagtatgaaggagatgataggcggatgctgcgtatgctcagatgaacgaggctgggccgagaatcctctcgtgtactgcgacgggcacggctgttctgtggctgtgcaccaagcttgttacgggatcgttcaagtgccgaccggaccctggttttgcagaaaatgtgagagccaggaacgcgccgctcgtgtaatggtttgcaactcctgctggctggcgtcgagcgagaacgtgacaccaggctatattgagcatcactgtgcatgtgctagccctcatccccgatgcctggtgagcaatgtgcctccagtgagtggagccctgatgcattgcttctgggcatgcctgactacagccgctttcttcgggcctcagtcttttactacatgccatatgagcttcttggtgtctcgagacattctgttttatatttatggcttcatgccattcatcagcgtggtgatctggcgcttcaagaaagagcgatggtag

SEQ ID NO: 24582 - DNA, 540 bp, synthetic construct
  source 1..540: mol_type = other DNA; note = Synthetic coding sequence
atgggcctgatcttcgccaagctgtggagcctgttctgcaaccaggagcataaagtcatcatagtaggccttgacaacgccgggaagaccacaatcctataccaattcctcatgaacgaggtggtccacacatcgcctacaatcggctccaatgtcgaagagatcgtggtcaagaacactcactttcttatgtgggatatcggtggtcaggaatccttgcggtccagttggaatacttactattccaacaccgagttcatcatcctggtcgtggacagcattgatagggaacgacttgccatcactaaggaagaactgtataggatgcttgcccatgaagatctgcggaaagctgccgtgttgattttcgctaacaaacaggacatgaaagggtgcatgaccgccgccgagatcagtaaatacttgacattgtcctccattaaagaccatccatggcacatccagagctgctgcgcactgaccggcgagggactttgccaagggctggaatggatgactagcagaattggggtgagatag

SEQ ID NO: 24583 - DNA, 3345 bp, synthetic construct
  source 1..3345: mol_type = other DNA; note = Synthetic coding sequence
atgagccagacccaggactacgagtgccggagccacaacgtggaccttccggaatctcgaattcccggaagtaatacaagactggagtgggtagaaatcatcgaaccacggactagggagagaatgtacgccaatcttgtgaccggcgaatgcgtgtgggaccccccagcgggagtgagaatcaagcgcacatctgaaaatcaatggtgggagctcttcgatccaaatacctcccgcttttactactacaacgcctccacgcagcgtactgtgtggcaccgtccccagggatgtgacatcatccctctggcaaagttgcagaccctgaaacagaatacagagagcccaagggcttccgcagagtcatccccggggagaggatccagcgtatcccgagaaggttccacttcctcctccttggagcccgaaccagataccgagaaagctcaagagctccctgcgcgggctggccgtccagccgcctttggcacggtcaaggaggattcaggtagcagtagcccccctggggtgttcctggagaaagattacgagatctacagagattattcggccgatggacagctacttcactaccggacaagcagcctacgatggaattctggagctaaagaaaggatgctcatcaaagtcgccgatagggagcccagcttcttagccgcgcagggaaacggctatgcgccggacggcccgccaggtgtacgaagtaggagaccttcgggtagccagcactccccttctcttcagacctttgctccggaggctgatggtaccatattcttccccgagcgtcgcccttcaccctttctcaaacgggccgagttgcccgggagctcaagtccactattggcccagccaaggaagccgtccggcgactcacagccaagcagtccgcggtacggctacgagccgcccctttatgaggagccgcctgttgagtaccaggctcccatttacgacgagcccccaatggacgtgcagttcgaggctggcggcggctaccaagctggatcccctcagagatcacctggcagaaaacccagacccttcctccaacccaataagcagggtcccccgagcccgtgccagcagctggtgctcacaaaacaaaaatgtcccgagaggtttctctccttggagtactccccagctggcaaggaatatgtgagacagttggtgtatgttgagcaggctggctcttccccgaagctgagggcgggacctcgtcataagtacgcccccaaccctggaggcggcagttactccttacagccatcaccgtgccttctccgtgatcagcggctgggcgtgaagagtggagattattcgaccatggagggacccgagctccggcattctcaaccaccaacgcctctgccacaagctcaggaagacgctatgtcttggtcttctcaacaggacaccctgagcagcaccggctactcacccgggacccgaaagagaaagtcaaggaagccctccttgtgccaggctacatctgccacccctacagaagggccaggggatctgctggtggaacagccgctcgctgaggagcagcccccctgcggcacttctctggccccggttaaacgggccgaaggagaggccgagggggcgcgcggggctgctgaaccctttctcgcacaagcacggctcgcgtgggaagcacagcaggcgcatttccatatgaagcagcggtccagttgggacagccagcaggatggatctggctatgagtccgacggcgctctccctctacccatgccgggacctgtagtgagagccttctcggaggacgaagctctcgcacaacaggagaaccgccactggcgacgtgggacattcgagaagctgggcttcccccagattcttctagaaaagagcgtatccgtgcagaccaacctagcgagcccagagccatacctccatccaagtcagtcagaagatcttgccgcctgtgcccagtttgagtcttcacggcagtcgaggtccggagttcccagttcttcatgcgttttcccaaccttcaccctgcgcaaaccatcttccgaaacggacatcgaaaactgggcctcaaagcactttaataagcacacacaggggttattccgaaggaaagtcagcatcgctaacatgctggcttggagctccgaatccataaaaaagccaatgatcgttacttctgacagacacgttaagaaagaggcctgcgagctgtttaagttgatccagatgtacatgggtgatcgcagggcaaaggctgacccactgcatgtggctctcgaagttgccactaagggctggtccgttcaggggctacgggatgaactgtacattcaactgtgccggcagacgactgaaaactttagactggagtctctcgctagagggtgggagctgatggccatctgcctggccttttttccccctactcccaagttccacagttatctcgagggctatatctaccgacacatggatccggtcaacgacaccaaagttacgcagcacattaaggagctgctggaaaggaacacaaagaagaagtctaaactgaggaaaaagcccaagccctatgtggaagaaccggacggggtggccataagcacttacgccaaatactgttaccataagttacagaaggcagcactgaccggcgctaagaagggactgaaaaaaccaaacgtcgaggagatccgtcatgcaaaaaacgcagttttctcaccctcaatgtttgggtctgcactgcaggaagtcatgggcatgcagcgggagaggtaccctgagagacaactcccctgggtgcagactcgcttgagtgaagaggtcctggctcttaatggtgaccaaacggagggaatctttagggttccaggcgatatagatgaggttaacgccctgaagctgcaggtggaccagtggaaggtacctacaggcctggaggacccccacgtaccagcctcactcttaaaactctggtaccgcgagttggaggagccgttaattcctcatgagttttacgaacagtgtatagcacactacgattctcctgaagccgcagtggcagtggtccatgctctcccccgtatcaacagaatggttctatgttacctgattcgcttcctccaggtgtttgtgcagccagcgaacgtggctgtgactaagatggatgttagtaacctggctatggtgatggcgcctaattgcttaagatgccagtcggacgaccctagagtgatcttcgagaataccagaaaagagatgtcattcctccgtgttttaatccagcacctggacacatcctttatggagggtgttctctag

SEQ ID NO: 24584 - DNA, 822 bp, synthetic construct
  source 1..822: mol_type = other DNA; note = Synthetic coding sequence
atgggccagaaggtgaccggcggcatcaagaccgtggacatgcgggatcctacgtacagaccacttaagcaggagctgcagggcttggattactgcaaaccaactcgactggacctactgcttgacatgccacctgtgagctatgacgtccagttgctgcacagctggaacaacaatgataggagcctcaatgtgtttgtaaaagaagatgataaactgatcttccaccggcacccggtggcccagtccaccgatgcgatccgagggaaagtgggatataccagagggctgcacgtctggcagatcacttgggccatgagacagagggggacccacgcagtcgttggggtagctaccgcagacgcccctctgcacagcgtggggtatactactttagttggaaacaatcatgaatcctgggggtgggacctcggacggaatcgattgtatcatgatggtaagaatcagccatctaagacatatcctgcttttttagagccagacgagacgttcatcgtgcccgacagcttcttggtggccctagatatggatgacggaactctgagtttcattgtcgatggtcagtacatgggcgtagcttttcggggccttaaagggaaaaagctttacccagttgtgtccgctgtttggggccactgtgagattaggatgaggtaccttaacgggctggatcccgagcctcttcccctcatggatctatgtcgtagaagtgttagacttgcactcggacgtgaacgtttgggggaaatccatacattgcccctcccggcttccctgaaagcgtatctgctgtaccagtag

SEQ ID NO: 24585 - DNA, 3633 bp, synthetic construct
  source 1..3633: mol_type = other DNA; note = Synthetic coding sequence
atgccccggggcgaggcccccggccccggccggcggggcgccaaggatgaagccctgggcgaggagtctggggagcggtggagccccgagtttcatttgcaacggaagctggctgattcttcccattcagagcagcaggatagaaatagggtctctgaggagctgatcatggtcgtgcaagagatgaaaaagtacttcccctccgaacggcggaataaaccgagcaccttggatgcacttaactatgctctccgctgcgttcatagtgttcaggctaattccgagttcttccaaatactgagccagaatggggccccacaagctgatgtgtcgatgtactctctcgaggagctggcaactattgcctcggaacatactagcaagaatacagatacatttgtggcagtgttcagtttcttaagtggaagactggttcatatctcggaacaggccgctctgattcttaaccggaagaaggacgtgctagcctcatcccactttgttgacctgctcgcgccccaggatatgagggttttctatgctcatacagctagggcccaacttccattttggaacaactggacccagagggcagcagcaaggtacgagtgtgcgccagtgaagccttttttttgccggatccgcgggggggaagatcggaaacaggaaaaatgccatagcccattcagaatcattccctatctcatccatgtgcaccaccctgcccagccggagctggagagcgagccatgttgtctgactgtcgtcgagaagattcatagtggatatgaggctcctcgtattcctgtaaacaaacggattttcaccaccacccacacccccgggtgtgtgtttttggaggtggacgagaaggctgtgcccctgctgggctatttgccccaagaccttatcggaacaagtatccttagctaccttcatccagaagacagatccctgatggtggccatccaccagaaagtattgaagtacgccgggcacccacctttcgaacactccccaatccgtttttgtactcagaatggggactacattatcctagatagctcttggtcatcttttgtaaatccctggtcgcggaagatatccttcatcataggtaggcataaggtgcgcacttcccctctcaatgaggacgttttcgccacaaagatcaaaaagatgaatgataacgataaggatatcacggagcttcaggagcagatttacaaactgctgcttcagcctgtgcatgtgagcgtctcctctggctacggctcactgggttcctctggaagtcaggagcagctcgtgtccatcgcgtcttcgagtgaggcctcaggccatcgagtagaggagactaaggcggaacagatgacactccaacaagtgtatgcatccgtaaacaaaataaagaacctcgggcagcagctttacatcgaaagcatgacaaagtcctctttcaaaccagtgacaggaaccagaacagaacccaatggaggcggcgagtctgccaatggcgggggcgagtgcaagaccttcacttcattccatcaaacactcaagaataactccgtatatacagaaccctgcgaggacttacgaaacgacgagcactctcccagttatcagcagataaactgcattgattctgttatcagatacctgaaatcttacaacattcctgctctgaaacgtaaatgtatcagctgtaccaataccactagctcgagcagcgaggaggacaagcaaaaccacaaggccgacgatgttcaggccctccaagctggtctgcagatcccagccattcctaagagcgaaatgcctaccaacggacgctccattgatactggcggcggggctccacagattttgagcactgccatgctctccctgggaagcgggatcagtcagtgcggatattcctctactatagtgcatgttccgccacctgaaacagcccgcgatgccactctcttctgcgagccatggacattaaatatgcagcccgcccccttaaccagtgaggaatttaaacacgtcgggctcacggccgcagtgctgagtgcacatacccagaaggaggagcagaattatgtggataaattcagagaaaagatcctgagctctccctattcctcctaccttcagcaggaaagccggagcaaagctaagtatagttacttccagggcgactccacttccaagcaaactagatccgctggatgcaggaaagggaagcacaaacgtaagaagcttcccgaaccccctgattcctcatcctcaaacaccgggtctggcccacggaggggcgcacaccagaatgctcagccttgttgtccttctgcagccagctctccccacacttcaagtcccaccttcccaccagctgcaatggttcccagccaggcaccatacctggtgccggcctttcctctccctgctgcgacttcccctggacgggagtacgccgcccccgggacagcgcccgagggcctccacgggctcccgctgtccgaggggctccaaccgtaccctgcgtttccttttccctacttagacacattcatgacagtgttcctgccagatccccctgtttgtccactcttgagcccttcttttctcccttgcccttttctgggagcaactgccagctcagccatctcccccagtatgagctcagcaatgtcaccaactttggatccacctcctagtgtaaccagccagagacgcgaagaggaaaaatgggaagcccagtcagaagggcatccattcatcaccagccgttcctctagccctctgcagctgaaccttctgcaggaggagatgccccgcccatctgagtctcccgatcagatgaggaggaatacctgcccccagacagagtaccagtgcgtcactgggaacaacgggtcggaaagctcccccgccactaccggcgccctgtctacgggttccccaccaagggagaacccatcccatcctacagcttcagccctgtccaccggttccccacctatgaaaaaccccagccatccaacagccagtgcattatccaccgggagtccccctatgaagaacccatcccatcccactgcgtctacactgtctatgggccttcccccatccaggacaccaagccaccctactgctacagtcctctctactggtagcccaccatcagaaagcccgagtagaaccggctccgctgcatcaggatcatcagattccagtatttacttaacgtccagtgtatacagcagcaagatttctcagaatggtcaacagagccaggacgtccagaagaaagaaaccttcccgaatgtggccgaggagcctatctggcgaatgatccgacagacgccagaacgcatactgatgacataccaggtgccggagagagtgaaggaggtggtgctgaaagaggacttggaaaagttggagtccatgcgccagcagcagcctcagttctcccacggtcaaaaggaagagcttgcaaaagtgtacaattggatccagtcgcaaaccgtgacccaggagattgatattcaggcatgtgtgacatgcgagaatgaggattctgccgatggtgcagccacgtcatgcgggcaggtcttggtggaagatagctgttag

SEQ ID NO: 24586 - DNA, 1137 bp, synthetic construct
  source 1..1137: mol_type = other DNA; note = Synthetic coding sequence
atgccccggggcgaggcccccggccccggccggcggggcgccaaggatgaggcccttggcgaggaatcgggagagagatggagtcctgaattccatctgcaacgcaagcttgccgactcctcgcactcagagcaacaggacaggaatcgcgtgtccgaagaactcattatggtggtgcaggaaatgaagaaatacttcccatcagaacgacgcaataagccaagcaccttagacgctctgaattacgcactaagatgcgtgcatagtgttcaggccaattcagagttttttcaaattctaagtcagaacggggcaccgcaagccgatgttagtatgtattccctggaagagctggccactatcgctagcgaacatacttcaaaaaataccgatacattcgtggcagtgttcagcttcctctccggacggttggtccacatttccgaacaggcagcactgattctgaaccgaaaaaaggacgtcttagcttcaagccatttcgtcgacctgctcgctccacaggacatgagagtgttctatgcacacaccgcgagagctcagctgcctttctggaataattggactcagcgcgcggctaggtacgaatgcgcccccgtcaagccatttttctgtcgtattagggggggggaggatagaaagcaagaaaagtgtcactcccctttcagaatcatcccttacctcattcacgtgcatcaccctgcacagcccgagctagaaagcgagccatgttgtttaacagtagtcgagaagattcatagtggatacgaagcgcctcggatccccgtgaacaaacgcattttcactacaacccacaccccaggctgtgtgttccttgaggtcgacgaaaaggccgtccccctcctgggatatttgccccaggatctgatcgggacctcaattctcagttacttacatcctgaagataggagtctcatggtagccattcatcaaaaagtgctgaaatatgctgggcacccacccttcgaacattcgccaattcggttttgcactcagaacggtgactatatcatcttagatagcagctggtcatctttcgtgaacccctggagtcggaagatctccttcattattggtcgacacaaagtgcgcacatag

SEQ ID NO: 24587 - DNA, 1794 bp, synthetic construct
  source 1..1794: mol_type = other DNA; note = Synthetic coding sequence
atggagcggcccgcccccctggccgtgctgcccttcagcgaccccgcccatgcactgtccctgctccggggcctgagccagctgagagcagaaagaaaattcctggacgtgacgctcgaagctgccgggggccgcgacttccccgcccatcgagctgtgctggctgctgctagtccttatttccgtgctatgtttgctggccagctgagggagtctcgggccgaacgggtgagattgcacggggtaccgccggacatgctgcagctgcttctggacttcagttacactggacgcgttgctgtaagcggtgacaatgcagaacccttactgcgagccgccgacctcctccagttccctgcagtcaaggaggcctgcggggcctttctccagcagcaacttgacctcgccaattgtttagatatgcaggacttcgccgaggcctttagctgttctggactggccagtgctgcccagaggtttatactgagacacgttggcgagctcggcgctgaacaactcgagcgcctgccattggcccgactgttaaggtatttgagggacgacggattgtgtgttcctaaggaggaagcagcctaccagttggctttaaggtgggtgcgagccgatccgccgcgccgggccgctcattggccgcaactcctggaggcagttcgcttgccattcgttagaagattttacttgctggctcatgtggaggccgagcctttggttgcccgatgccctccatgtctgcgcctgctgcgggaggcgagggattttcaagcggcgcgctatgaccgacacgatagagggccctgtcctcgtatgagacccaggcccagcacgggcctcgcagaaatcctcgttctggttggtgggtgcgaccaggactgtgacgaactggttaccgtggattgctataacccccaaactggccagtggagatacctggcagagtttcctgatcatctgggggggggatattccatcgtggccctgggcaacgatatttacgtaactggcggcagcgatggttcccgcctgtatgactgcgtgtggaggtataatagctcggtcaacgagtgggcagaggtcgcacctatgttgaaggctagagagtatcactccagctccgtgctggatgggctgctgtacgtggtggctgcagattccaccgagcggtacgatcacacaaccgacagttgggaggctctgcagccaatgacttatcccatggataattgttccacaacggcatgtagagggagactctacgccatcggctcactcgcaggcaaagagactatggtcatgcagtgctatgaccccgatacagatctgtggtcactggtagactgtggacagctgccgccttggagcttcgcccccaagacagccacacttaacgggctaatgtactttgtccgagatgacagtgccgaggttgacgtgtataaccccacaaggaacgaatgggataagattccttccatgaaccaggtacacgtaggcggttcacttgcggtactaggcggcaagctgtacgtatctggcggctacgataataccttcgaattatccgacgtagttgaagcctacgacccagagacccgagcctggtctgttgtcggtaggctgcctgaaccgactttctggcacggatccgtctcgattttcagacagtttatgcctcaaaccttcagtggaggtaggggctttgagctggatagcgggagtgatgatatggatcccgggaggcctcgccctcctagggacccagatgagctgcactag

SEQ ID NO: 24588 - DNA, 1620 bp, synthetic construct
  source 1..1620: mol_type = other DNA; note = Synthetic coding sequence
atggagcggcccgcccccctggccgtgctgcccttcagcgaccccgcacatgctttgagtctgcttcgggggctgagtcagctgagagccgaacggaaatttctcgacgtgactctcgaggccgctggaggcagggactttccggctcatagggctgttttagctgctgccagcccttatttccgcgccatgtttgctggccagctgagagagtcaagggctgagagggtccggctacacggagtaccacctgatatgctgcagcttctgctggacttctcatataccggtcgcgtggctgtctctggcgataatgctgagccacttttgagggcagccgacctccttcagttccctgcagtgaaggaggcttgtggcgctttcctgcagcagcagttagacttggccaattgcctcgacatgcaagacttcgcagaggccttctcctgcagcgggctcgcaagtgccgcacagcgcttcattttacgtcacgtcggcgagctaggggctgagcagttggaacgtctgcctttggctagactgctgcggtatcttagagacgatggcctgtgtgttcctaaagaggaggctgcctaccagctggccctgcgttgggtgcgcgctgatccccccaggcgggctgctcactggcctcaactattagaggccgttaggctgccatttgtgcgtcggttttatctgcttgcccacgttgaggccgaacctctggtcgccagatgcccgccctgcctcagactcctgcgggaggcccgcgacttccaggccgcacgatatgatagacacgatcgaggcccgtgccctcgcatgaggcctcggccctcaacaggtttagccgaaattctggtcctcgttggcggttgtgatcaggattgcgatgaactggtcaccgtcgactgctataacccccagacaggtcagtggcggtatttggccgagttcccagaccacctgggaggcgggtattccatagtcgctttgggcaacgacatctacgtcaccggaggctcagacggttcccggttgtatgactgtgtgtggagatataactcctccgtgaacgagtgggctgaagtcgctcccatgctaaaagctagagagtatcattctagtagcgtcttggacgggttgctctacgtggtcgctgcggattcgacagaaagatatgaccatactaccgattcttgggaagccctgcaacctatgacttatcccatggataattgttctaccaccgcatgccgcggtagactgtacgcgatcggatcccttgccggcaaggaaactatggtgatgcagtgctacgatcccgacaccgacctttggtccctcgttgattgtggtcagctcccgccatggtccttcgcacccaagaccgcgactctgaacggcctcatgtacttcgttcgggacgatagcgcggaggttgacgtctataacccaacgcggaacgaatgggacaaaatcccgagcatgaaccaggtgaatttccaggcaggacagcattggaaacatcgcctggtattaatcctccagcctaaatgtcatagggacgaatgtctcggcagtacggccatgatgggggggtcgcatttgaattag

SEQ ID NO: 24589 - DNA, 2067 bp, synthetic construct
  source 1..2067: mol_type = other DNA; note = Synthetic coding sequence
atggacggcagcttcgtgcagcacagcgtgcgggtgctgcaggagctgaataaacagcgcgaaaaaggacagtactgtgacgcgactttggacgtgggcggtctcgtgttcaaagcccactggagcgtgctggcctgttgtagtcacttttttcagtctctttacggcgacggctccggcggctctgtagtgctgcccgctggctttgcagagatcttcggcttgctcctggatttcttttacactgggcacctggccctgactagtggcaaccgcgatcaggtcctcttagcggctcgcgagctaagagtgcctgaagcggtagaactgtgtcaatctttcaagccgaaaacgagcgtgggacaagctgcaggtggccagtccggactcggtccacccgcgtctcagaatgtcaattctcacgtgaaagagccagcggggctggaggaagaggaggtgagccgcaccctgggcctggtacctcgcgaccaggaacctcgaggaagccactcccctcagcgcccccagctgcactcacctgcacagtctgagggtccttcatcactgtgtggcaagctgaaacaagccttgaagccatgtcccctcgaggataaaaagcctgaggattgtaaggttcctccacggcctctagaggcggagggcgcgcagcttcaagggggatctaatgaatgggaggttgtcgtgcaagtggaagatgatggcgatggagactacatgagtgagccggaagccgtgcttaccaggaggaaatcaaacgttatcagaaagccttgtgccgctgaacctgcgctgagtgctgggtctctggccgctgagcctgcagagaacaggaaaggcactgctgtgcctgtggaatgcccgacctgccataaaaagttcctaagcaaatactacctcaaagtgcataataggaaacatacaggcgaaaaaccatttgagtgcccaaagtgcggtaaatgttacttccgaaaggagaatctcttggagcacgaggctcgaaactgcatgaaccgttctgaacaggtcttcacttgctccgtttgtcaggagaccttcagaaggagaatggagctacgtgtacatatggtgtcccatactggggaaatgccctataagtgctcttcatgtagtcagcaatttatgcaaaagaaggaccttcaaagccacatgattaagttgcatggggcaccaaagccacacgcctgcccaacgtgtgccaagtgcttcctgagccgaacagaactgcagctccacgaggcgttcaagcacaggggcgaaaagttgtttgtgtgcgaggaatgcggacacagggccagttcacgaaacggtctacaaatgcacattaaagcgaagcatagaaatgagcgcccacatgtatgtgagttttgcagccatgccttcacccaaaaggcaaatctgaacatgcaccttaggacgcataccggagagaaacccttccagtgtcatctgtgcggaaaaacatttaggacacaagcttccctggataaacataaccggacgcatacaggagaaagaccttttagctgtgagttctgcgagcaaaggttcaccgaaaagggacctctgctccgacacgtggctagcagacatcaagagggaaggccacacttttgccagatttgcggcaagacattcaaggccgtggagcagctccgcgtccacgtgcggaggcataagggtgtgagaaagttcgaatgtacggaatgcggttacaaattcacacgccaagctcacctgcgtcgacacatggagatccacgacagagttgagaattataacccgcgtcaacggaaactacgaaatctgatcatcgaagatgagaagatggtcgtcgtggccctccagcctccagccgagctggaggtgggcagtgcagaagttatagttgagtctctcgcacagggcgggctggccagtcagttacccggccagagactgtgcgccgaagagtcattcacaggtccgggggtcctggagccctcactgatcatcactgccgcggtcccggaagactgtgacacctag

SEQ ID NO: 24590 - DNA, 525 bp, synthetic construct
  source 1..525: mol_type = other DNA; note = Synthetic coding sequence
atgacccactgctgcagcccctgctgccagcccacctgctgccggaccacttgttgccggacaacatgttggaaacccacgacagttactacttgttcatcaaccccctgttgtcagcccgcctgttgcgttagctcttgctgccaaccctgttgccgccccacctgctgccagaacacctgttgcaggaccacatgctgccagccgacctgcgtgacctcatgctgccaaccctcgtgctgttctactccatgctgccagcctacctgttgtggctcctcatgttgcggccagactagttgtggctcctcttgcggacagagctccagctgcgcccccgtgtattgtagacgcacttgctactatcctacaaccgtatgcctgcctggctgcctgaaccagagttgcggatccaactgttgtcagccttgttgccgcccggcgtgctgtgaaactacatgctgcagaaccacgtgcttccaaccaacctgtgtgagttcttgttgtcaaccaagttgttgttag

SEQ ID NO: 24591 - DNA, 597 bp, synthetic construct
  source 1..597: mol_type = other DNA; note = Synthetic coding sequence
atggtgagcagctgctgcggcagcgtgtgcagcgaccagggctgcagccaggacctctgccaggagacctgttgccgcccgtcgtgctgccagacaacttgctgccgcactacttgttaccggccctcttgctgcgtatcctcatgttgcagaccacagtgctgccagagcgtctgttgccaacctacatgttgccgcccccccaggtgctgcatctcctcgtgctgcaggccaagctgttgtatgagtagctgctgcaaaccacaatgctgtcagtctgtctgttgtcaacctacaacaacatgttgtcaccctcgttgctgcatctcctcctgctgccggccatcttgctgcgtgtcctcatgctgcaagcctcagtgttgtcagtcagtgtgctgtcagcccaattgctgtaggccctcttgcagtattagcagctgttgcaggccatcatgttgtgaatcctcatgttgccgaccttgttgttgcgtccgcccagtgtgtggtagggtgagttgtcataccacgtgctacaggcctacttgcgtgatatcttcttgtcctaggccattgtgttgcgcctcatcctgctgctag

SEQ ID NO: 24592 - DNA, 1296 bp, synthetic construct
  source 1..1296: mol_type = other DNA; note = Synthetic coding sequence
atgaccagcgactgcagcagcacccactgcagccccgagagctgcgggacagccagcgggtgcgctcccgcttcatcatgttctgtcgaaaccgcctgtctcccgggaacctgcgctacatcaagatgtcaaaccccgagcttcctcagtcggtctcgcggcttaacaggctgcctgctgccctgctacttcaccgggtcgtgcaactctccctgcctggtgggaaactgtgcctggtgtgaggatggagtgtttacttctaacgaaaaagagacaatgcagttcctgaatgatagactcgcgtcatacctggagaaagttcggtctctggaagagacgaatgccgagctggaaagccgtatccaggagcagtgcgaacaggatatacctatggtgtgccctgactaccagcgctattttaatacaatcgaggacttacaacagaagatcctgtgcaccaaggccgagaattctcggctcgccgtgcagcttgacaactgtaaactggctaccgatgatttcaaaagcaaatacgaatccgaactgtctctgaggcaactccttgaagccgacatctctagcttacacggcattcttgaagagttgactctgtgcaaaagtgaccttgaggctcatgtggagagtctgaaggaggacttgctttgcctgaaaaagaaccatgaggaggaggtgaacctgctacgggaacagctgggcgaccgattgtcagtagaacttgacaccgcccccacactggacttgaacagggtgctggacgaaatgcgttgtcagtgtgagactgtgctcgctaacaaccggagagaggccgaagaatggctcgccgtgcaaaccgaggaactgaaccagcagcagttgagcagtgccgaacaattacagggctgccaaatggagattctcgagctcaagcggactgcctcggcgctcgaaatcgagttgcaagcacagcagagtctcaccgagagtcttgaatgcacagtggccgagacagaggcacagtactcatctcagcttgcgcagatccagtgcctgatcgacaacttagagaaccagttggccgaaattcgctgtgacctggagaggcagaaccaggagtatcaagtgctcctcgacgtaaaggcccgcctggaaggcgaaatcaatacctactgggggctcctggactccgaagactcacgccttagctgttctccctgttctaccacttgcactagctccaatacctgtgagccatgctctgcttatgtgatctgtacggttgaaaactgttgtttatag

SEQ ID NO: 24593 - DNA, 1047 bp, synthetic construct
  source 1..1047: mol_type = other DNA; note = Synthetic coding sequence
atggccggcagcctgcccccctgcgtggtggactgcggcaccggctataccaaactaggatacgccgggaacaccgagcctcagtttatcattccctcttgcatcgccattagggaatcagcaaaagtggtggatcaagcacagaggcgggtgcttcggggcgttgatgacttggacttctttattggcgacgaggctattgacaagcccacctacgccaccaaatggccaattcgccacggtattatcgaggactgggaccttatggagcggtttatggaacaagtcgtgtttaagtatctcagagctgaacccgaggaccattacttcttgatgaccgagcctcccctgaatactcccgaaaatcgagaatacctggccgaaatcatgtttgagagttttaacgtacccggcttgtacatcgctgtacaagccgtcctggcgctcgcagcaagctggaccagtaggcaggtgggagaaagaacattaactgggatcgtcattgactccggcgatggtgtaacacacgtaatcccagtcgctgaagggtacgtgatcgggtcatgcattaagcatatacccatagctggcagggacatcacctatttcatccagcagttgttgagagaacgagaggtagggatacccccagagcagtccctcgagacagctaaggcgatcaaggaaaagtattgttacatttgtcccgatatcgtgaaggaatttgccaagtatgacgtggatcctcggaagtggataaagcagtatacgggaatcaacgccattaaccagaagaaatttgtcatcgacgtgggatacgagaggttcctgggtccggaaatcttctttcaccccgagtttgctaaccccgatttcatggaaagtatatcggacgtggtagacgaagtaatccaaaactgcccgattgatgtgcggagacccctgtacaaacccgaattcttccaagtgtgtcataccaagaaggattacgaagaatatggcccgtctatttgtaggcataatcccgtctttggcgtcatgtcatag

SEQ ID NO: 24594 - DNA, 273 bp, synthetic construct
  source 1..273: mol_type = other DNA; note = Synthetic coding sequence
atggacaacatgagcccccggctgcgggccttcctgagcgagcccattggggagaaagacgtctgttgggtcgacggcatttctcacgagctggctattaaccttgttactaaaggcattaataaagcatatattctccttggtcagtttctgctgatgcacaagaacgaggcggaatttcaacgatggttgatctgctgtttcggtgcaacagagtgtgaagcacagcaaactagccattgccttaaggaatggtgtgcttgctttctgtag

SEQ ID NO: 24595 - DNA, 249 bp, synthetic construct
  source 1..249: mol_type = other DNA; note = Synthetic coding sequence
atggccagcagcagcggcgccggcgccgccgccgccgccgccgccgccaatctaaacgccgtgagggaaaccatggacgtgctgttggagattagtcgcatactcaacaccggccttgatatggagaccctgtccatatgtgttaggctttgcgaacagggaattaatccagaagctctttccagtgtgatcaaggaactacgcaaagcaacagaggcattgaaagcagcagagaacatgacctcctag

SEQ ID NO: 24596 - DNA, 3732 bp, synthetic construct
  source 1..3732: mol_type = other DNA; note = Synthetic coding sequence
atggagacccgggccgccgagaacaccgccatcttcatgtgcaagtgctgtaatttattcagccccaaccagagcgaacttctaagtcacgtgagtgagaaacatatggaagagggggtgaacgtcgatgaaattatcatccctctgaggcccctctccaccccggaaccgccgaattcttccaaaaccggagacgagttcctcgtgatgaaacggaagaggggcaggccgaaaggctcaacaaagaagtcaagcactgaggaagagcttgccgagaatattgtgtccccaactgaggattcccctctcgcaccagaggaaggcaattccttacctcctagttctcttgagtgctcaaaatgttgccgaaaattttcgaacactcgccagctgaggaagcatatatgcataatagtgctcaatctcggtgaggaagaaggcgaagcaggcaacgagagcgatctggaactggaaaaaaagtgtaaagaagacgaccgcgagaaagcatccaagcggccgaggagtcaaaagaccgagaaagtccagaagatttccggaaaggaggcacgtcagttatccggcgcaaagaagcccatcatctcggtagtgctgaccgctcacgaagccattcctggtgccacaaagatcgtgcccgtagaggctgggccaccggaaacaggagctacaaactccgagacaacatcagctgacctggtgcctcgccgcggctatcaagagtacgctatacaacaaactccatatgagcaacccatgaagagttcgagactgggacccacacagctcaagatcttcacgtgcgagtattgcaacaaagtgttcaagttcaaacattccctccaggcccacttgagaatccacacgaacgaaaaaccatataaatgtccccagtgctcctacgcatccgctataaaagcaaatctgaatgtgcacctaaggaagcacacaggtgaaaagtttgcatgtgattattgctcattcacatgcctctcgaaggggcatttgaaagtgcacatagagcgagtgcacaagaaaattaaacaacactgccggttttgcaaaaagaagtattctgacgtgaagaacctgatcaaacacatacgagacgcccatgacccccaagacaagaaggtcaaggaggcattagacgagttatgcttgatgacaagggaaggcaaaagacagcttctgtacgattgtcatatctgtgagaggaaatttaagaacgagttggaccgagacaggcatatgctggtccacggcgataagtggcccttcgcctgtgaactgtgcggccacggagccacaaagtatcaggctttggaattgcacgtgagaaagcacccttttgtctacgtgtgcgctgtttgtagaaagaagtttgtgtcttcaattagactgcgaacccatatcaaggaggttcacggcgcagctcaggaagcgctcgtcttcacgtccagcattaaccaatcattctgcctcttggagccaggcggtgacattcaacaggaggctctgggcgaccaactgcagttggtggaagaggaattcgcgctccaaggtgtgaacgccttgaaagaggaggcctgtcccggcgacacgcagctcgaagagggaagaaaggagcccgaggcacctggggagatgccggcacctgcggttcacttggctagcccccaagctgaatccaccgctctgccgccttgcgaactagaaaccacagttgtgagttccagcgacctgcactcccaagaagtggttagcgacgattttcttctgaaaaatgatacctccagcgctgaagctcatgccgcccctgaaaaaccacctgatatgcaacacagaagttcagttcagacgcagggggaagttatcaccctcctgctgagcaaggcccagtcagcaggtagtgaccaggaatctcacggcgctcagtctccactgggggaaggtcagaacatggccgtgttgagcgcaggcgaccctgacccaagtcgctgcctcaggtccaaccctgctgaggcttccgacttgctgcccccggtcgcaggtggtggcgatactattacccatcagcccgatagctgtaaggctgccccagagcatcgttccggcattaccgcattcatgaaggtgctcaatagcttgcagaagaaacagatgaatacgtcactttgcgaacgaatcaggaaagtgtacggcgatctcgagtgcgagtattgtggtaagctcttttggtatcaagttcattttgacatgcatgtgcgcacacacacacgagagcacctttactactgctcacagtgccactattcatcaattactaagaactgtctgaaacgacacgtaattcaaaagcactctaatatcctgctgaagtgccccactgacggatgtgattacagcacaccagacaaatataagcttcaagcccacctgaaggttcataccgccctggacaaacggagctatagttgcccagtctgtgagaaaagctttagcgaagatcgcctcattaagtctcacattaagacaaaccaccccgaggtttcaatgagtaccatctctgaagtgctcggccgcagggtccagctgaaaggactgatagggaaacgcgctatgaagtgtccttactgcgacttttattttatgaaaaatggaagcgacctccagcgccacatttgggcacacgagggtgtgaagccgttcaagtgttctctctgcgagtacgccacgcgtagtaagagcaacttgaaagcccacatgaatagacattccaccgagaagacgcacctctgcgatatgtgcggcaagaaatttaagagcaaaggcactctcaagagccacaaactccttcatacggcggatgggaaacagttcaaatgcaccgtctgcgactataccgctgctcaaaaaccccaacttttgaggcatatggagcagcacgtgtccttcaagccattcaggtgtgcccactgtcattactcatgcaatatctctgggtcgctgaagcgacattacaacaggaagcatcccaacgaggaatatgcaaatgttggtaccggcgaactggccgctgaggtgttgatccagcagggcggcctgaagtgccccgtgtgctcatttgtgtacggcactaaatgggaattcaataggcatctgaagaacaaacacggactaaaggtagtggaaatcgatggggatcctaaatgggaaacagcgacagaagcccccgaagagcccagtactcagtacttgcatatcacagaggcagaagaagacgtgcagggtacccaggcggccgttgcagccctgcaggatctgaggtacacgtccgaatcaggggatcgactggaccccacggcggttaatattttgcaacaaattattgagctgggagccgaaacacacgacgccacagcactagcctcagtagttgctatggctcctggaacagttacggtcgtgaagcaagtgactgaagaagagccgagctcaaaccataccgtcatgattcaggaaaccgttcaacaggcatccgtggagttggctgaacagcaccatctcgtcgtctcctccgatgatgtggaaggtatcgagactgtgaccgtctacacccagggaggagaagcaagtgaatttatagtttatgtgcaggaagcaatgcagccagtagaggaacaggccgtggagcagccagcgcaggaattatag

SEQ ID NO: 24597 - DNA, 2274 bp, synthetic construct
  source 1..2274: mol_type = other DNA; note = Synthetic coding sequence
atggccctgggcgaggagaaggccgaggccgaggccagcgaggacaccaaggcccagtcatatggcagaggaagctgtcgggaacgagagctggacatccctggcccgatgtctggagagcagcctccgaggctggaggctgagggcgggctcatcagtcctgtgtggggcgctgaggggataccggcccctacatgttggattggaacagaccctggggggccctcccgtgctcaccagccccaggcgtcggacgccaacagagagcctgtggcagaacggagcgagcccgccctctccggacttcctccagcaactatgggaagcggagacctgctgctaagcggcgagtcccaggtggagaagactaaactgagcagctctgaagagtttcctcaaacgctcagcctgcccaggacgactaccatctgttccgggcatgatgcagacactgaagacgacccaagtcttgcagacctgccacaggcactggacctgtctcagcagccacactctagcgggctctcttgcctaagccagtggaaatccgtactgtccccagggtcagctgcccagcccagctcctgttccattagcgctagtagtaccggctcgtcactgcagggccaccaggagcgtgccgaacctcgcggcggatccctggcaaaagtctccagcagccttgagcccgtcgttccccaagagccgtcctctgtagtgggactcgggcctcgacctcagtggagtccacaaccagtcttctccggaggggatgcttcgggtctcggccgcagacgattgtccttccaggctgagtattgggcctgcgtgctgcccgactcacttccaccgtcgcctgatcgccactcaccattgtggaatccaaacaaggagtatgaggatctgttggactacacctacccactgcgccccggccctcaattgcctaagcacctcgactcaagggtgcccgccgatccggtgctacaagacagtggcgtggatttagacagtttctcggtctccccagcgagtaccctgaagagccccacaaacgtgagtcccaactgtcctcccgctgaagcgaccgcacttcccttctccggcccccgcgagccatctctcaaacagtggccgtctcgagtcccacaaaaacagggagggatgggattggcttcttggagtcagctggctagcactccccgtgctcccggctcccgcgatgcccgctgggaacgtcgtgaacccgccttgcgtggggccaaggacaggctgaccataggcaaacatctggatatgggaagcccgcagcttcgtacaagggatcgtggctggccatctccccggcctgagcgagagaaaagaacatcccagagcgctagaagaccaacctgtaccgagtcccgatggaagagtgaagaggaggtcgagtccgacgatgaatacctagcgctcccagcacgccttacccaagtgagttctctggtgtcttacctgggatccatttccactcttgttactcttcccacaggggatatcaaaggacagagcccacttgaggtgtcagactcagatggcccagccagtttcccaagttcctcatctcagtctcagcttcctcctggagcggccctacaagggagtggagaccccgaaggccaaaacccctgctttctgcgatcattcgtgagagcacacgattccgccggagaaggatctctaggcagttctcaggccttgggcgtcagcagcggattgctcaagacaagaccctcgctccctgcaaggctagaccggtggcctttttccgatccagacgtggaggggcaactccctagaaagggaggcgagcagggtaaggaatctctcgtgcagtgcgttaagacattctgttgtcagctggaggaactgatttgctggctttacaatgtcgctgatgtgacagaccacggcaccgccgctaggtccaacctcacctccctgaagagctcactgcagctgtacagacaattcaagaaagacattgacgaacatcagagtctgactgaatctgtcctgcagaagggggagatcctgctgcaatgcctgctggagaataccccagtgttggaggacgtacttggccggatcgctaaacagagcggcgaattggaatcccatgccgatcgtttatatgacagcatcctggcttctctcgatatgctggctggctgcaccctcataccagacaagaagcctatggcggccatggagcatccctgtgaaggcgtgtag

SEQ ID NO: 24598 - DNA, 540 bp, synthetic construct
  source 1..540: mol_type = other DNA; note = Synthetic coding sequence
atgaaccccagcatgaagcagaagcaggaggagatcaaggagaacatcaagaattcctccgtccctaggcgcacacttaagatgatacaacccagtgccagcggtagcctggtaggccgggaaaacgaattgtccgcagggttgtctaaacggaaacaccgaaacgaccacctcacatccactacttcgagtcccggggtgattgttccagagagttccgaaaataagaatctaggtggagtcacacaggagagctttgatctcatgattaaggagaacccatcttctcaatactggaaagaagtggccgagaagagacgcaaggcgctttacgaggctctcaaagagaatgaaaaattgcataaagaaatcgagcaaaaggataatgagattgcgcgcctcaaaaaggagaacaaggagttggctgaagtcgcagagcatgtgcagtatatggccgaattgattgaaaggctgaacggagaacccctggataatttcgagtctctggataaccaggagttcgactctgaggaagaatag

SEQ ID NO: 24599 - DNA, 309 bp, synthetic construct
  source 1..309: mol_type = other DNA; note = Synthetic coding sequence
atgaaccccagcatgaagcagaagcaggaggagatcaaggagaacatcaagaactcatcggttccccgtaggactctgaaaatgattcaacctagcgccagcggcagcctcgtgggccgggaaaacgaactgtcagcagggctgtctaaaagaaagcataggaacgaccacctgacaagcactacttcttctcctggggtcatcgtcccagaatcctctgaaaataaaaatttagggggagtgacccaggagtctttcgacctaatgatcaaagagaaccctagcagccagtactggaaggaggtgtag

SEQ ID NO: 24600 - DNA, 2259 bp, synthetic construct
  source 1..2259: mol_type = other DNA; note = Synthetic coding sequence
atggccgagcccgccagcgtgaccgtgaccttcgacgacgtggccttgtatttttccgagcaggaatgggaaatcctcgagaaatggcagaagcagatgtataagcaggaaatgaaaactaactacgagacccttgactcacttggctacgctttttctaagcctgatctgattacctggatggagcagggcagaatgctgttgattagtgaacagggatgcttagataaaactcgtcgcacaacaagcccccccacagatgaacagctgaatatgaaaaacactggcaaactcctgtgcttcgacgatgagggcactcccagaacgaaggaggaggactgcagactcaatggtcctcagaagcaggatttatgcgccgccttgcggggcaaagaacggaaaattctgctcgcccagacagctacttttcagtcgccatctctgagggagacggaaattttaaataagaaggtaagtatcaccgcctacgatccagacaagaaggacctgcgccacaagccccgggaaacccccggcaggcttgagatcccaactgggccaagatgttatagttgctatgtctgccggaaggtttttcaagttcggcgagacctcctcaaacataagaggagccactctaaatcgcagctgtgcagataccctaagtataagaacagttctagaggcaagtctgagctccgtcggacacaacgcctgctgtgccagaaaaaaagatttcaatgctcagaatgcgagaaatcttatttccttaagggatccctggttactcatcaagtggtccatactgggcaaagaccatacccttgtccagaatgcgacaaaacctttcgatatagagcaaatctgaaaaaacatttatgcctgcatcgtggggagagacccttttgttgtggcgaatgcggaagggccttcgtgcagcagtgtgaacttaccgagcacctccggcttcactctggcgaaaagccattccagtgtccccagtgcgaccgctgcttccgcctcaagcggggcatgaaagtgcacctaacgcagcattccggaaagcggcctttccactgccctgagtgcggcaggagcttcagccggaaggcggccctcaaaacgcaccagcgtacccactccgaagagaagcctttcagctgcggagaatgcggcagaaagttcatctataagatcaagttggatgagcacattagggtgcacacaggtgagaagccgttcagttgccctgagtgtaacaaaagctttcgactgaagaggagcctgaaggcgcacggcctccagcacatcggtaagcggccctttcaatgccccgaatgttcacgaggcttcttttggcgcaatgcaatgagagcgcaccagaggctgcactccgaacagaaacctttcccctgcgctgaatgcggcaaacggtttacacgaccaagtaagctcgcatgtcatacacgggtgcatgacaggcagaaggaattcccatgcggagagtgcaaaaagacattcagtcaacagtctaggctgacacaacacctgaaggtgcatactactgagaaaccttttagctgcgcagagtgcggccgttctttccgccgacgtgcccacttgacagagcatacaaggctgcactccggtgaagagccctttcagtgccccgagtgcgataaatcgttttcatggaaagcatcaatgaaattccatcaacgcatgcatcgtgatgaaaagccctttgcttgtggggagtgtgacaaaacatacacccaccagagccagctgactgagcatctgcgccttcatagcggagaaaaaccctaccagtgtcctgagtgtgaaaagacattccggctgaaaggcaaccttaaatcccacttgctccagcactctggacaaaaaccattctcttgtgtgatgtgtggaaagtcatttacgcagcagtaccgccttaccgagcacataagggtgcatagcggcgagaagccctttcagtgcccagaatgtgacaaatcgtactgcattaggggatcgctcaaggttcacttgtacaaacactctggtgaacgcccatttcagtgtccagagtgtggcaaaggcttcctgcagaagcgatctcttaaagcgcatctgtgcctccattctggcgaaagaccttttagttgcgacgaatgtggccgcagttttacatatgttggtgccctgaaaacccatatagctgtccatgcaaaagagaagcctagcagcttatag

SEQ ID NO: 24601 - DNA, 1935 bp, synthetic construct
  source 1..1935: mol_type = other DNA; note = Synthetic coding sequence
atgttcctgacctacatggagaccgtgaccaaggagctggtgagctggatgagaggccacgagtcaagcgttttctctatctctgtccatgcaagcggcaagtatgccattactacaagttctgatactgcgcagctgtgggatctcgatacctttcagcgcaaacgaaagctaaatattcgccaaagcgtggggattcagaaagtgttctttctcccccttagcaatacaatactatcatgtttcaaagataacagtattttcgcctgggaatgtgacacattattctgcaaatatcaactgccagctccgcccgagtcatcgtctatcctttataaggtttttgcggtgacccgggacggccggatccttgccgcgggcgggaaaagcaatcatctccacttgtggtgtctggaagctagacagttgttcagaataatacagatgcctacaaaagtccgagcaatacggcacttagaattcttaccagacagttttgacgctggatccaatcaagttttgggcgtcctctcacaggacgggataatgcgctttattaatatgcagacctgcaaacttttgtttgagataggctctttggatgaggggatttctagtagcgctatcagcccccacggtcgctacatagcatccatcatggaaaatggatctctgaatatttattcggttcaggctcttacacaagaaattaataagcctccaccccccctggtgaaggtcattgaagacctgcccaaaaacaaactctcctcctctgacctgaaaatgaaggtcacctcaggacgggttcagcagcccgctaagagccgagaaagcaagatgcagacacggattctcaagcaggacttgacgggtgatttcgagagcaagaagaacgaattgccagacggcttgaataagaaacgcctccaaatcctgttaaaaggttacggggagtaccccactaagtacaggatgttcatctggcgatccctgcttcagcttcctgagaatcatactgcatttagcaccctgatcgacaaggggacgcatgtcgcgtttctcaatctacagaagaagtaccctatcaaaagtaggaagttgttacgagtgctgcagcggacactgtccgcgcttgcccattggagcgtgatcttctcagatacgccttatctgccactcctggcttttcccttcgtcaaactctttcagaataaccaactgatctgcttcgaagtgattgcaacattgattattaattggtgccagcattggtttgagtactttcctaaccctccaattaacatccttagcatgatagaaaacgtccttgccttccacgacaaagaactgctgcagcatttcattgatcatgacattacatcccaactgtacgcctggcccttgctggagactgtgtttagcgaggtcttaacccgggaagagtggctcaagctgttcgacaacatattcagcaatcacccttcatttctgctgatgactgtcgtggcctacaatatctgtagtcgaacaccactgctgtcttgtaatcttaaggacgacttcgaattcttcttccaccacagaaacaatctggatatcaacgtggtgatccggcaggtgtaccacctaatggaaaccacacctactgacatccatccagatagcatgctgaatgtgtttgtggcactgacaaagggccagtatccagtgtttaaccaatacccgaagttcatcgttgactaccaaacacaggagagggaacgcattagaaatgatgagctggactatttgcgagagcgtcagctgaaaatttgtaaacttaaatcaacctccaaagagctcaagatgaagctgggaacgagaaatagatcctgtttcgtgaagcttaagaaacaggaggaaaagtgttcctataaacgacgccggaagtag

SEQ ID NO: 24602 - DNA, 735 bp, synthetic construct
  source 1..735: mol_type = other DNA; note = Synthetic coding sequence
atgccccacaagatcggcttcgtggtggtgagcagcagcggccacgaggacggcttctctgcgagggagctcatgattcatgctcccactgtatcagggtggagatccccacgtttttgccagttcccccaggagattgtccttcagatggtggaaaggtgcaggatacgcaagctccagttattggcccaccaatacatgattagttccaagattgagttctacataagcgaaagtcttccagagtattttgcaccctaccaagcagaacgcttccgtaggctgggatacgtatccttgtgcgataacgaaaaaacagggtgcaaggcccgggaactgaagagcgtctacgtcgatgctgttggccaatttctgaagctgatttttcatcagaatcacgtgaataagtacaatatctataatcaggtagctctcgtcgctatcaatattattggggaccctgccgatttctctgatgagagcaacacagccagccgagaaaaattgatagatcactacctcgggcataacagtgaagatcccgctcttgagggaacttacgcttctagtgtgcgcactgggggcgagagcacatttggcgagctcaagggacctgcagttccttccagcgttaccctctcagtcctgggaacctctcttggacagtggtttccatgccaccttcccgcagtggacgataacgaaggcacgccgtttcagaggtgcctcgtatag

SEQ ID NO: 24603 - DNA, 2778 bp, synthetic construct
  source 1..2778: mol_type = other DNA; note = Synthetic coding sequence
atgccccacaagatcggcttcgtggtggtgagcagcagcggccacgaagacgggttctctgctagagaactgatgatccatgcgcctaccgtgtccggctggaggtctccaaggttctgtcaattcccccaggagattgtcctccagatggtggaacggtgccgtatccggaaacttcagctgttagcccaccaatatatgattagctctaagattgaattttacatttcggagtccctgccagagtatttcgctccctatcaggccgaaaggttcaggcgtctcgggtatgtctctctttgtgataacgaaaagactggctgcaaggcaagggaactgaagagcgtttacgtcgatgcggtaggacaattcctgaaactgatattccatcagaatcacgttaacaagtacaacatctacaatcaggtcgcgctggtggcaataaatattatcggagaccctgctgatttttctgacgagtctaataccgcctcccgagagaaactcattgatcactatctcgggcataatagcgaagaccccgctctggagggaacgtacgccagaaaaagcgattacatttctcccctcgacgacctcgcattcgacatgtatcaggatccggaagtggcacaaatcatccgaaaactcgatgaacgaaaacgggaggcagtccagaaggagcggtatgactacgccaaaaagctgaagcaggccattgctgacctgcagaaggtaggcgaacggctcggtcggtatgaagtggagaaaagatgcgctgtggagaaagaggattacgatttagccaaagaaaaaaagcaacagatggaacagtaccgcgctgaagtttacgaacagcttgagctgcacagtctgctggacgctgaactgatgcggagaccctttgatctgccattgcagccattagcacgttcaggctccccttgccatcagaagcctatgccttcactgccacagttggaagaaaggggcactgagaatcagttcgccgagccattcttacaggagaagccttcttcttactcgttgactatctccccccaacacagtgcagtcgaccctttgctgcccgccacagatcctcatcccaagataaatgctgaatcattaccctatgatgagcgccccttgccagctattcgaaagcactatggagaggctgtcgtggaacccgagatgtctaacgccgatatctcagatgccaggcgtggcggtatgctaggcgagcccgagcctctcaccgagaaggcactgcgggaagcttcatctgcaatagacgtgctcggcgagacattggtcgcagaagcttattgtaaaacttggtcttaccgcgaggatgccctgctcgccttaagtaagaagttgatggagatgcccgttggtacacctaaagaagaccttaaaaataccctgagagcttctgtcttccttgtcaggcgggctattaaagacatcgtgactagcgtgtttcaggcctcactgaaacttcttaaaatgattatcacacagtatataccgaagcacaaactgagcaagttggaaactgcccattgtgttgagagaaccatccccgtgctgctgacacggacaggtgatagtagcgctcgtctaagggtcactgccgcaaattttattcaggagatggcattatttaaggaggtgaaaagcttgcaaatcattcctagctaccttgtacagccactgaaagccaactcatcagtgcatctcgctatgtctcagatgggccttctggcgcgactgctcaaggacttggggacagggtccagtggtttcaccattgacaacgttatgaagttttcagtatctgcccttgagcacagagtgtacgaagttcgggaaactgcagtcagaatcattttagacatgtatcgacaacaccaagcatccatcttagaatatttgcctcctgatgacagcaacacacggcgaaatattctatacaaaaccatttttgagggtttcgcaaagatcgacgggagggctacagatgcagagatgcgtgcccggagaaaagcggctacggaagaagccgaaaaacagaaaaaggaggaaataaaagccctgcagggccagctggctgcgcttaaagagattcaggcagaggttcaggagaaggaaagcgacgcagtgaaaccaaaaaaccaagatatccagggaggtaaggccgctccagccgaggccttagggattcccgacgagcactacttggacaacctctgtatcttttgtggagagcggagcgagtcattcactgaagaaggactcgatcttcattactggaaacactgcctcatgttaacccgctgcgatcactgcaagcaggtagtggaaatatccagcttaaccgagcatctgttgaccgagtgcgacaagaaggacgggttcgggaagtgctaccgttgctctgaggcagttttcaaggaagagctgccgaggcatataaagcacaaggattgcaacccagccaagccagaaaagctggcgaatagatgccccctgtgtcatgagaacttcagccctggcgaggaagcctggaaggctcacctgatggggcccgcgggctgcaccatgaaccttcgcaagacccacattctgcaaaaggcccctgcactgcagccagggaaatcgtctgctgtcgccgcgtccggtcccctgggcagtaaggccgggtccaagataccgaccccaaaggggggcctgtcaaaatcgtcttctagaacatacgctaagcgctag

SEQ ID NO: 24604 - DNA, 2145 bp, synthetic construct
  source 1..2145: mol_type = other DNA; note = Synthetic coding sequence
atggcccgggccggcagctgcggcggcgccgccgccggcgccggcaggcctgaaccttgggaactgagcctcgaggaggtccttaaggcctacgagcagccattaaatgaagagcaagcctgggcggtgtgttttcagggctgcagagggctgcggggctctccaggtcgccggcttagagacaccggagatctgttgctccgtggcgacggttcagtgggtgcaagagaacccgaggcagcagagccggctaccatggtggttcctctagcctcgagcgaagctcaaactgtgcagtcgcttggctttgccatctatagagccttagattgggggctagacgaatctgaggagcgagagctatcgccccagctggagcgcctgatagatttaatggcaaacaacgacagcgaggacagtggatgcggtgctgcagatgaggggtatggcgggcccgaggaggaggaggaagcagaaggagtcccacgaagcgtccgcacttttgcacaggctatgagactgtgcgcggccaggctgacagatcccagaggtgctcaagcacattaccaagccgtgtgtcgcgcgctcttcgtcgagactctggaactgcgcgcctttctcgctcgagttcgggaagccaaagagatgcttcagaaactccgggaagacgagccccatctcgagacacctagagcagagctggatagtctgggccacaccgattgggcacggctgtgggtgcagctgatgcgagagcttcgccggggtgtaaaattgaagaaggtgcaggaacaagagttcaacccactcccaacagagtttcagttaactccattcgagatgctcatgcaggatattagagctcgcaactacaaactcaggaaagtgatggtggacggcgacattccaccccgcgtcaaaaaggatgcacacgagctgatcctggatttcattaggagtcggcctcccctgaagcaagtgtctgaacggcggctgagaccactgccaccaaagcagcgatccctgcacgagaagatattggaggaaatcaagcaagagaggcggctgcgtcctgtgcgcggtgaggggtgggcagctcggggatttgggtcactgccatgcattttgaacgcatgttctggggatgcgaagagtacctcatgtattaatctctctgtcacagatgccggcgggtctgctcaaagaccacgaccccgggtcctgttgaaagccccgaccctcgccgaaatggaggagatgaacacatctgaagaggaggaatccccctgtggggaagtgacgttaaaaagggacagatctttctccgaacacgatctcgctcagctgcggtccgaggtggcctccggactgcagagcgccacccacccgccgggcggcaccgaacccccaagaccacgcgcaggaagcgcccacgtttggaggccgggcagcagggaccagggtacatgtcccgcgtccgttagcgaccccagccacccattactgtcaaaccgagggtcatctggagatcgaccagaggctagcatgacgcctgatgccaagcacctgtggctcgaattttcacaccctgtcgaatccctcgccctgaccgtggaggaggttatggacgtccggcgggtgctggttaaggcagaaatggaaaaatttctgcagaacaaagaactgttttcttccctgaagaaaggtaaaatttgctgttgctgccgagcaaagtttcctctgttctcatggccgcctagctgcttattctgtaaaagggctgtttgcacatcttgctctattaaaatgaagatgccttcgaagaagttcggccacatccccgtctacactctggggtttgaaagtccacagcgagttagcgcggccaagaccgccccaatccagcggagggacatcttccaaagcctgcagggtccccaatggcaatcggttgaagaagcttttccacacatttatagtcatggttgtgtgcttaaggatgtgtgctcagagtgtaccagttttgtcgctgacgtggtcagatcttcccggaagagcgtggatgtgctcaatacaaccccccgacgctcacgacaaacacagagtttgtacatacctaacacgcgcacgcttgactttaaatag

SEQ ID NO: 24605 - DNA, 1308 bp, synthetic construct
  source 1..1308: mol_type = other DNA; note = Synthetic coding sequence
atgaacttcagcgaggtgttcaagctgagcagcctgctgtgcaagttctccccagatggtaagtatttagcaagctgtgtgcagtacaggctggtggtgagggatgtgaataccttacagatccttcagctttacacctgtttagatcagatccagcatattgagtggtcggccgacagtctgttcatcctgtgcgccatgtataaacgtggcttggtacaagtttggtccttggaacagcctgagtggcactgcaaaatcgacgaaggcagtgcgggtctggttgcaagttgttggagtcccgacggaagacatatccttaacacgaccgaattccacctccggatcaccgtctggtcactgtgcacgaagtctgtgagttacattaaatatcccaaagcctgtctgcagggcatcacatttacaagagatggtagatatatggctttggctgagagaagagactgtaaagattacgtgtctatctttgtgtgtagcgattggcagttattacggcactttgacaccgacacgcaggatcttaccggaattgaatgggcccccaacggttgcgtcctggccgtgtgggatacatgcttagagtacaaaattttactctatagtctggatggacgcctactgtccacctactcagcttatgagtggtctctgggtatcaagtccgttgcctggtcgcccagctctcaatttctggctgtcgggtcttatgatggaaaggtgcgcatattgaatcacgtaacatggaaaatgataacagagttcgggcacccggctgcaataaacgacccgaagatcgttgtctacaaggaagccgagaagtctcctcagctgggtctgggctgcctctcctttcccccaccaagggccggagccgggcctttgccctcaagcgagagcaagtacgagattgcaagcgtgcccgtaagcctgcagactttgaagccagtaacagatcgggccaatccaaagattggtataggaatgctcgcattcagtcccgacagttattttcttgccacaagaaatgataacatcccgaacgctgtatgggtttgggacatacagaagctacgtttgtttgcggtgcttgaacagttaagccctgttcgagcctttcagtgggacccccagcaaccacgcctggcaatttgcaccggagggtcacgcctgtatctgtggtctcctgccggttgcatgtcagtgcaggtgccaggagagggcaaacacatccccgaggcgaccgatgtggctgcactactgtgcgcagtgtggcaccatacgggctag

SEQ ID NO: 24606 - DNA, 819 bp, synthetic construct
  source 1..819: mol_type = other DNA; note = Synthetic coding sequence
atgctgcagctgcgggacagcgtggacagcgccggcaccagccccactgctgtactcgcagctggggaggaggttggagccggaggagggcccggaggcgggagaccaggagcaggcaccccactgcgacaaacactctggcctttatctattcacgaccctaccaggagagctcgggtgaaggaatactttgtcttccgtccgggaagcattgaacaggccgttgaagagattcgagtggtggtcaggccagtggaggatggggaaatccagggcgtgtggttgctcaccgaggtagatcactggaataacgagaaggaaaggctggtgctcgtgactgaacaatccctgttgatttgtaaatacgattttatttccctgcagtgccaacaggtagttaggatcgcgctcaacgcggtggataccattagctatggagagtttcaattcccaccaaaatctctgaataagagggaaggcttcggaataagaatccagtgggacaagcaatcgcggccttcattcatcaatcgatggaacccctggagtaccaatgttccctatgccacatttactgagcaccccatggctggggctgacgagaaaaccgcttccctgtgccagctggagagctttaaggctctcctgatccaggctgtgaaaaaggcgcagaaagagtcccctttaccaggacaagccaatggagtcctgattttggaaagacccctgttgattgagacctatgtgggactgatgagctttatcaataacgaagctaaactcggctatagtatgacaagaggtaaaatcggcttctag

SEQ ID NO: 24607 - DNA, 870 bp, synthetic construct
  source 1..870: mol_type = other DNA; note = Synthetic coding sequence
atgtggcccttccccagccggagcctgttccccccccccacccaggcctggttacagaccgtgtcctccgatcctgaagcccaggggtggggagcatggaacgagaccaaagaaattcttggtcctgaaggcggtgaggggaaggaggagaaagaagaggaggaggatgccgaagaagaccaagacggtgacgcaggtttcctgctcagcctgctggagcaagaaaacttagcagaatgccctctccccgatcaagagctcgaagccataaaaatgaaggtctgcgcaatggagcaagctgaggggacacctcgtccacctggcgtccagcagcaagccgaggaagaggagggcacagcagctgggcagttgttgtctccagagacagtcggctgccccctcagtggaactcccgaagagaaagttgaggccgatcaccgtagcgtttacgtggggaatgtcgattatggcggctctgctgaagagctggaagcgcatttctcccgctgtggcgaggtgcatagggtgacaattttgtgcgacaagttctccggccacccaaagggttatgcttatatcgagttcgccaccaaaggctcagttcaagctgctgtcgaactggaccagtctctttttcgaggaagggtgattaaagttctgcctaagcgaacgaacttccccggcatctcaagtaccgacagaggtggtctgcgcggacatcctggaagtagaggggcgcccttcccacattctggattgcagggccgtcctagactgaggccacaaggacaaaaccggacccctgccgccctgactccactgtgggcccgtcctctgccctgggttgtggtatctcacgtgattaagtag

SEQ ID NO: 24608 - DNA, 1266 bp, synthetic construct
  source 1..1266: mol_type = other DNA; note = Synthetic coding sequence
atgttcgagatcctgaccagcgagttcagctaccagcacagcctgtcaatcctcgtcgaagaatttctccagtcaaaggagcttagggctaccgtgactcaaatggagcaccaccacctgttctcaaacattctggacgtcctaggcgcgtctcagcggtttttcgaagacctggagcagaggcacaaggctcaagtgctggtcgaagatatcagtgacatcctggaggagcacgccgaaaaacacttccatccatatatagcgtactgtagcaacgaagtgtatcaacagaggaccctgcagaagcttatttcttctaacgccgctttccgagaagctctgcgcgaaattgagagacgacccgcttgtgggggacttcctatgctgagttttcttatactgccaatgcagagagttacaaggctgccactcctgatggacacattgtgtctgaagactcagggacactctgaacggtataaggccgcatcgcgggccctgaaagctatatcaaaattagtcagacagtgcaacgagggcgcacataggatggagcgcatggaacagatgtataccctccatacacagctcgacttctccaaggttaagagtttgccgctcattagcgcttctcgctggctgttaaagaggggcgaactttttttggtggaggagaccggacttttccgaaaaatcgcctctcgtccaacatgctatttatttctgttcaacgacgtgctggttgtaacaaagaaaaagagtgaggagagttatatggtacaggactatgctcagatgaaccacattcaggtggaaaagatcgaaccgtccgagctgccacttcctggcgggggtaatcggtcaagtagtgtgccccacccgttccaggttaccttgctgcgtaattcagaaggacggcaggagcaattgctcctttcttctgatagcgcgtccgatcgcgcacggtggatcgtggctctcacacacagcgagcgccagtggcagggtctgagctccaagggtgatcttcctcaggtggagatcacaaaggctttctttgcgaagcaggctgatgaggtgacactgcaacaggccgatgtcgtgttggtgctgcaacaggaggatggatggttatatggggaaagactacgcgacggtgaaacgggatggttccctgaagacttcgcaagattcattacctctagagtagcagttgagggcaacgttaggcggatggagaggctccgggtggagaccgacgtctag

SEQ ID NO: 24609 - DNA, 1266 bp, synthetic construct
  source 1..1266: mol_type = other DNA; note = Synthetic coding sequence
atgttcgagatcctgaccagcgagttcagctaccagcacagcctgtccatcctagtggaagaattcctgcagtcaaaagaattgagggcaaccgtgacccagatggaacaccatcacctgtttagcaatattctcgacgtactaggtgcaagtcagagatttttcgaagatttggaacaaagacataaggcgcaggtcctggtggaagacatcagcgacatcctcgaggaacacgccgaaaagcacttccacccttacattgcatattgttctaacgaggtgtaccagcaacgaaccctgcagaaattgatctcttcaaatgcggccttcagagaggcgttgagagagattgagcgccgccctgcctgtggaggtctgcccatgctgagtttcttgattctgcctatgcagagagtcaccagactaccgctcctgatggatacactgtgccttaagacacagggacatagcgaacggtacaaggcagcttctcgcgcactgaaggccatatccaaactggtcaggcaatgtaatgaaggcgcccatcggatggagaggatggaacagatgtatactttgcacacccaactggacttctcaaaagtaaaaagccttcccctgatcagcgcatctcgttggttactcaagcggggagaactgtttctggttgaagaaaccgggctgttcagaaaaattgcctctcgaccgacctgctacctttttctctttaatgacgtcctggtggtgaccaaaaaaaagtcagaggaaagctatatggtgcaggactacgcgcagatgaatcacatccaggtcgaaaagatagagccctccgaactccccttgcctggtggcggtaatcggtcctccagcgtgccccacccgtttcaagtgaccctcctcagaaacagcgaaggcaggcaggagcagttgctcttgagcagtgattccgccagcgaccgagcccgctggattgtggctcttactcattcagaacgccaatggcaaggcctgagctcaaaaggcgaccttccgcaggtggagatcaccaaagctttcttcgcaaaacaggcagacgaggtcaccttgcagcaggccgatgtggtgctggtgctgcagcaagaagacggctggctgtacggcgagagattacgcgacggagagaccggatggttcccggaggacttcgcaagattcatcacatccagggtggcggtcgaaggtaatgtgcgtcgtatggagaggttacgcgtggaaactgacgtgtag

SEQ ID NO: 24610 - DNA, 2130 bp, synthetic construct
  source 1..2130: mol_type = other DNA; note = Synthetic coding sequence
atggcccagcggcacagcgacagcagcctggaggagaagctgctgggacatcgattccacagcgaactccgactggacgccggcgggaaccctgcatccgggctgcccatggtacgcggtagcccgagggtgagagacgacgctgcctttcagccacaggtccccgcccctccccaaccccggccgcctggccatgaggaaccatggcccattgtgttgagcacagaaagcccggctgctctgaaactaggcacccaacagctcatccctaagagcttagctgtcgccagtaaggctaaaaccccagcacgccaccagtcatttggcgccgccgtactgagtcgtgaggccgctagaagggacccaaagttgttaccagccccctccttctcactcgacgatatggatgtcgataaagaccctggcggaatgctacgaaggaatttacgaaatcagtcctaccgcgccgccatgaaggggctgggcaagcctgggggccagggtgacgctatccagctgagtccgaaactgcaggcactcgcggaagaaccctcccagccacacacccggtcacctgctaagaacaagaaaaccctgggccggaaaagaggccacaaaggatcctttaaagacgacccacagctttatcaggagatccaggaaagggggcttaatacttctcaggagtcagacgatgatatcttggacgagagtagctcacccgagggaacccagaaggtagacgccacaatagtggttaaatcatacaggcccgcccaggtgacctggtcccagctgccagaggtcgtggagctagggatcctggatcagctttctacagaagagcggaagcgccaggaagctatgttcgaaattctcacaagcgagttttcctatcagcacagtttgtcaatcttagtcgaggaattcctgcagtccaaagaactgagagccactgtgacccagatggagcatcatcacctgttctccaacatcctggatgtactgggtgccagccagcgcttttttgaggatctggagcagagacataaagcacaggtgctggtggaagacatatcagatattctggaagaacacgcggagaagcatttccatccgtatatcgcatactgctccaacgaggtatatcaacagcgcacattgcagaaactgatatctagcaacgctgctttcagagaagcactgagagagattgaacggcgccccgcttgtggggggctaccaatgctcagtttcctcattttgccaatgcagagggtcacccgcctgccacttctcatggacacgctatgcttgaagacacaaggccattccgagcgctataaggcagctagccgagcgctgaaagctatttcgaaactggtgagacagtgcaacgaaggggcacatagaatggagcggatggagcagatgtacacgctgcatactcaactggacttctccaaggtaaagagcctcccactgatttctgcgtcacgctggctactgaagaggggcgaactcttccttgtggaagagactggtcttttccggaagatcgcatcccgccctacttgctacttattcctgtttaacgacgtgcttgtcgtaacaaagaagaagtccgaagaaagctatatggtccaggactatgcccagatgaaccatatacaggtggaaaagattgagccttccgagctccccctgcctggcggtggtaatcgcagctcctcagtgccccaccctttccaggtcacacttctgcgcaattctgaagggagacaggaacagctgcttctttctagcgatagtgcctcagatagagcccgttggattgtggccctcacccactcagaaagacaatggcaagggctgtcatctaagggcgatttaccgcaagtcgaaattaccaaagcattcttcgccaaacaggccgacgaggtgacgttgcaacaggctgatgtggtcctggtgctgcagcaggaggacgggtggctgtacggtgagagactgcgggacggtgagactgggtggttccccgaggactttgcaaggtttattacttcccgcgtggcagtggaagggaatgtccgccgcatggagcgactgcgcgtggaaactgatgtctag

SEQ ID NO: 24611 - DNA, 1287 bp, synthetic construct
  source 1..1287: mol_type = other DNA; note = Synthetic coding sequence
atggtgtggcaggtgctggagggcctgagccaggacagcgccaagcggctgcgcttcgtagcaggggtcatctttgtggacgagggagccgcttgcggacagagtctcgaggaaagaagtaagacccttgctgaggtgaaacctatcctgcaggcgacgggattcccttggcacgtggtggctttagaagaggtgttttcactacctccctcagttctctggtgtagcgcacaggaactagtgggtagcgagggagcctataaagctgctgttgattcttttctgcaacagcagcatgtcttaggggcaggcggaggccctgggccgactcagggcgaggagcagcccccccagccccctctcgatccgcaaaatctggccaggccacctgcccccgcccagactgaagccttatcacagctgttctgcagtgtcagaaccttgaccgcaaaagaggaacttctccagactctgaggactcatctcatacttcatatggcccgcgcccacggatactcaaaagttatgactggtgactcttgcactcgcttagccatcaagttaatgacaaacctcgccttagggcggggagcattcctagcctgggacacaggcttttccgatgagcggcacggcgatgtggtcgttgttagaccaatgagagaccacacactgaaggaggtcgccttctacaaccgcctgttcagcgtgccttccgtgttcacccctgctgtggacacaaaagctcccgagaaagcatcaattcataggctgatggaagcgtttatcttgcgacttcagacccagttccctagtaccgtgtccactgtctacaggactagcgagaaactcgtgaagggcccaagggatggacctgcagcgggagactccggaccccgctgtttgctgtgtatgtgcgcactggatgtggatgccgccgacagcgccactgcttttggtgcccagacatcatcgcgcctgagtcagatgcaatcacctatacccctcactgagaccagaactccccctggcccttgctgttctcctggcgtgggatgggcccagcgatgtggacagggagcgtgcaggcgcgaggacccacaggcctgtatcgaagagcagctgtgctactcctgtcgtgtcaacatgaaagaccttccttcccttgacccactgccgccatacatactcgctgaggctcagctccggacacagagagcctgggggcttcaggagattcgtgactgtctgatcgaagattcagacgacgaagccggacaaagttag

SEQ ID NO: 24612 - DNA, 417 bp, synthetic construct
  source 1..417: mol_type = other DNA; note = Synthetic coding sequence
atgggcgagcaggccgacggcaaggacagcatcgcccggcaggtggcacccgaatctcactggcccgagctccgcgttcttatattggtcgtgagcgcagagaagaaacttactggatccacagtgggcatgagagctagcgtggaaacttccccactgcttagatttagggcggagtccgtggtgcctgcccacggaggagatgggcctctgcacccgggagcccgtttacctcagctcagacctgctgaccatgaaggccaacagccagtccccaggcaccttccccggcatctgcctccatccctaacgagtatgcctagccccggcgcttcgtctacttggtgtaccgcctctactcctaccacaggcaccccccgatggagaacacctctgactcgtgcccctatgccctag

SEQ ID NO: 24613 - DNA, 597 bp, synthetic construct
  source 1..597: mol_type = other DNA; note = Synthetic coding sequence
atgagcaccgtggacctggcccgggtgggcgcctgcatcctgaagcatgccgtcacaggtgaggctgtggaactgcgctcattatggagagagcatgcctgtgtggtggcaggattgcgtcgatttggctgtgtcgtgtgccgatggatcgctcaggacctgtcttctctcgcaggcctgttagaccagcatggagtgagattagtcggtgtcggtcctgaggcgcttgggctgcaggagttcctggacggcgattattttgccggcgaactgtacttggatgaaagtaagcagctgtataaggagctgggttttaaacggtacaattcgctatctattcttccagcagccttagggaagccagtgcgggacgtggccgcaaaggcaaaggccgtgggaatccagggcaatctgtctggtgacctgttacagagcggtggcctactcgtcgtttccaagggaggcgataaagtgttgctccacttcgtccagaagagtcccggagattatgtgccgaaagagcacatccttcaggtgctgggcataagcgccgaggtttgcgcttccgatccaccacaatgcgaccgagaggtttag

SEQ ID NO: 24614 - DNA, 642 bp, synthetic construct
  source 1..642: mol_type = other DNA; note = Synthetic coding sequence
tgaagccgggagcggggcagccggagcgaggagcccggcgccggcaaccgagagtccggcagcagggagcctggtctggcggccgctgcaatgagtactgtcgacttggcacgcgtaggggcctgcattttaaagcacgccgtcaccggagaggctgtggaactgcgtagtctgtggcgggagcatgcttgcgtggtagccggcctccggcgttttggttgcgtagtctgccgttggatcgcccaggacctcagttctttggccggcctattggatcagcacggcgtcagattagtcggtgtgggacctgaagccctggggctgcaggagtttttggatggcgactactttgctggtgagttgtacctcgacgaaagtaaacagctctacaaggagttggggtttaagcgatacaattccttgtccattttgcctgccgccttagggaagcccgttagagacgtggccgccaaagctaaagccgtgggcattcaggggaatcttagcggggatctgctgcagagcggcggactattagtcgtaagcaaggaggttcctaggaggctgcgacctcagggcgcccaccccgccggaccaggccacctgtgcggcgggctctgtcaaaggccagcctcagtttag

SEQ ID NO: 24615 - DNA, 2553 bp, synthetic construct
  source 1..2553: mol_type = other DNA; note = Synthetic coding sequence
atggccgaggtggaggccgtgcagctgaaggaggagggcaaccggcacttccaattacaggactacaaggctgcaactaactcttatagtcaggctctgaaactgaccaaggacaaggcgcttcttgccaccttatatcgcaatcgggccgcctgtgggctcaagactgaatcatacgttcaggccgcatcagatgcttccagggccatagacattaacagcagcgacatcaaagccttatatagaaggtgtcaggctctcgagcacctgggcaaacttgaccaggcttttaaggatgtgcaacggtgcgccacccttgaaccccggaaccagaattttcaagagatgctgagacggcttaacacatcaatccaggaaaagttacgggtgcaattcagcactgattcccgcgttcagaagatgttcgaaattttgctggacgagaattctgaagccgataagagggaaaaggcagcgaacaatctgattgtcctgggcagagaggaagctggggctgaaaaaatttttcaaaacaacggcgtggcgcttctgctacaactgctcgacaccaaaaagcccgagttggtgctggccgccgtcaggaccctgtctggcatgtgtagcggccaccaggccagagctaccgtgattctgcacgccgtgaggattgatagaatttgtagcttgatggctgtcgaaaacgaagaaatgtcccttgctgtctgtaacctgctacaagctataattgactctctgagcggcgaggataagagggagcaccgcggaaaggaagaagcacttgtgttggataccaagaaggatctcaagcagataacctcccacctgttggatatgcttgtgtctaagaaggtttcagggcagggaagggaccaggcactcaatctgcttaataagaacgtgcctcggaaggacctcgccatccatgacaacagccgtaccatttatgttgtcgataatggactgcggaaaatactaaaggtggtgggtcaggttcctgatttaccatcctgcctccctcttacagacaatacgcggatgttggcgtcgatcctgataaataaactgtatgatgacctaaggtgcgatccagagcgtgatcatttcaggaaaatctgtgaagagtatatcactggcaagttcgaccctcaagatatggacaagaacctaaacgccattcagaccgtatcgggcattcttcagggacctttcgatctgggtaatcagcttttaggactaaaaggcgtgatggaaatgatggtggcactgtgtggctcggagcgagaaactgaccagctggttgccgtcgaagctttgatccacgccagtaccaaattatccagagcgacatttatcatcacaaatggcgtctcactcttgaaacagatctataaaactaccaaaaatgagaaaattaagatcaggactctggttacaagtgataagacaatcctttacagcgtagccactaccctggtgaattgtaccaattcttatgacgtgaaagaggtgatcccagaactggtgcaattggccaagttcagcaagcagcatgtgcccgaagagcaccccaaagataagaaagattttatcgatatgagagtgaagaggctcctgaaggcaggagttattagcgccctggcatgcatggtcaaggctgactctgcgatcctgaccgatcagactaaggagctgcttgcacgcgtgttcttagctctgtgcgataatccaaaggatcggggtaccatcgtggcccagggcggtggaaaggccctcatccccctggccctggaaggcacagatgtcggaaaggtaaaagcggcccatgccctggcaaaaatcgcggctgttagcaacccggatatcgctttccctggcgagagagtctacgaggtcgttcgtcccctggtcaggctccttgatacccaaagggatggattgcaaaattacgaggcgctattaggccttactaatctgagcgggaggtcagacaaattaagacagaaaatatttaaggaacgcgcactgcctgatatcgagaattacatgttcgaaaaccatgatcaactgagacaagcggccacagaatgtatgtgtaacatggtcctgcacaaggaagtccaggaaagattcttggctgacggaaatgaccgcctgaaattagtggttctgctgtgtggtgaggatgacgataaggttcagaatgccgccgccggagctcttgccatgctgaccgctgctcacaagaaattgtgcctaaagatgacacaggtcacaacacagtggctggagattctacagagactatgtctccacgaccagctttctgtgcagcatcggggactggtcatagcatacaaccttctcgcagcagacgctgagctcgcgaaaaaactcgtcgaaagcgagttgctggagattctgaccgtggtggggaagcaggagcctgatgagaagaaggccgaggtcgtgcagacggctagggaatgccttattaaatgcatggactatggcttcataaaacctgtctcgtag

SEQ ID NO: 24616 - DNA, 552 bp, synthetic construct
  source 1..552: mol_type = other DNA; note = Synthetic coding sequence
atgatgcagatctgcgacacctacaaccagaagcacagcctgttcaatgcaatgaaccgatttataggcgcagttaataacatggaccagactgtgatggtgccttccttactccgtgatgtccccctcgccgacccagggctggataacgacgttggcgtcgaagttggcgggtcaggtggttgtctcgaggaacgaacacccccagtccctgattccggaagtgcaaacgggtccttttttgctccctccagggatatgtacagtcactacgtgctgctgaaaagcatacgtaatgatatcgaatggggcgtgttgcatcagcccccccctcccgcaggctctgaggagggctctgcctggaagtccaaggatattcttgtggacctcggacacctcgagggcgctgacgctggcgaggaggacttagagcagcagtttcactatcacctgagaggactacacactgtgcttagcaagctgacgagaaaagctaacatcctcactaatagatacaagcaggaaattggcttcggaaactggggtcactag

SEQ ID NO: 24617 - DNA, 366 bp, synthetic construct
  source 1..366: mol_type = other DNA; note = Synthetic coding sequence
atgttcaacaagtgcagcttccacagcagcatctaccggcccgccgcagacaacagtgcaagcagcttatgtgcgatcatctgtttcctgaatttggtgattgagtgtgatctggagaccaacagcgaaattaataaattgatcatttaccttttctcacaaaataatagaatacggttctctaaactgttgctgaagatcctgttttatatcagcatattctcatatcctgagctcatgtgcgaacagtatgtcacttttattaagcccggaatccactacggccaagtatctaagaagcacattatctactcgacattcctgagcaagaacttcaagtttcagctgctcagagtgtgctggtag

SEQ ID NO: 24618 - DNA, 972 bp, synthetic construct
  source 1..972: mol_type = other DNA; note = Synthetic coding sequence
atggagagccgggtggccgacgccggcaccggcgagaccgcccgggcagcgggtggcagtcctgccgtcgggtgcaccacccgcggacccgtggtttcagcccccctcggagcagcgagatggaaactgttgcgacaagtgctgaaacagaagcatctggatgactgtcttagacatgtttcagtccgtcgctttgaaagcttcaacctgttctccgttaccgagggaaaggaacgggaaactgaggaggaagtaggggcctgggtgcagtatacctcaatcttctgtccagagtacagcatctctctccgacacaacagcgggtcgctgaacgtcgaagacgtgctgacatcttttgataatacgggcaatgtctgcatctggccaagtgaggaggtgctcgcatattactgcctcaagcataacaacattttcagggctcttgcggtctgcgaactgggaggaggcatgacctgccttgccgggttgatggttgctatttccgccgacgtgaaagaggtgctcttaaccgatgggaatgagaaagctatccgaaacgtgcaggacatcattacaaggaatcagaaagctggtgtcttcaaaacccagaagatctcaagctgcgtactccggtgggataatgagacagatgtgagccagctggaggggcatttcgatatagtgatgtgtgccgactgtctgttcctggaccagtaccgtgcttccctggtcgacgcaatcaagaggcttctccagccccgaggaaaggcaatggtgtttgccccgcggcgcggtaataccctgaaccagttttgcaatcttgctgaaaaggccggcttctgcatccaaaggcacgagaattacgacgagcacatcagtaacttccacagcaagctaaagaaagaaaatcctgatatatacgaggagaacttgcactaccccctgctactgatcttaaccaaacatggatag

SEQ ID NO: 24619 - DNA, 3120 bp, synthetic construct
  source 1..3120: mol_type = other DNA; note = Synthetic coding sequence
atggccgtgcagctggtgcccgacagcgccctgggcctgctgatgatgacggaagggcgtaggtgccaggtccacttgctggacgaccgcaaactggagttgctggtgcagcctaagctcctagccaaggagctcctggacctggttgcaagtcactttaatcttaaagaaaaggaatatttcggaatcgctttcactgatgagaccggccaccttaattggctgcagctagacaggcgggtgctggaacatgacttcccaaaaaaatccggcccagtggtcctatatttctgtgttcgcttttatatcgaatccatcagttacttgaaggacaacgcaaccattgagcttttctttctgaacgccaagagttgtatctataaggagcttatagacgtggattctgaggttgtcttcgaactggcttcatatatcctgcaagaagccaagggcgacttctcttcaaatgaggtcgtccgttccgatctcaaaaagctgcctgccctgccaacccaggccctgaaggagcatcccagtctcgcctactgcgaggaccgagtaatcgagcactataaaaaactgaacggacagaccagagggcaggcaatcgtgaactatatgtcaatcgtcgagagtctgccaacatacggcgtgcactactatgcagtgaaggacaagcaagggatcccctggtggttgggactatcatataaggggatttttcaatatgactatcatgataaagttaagccacgcaaaatttttcaatggcgccagttggagaatctgtattttcgggagaaaaagttcagcgtagaagtgcacgacccccgtcgggcaagtgtgacgaggcggacgttcggtcattctgggattgcagtccacacatggtatgcctgtcccgccttaatcaaatccatttgggctatggcaatcagccagcaccagttttaccttgatcgcaagcagtccaagtctaagattcatgcagcacgctctttgagtgaaattgccattgatctcaccgagactggcacgctgaaaacctccaagcttgctaacatgggctccaaaggaaagatcattagtggatcatccggaagcctgctgtcttccgggagtcaggaatccgactcaagccagtcagcaaaaaaggacatgttggctgccctgaagagtaggcaagaagctttagaagaaacccttcgtcaacggctggaggaacttaagaaattgtgtctgagggaagctgaactaaccgggaaattgcccgtggagtacccattggatcctggagaggaacccccgatcgtacggcgccggatcggtactgcttttaagttggacgaacaaaagattttgcccaaaggggaagaggctgagctggaacggctcgagcgagagtttgcaatccagtctcagattacagaagccgcgcgacgccttgcatccgatccgaatgtgagcaagaagctgaagaagcagcggaagacttcttacctcaacgccctgaaaaaacttcaggagattgaaaacgccattaacgaaaacagaattaaatctgggaagaagccgacacagcgggcctcacttataattgatgatggcaacatcgccagcgaggactccagcctgtccgatgctctggtcttggaagacgaggatagccaagtaacaagtactatcagtcctttacatagccctcataaaggacttccaccacgcccccctagtcataatcgaccccccccaccacagagcctggagggtcttaggcagatgcactaccaccggaatgattacgacaagagccccatcaagccaaagatgtggtcagagtcctctctcgatgagccctatgaaaaggtcaaaaagcgctccagccactcacactcgtccagccacaagaggttcccctctaccgggagctgtgccgaggcgggcggaggaagcaacagtctgcagaacagcccaattagggggctgccacattggaactcgcagagctccatgccctctacgccggacctgcgggtgcgaagtccacactatgtccactcgacccgtagtgtggatataagccccacaaggctgcatagcttagcactccactttaggcataggtcatcttctttggagtcacagggcaagttattgggctcggagaatgacaccggatctcctgacttttatactcccagaacccggtcaagcaatggttccgacccgatggatgactgctccagttgcacctcacacagctctagcgaacattactatccggcgcagatgaacgctaattattcgacactggccgaggattccccttctaaggctcggcaaagacagcgacaaaggcagagggccgccggcgctctcggatcagcctccagcggcagcatgcctaaccttgcagccaggggcggtgctgggggggcaggcggggccggggggggcgtatatctgcactcacagtctcagcccagcagccagtaccgcatcaaagaataccctctttatattgagggaggagcaactccagtcgtggtgaggtctttagagagcgatcaggaaggccactacagtgtgaaagcgcagttcaaaacatcaaacagttacaccgccggcggtttattcaaggaatcatggcggggcggcggcggcgatgagggtgataccggaaggctaactccttcacgctcccagatccttcgtacaccatcactcggccgcgaaggagcccacgataaaggcgccgggcgcgccgcagtgtccgatgaacttcggcagtggtaccagcgaagtacagcatctcacaaggagcactcccgcctctcccacacatcctctacctcaagcgactctggcagccagtattcaacaagcagtcagtctacatttgtagcacatagccgcgtgaccagaatgccccagatgtgtaaggctacttctgccgcgctgccacagtcacaacgttccagcacccctagttctgagatcggtgccaccccccccagcagcccacaccatatactgacctggcagacaggcgaggctacagaaaactcacccatcttggacggatccgaatcgcccccacaccagagcaccgatgaatag

SEQ ID NO: 24620 - DNA, 390 bp, synthetic construct
  source 1..390: mol_type = other DNA; note = Synthetic coding sequence
atgtaccggcagcggttcctgtacagcctgtaccggcacacccactgggtgcggtgtgccaagttttcccccgacggtaggctgattgtgtcgtgcagcgaggacaaaacgatcaaaatatgggatactacgaataaacagtgcgtgaataacttctctgactcagttggagacttgtctctcctgtttcattttcaaaaagtggaatcttatctgcaccaggaggttcagacgcataggagctactacgggggcttgacactcatgaactgcattgtgaaggttcttccaaaggaaatcagcaaggattatatcctcatccaccatcatatctttctgatctctactcaggagcatcacattcccatgcgaaagaagcttagactctag

SEQ ID NO: 24621 - DNA, 2178 bp, synthetic construct
  source 1..2178: mol_type = other DNA; note = Synthetic coding sequence
atgcaccccgagcccagcgagcccgccaccggcggcgccgccgagctcgactgcgctcaggaaccaggagtggaggagtcagccggagatcacggtagcgccggccgaggaggttgcaaggaggaaattaacgaccccaaagagatctgcgtcggaagttcagatacttcatatcattcccaacagaaacaaagcggggacaacggcagtggcggccactttgcccaccccagggaggaccgcgaagaccggggccctcgtatgaccaaaagctctctacagaagctgtgcaagcagcacaagctgtatataacccctgccctcaacgacactctgtatctgcatttcaaaggttttgaccgaattgagaatctggaggagtacacaggattgaggtgcctgtggcttcagtcgaacgggattcagaagatcgagaatctagaggcacagactgagctgcgctgcctgtttctccaaatgaacttgcttcggaagattgagaatctcgagccgctgcagaagctcgatgccctgaacctgtcgaacaactacatcaagacaatcgagaacctgtcatgcctcccagtcctcaatacacttcagatggctcacaaccacctggaaactgtcgaggatatccaacatttgcaagaatgtctcaggctgtgcgtactggacctgtcacacaataaactgtccgatccagaaatcctgagcatactggagtcgatgcccgatctgcgcgtcttaaatctaatgggtaatcccgtaatcagacagataccaaattaccggcgcactgtaactgtcagactgaagcacctgacttatttagatgatcggccagtatttccgaaggatcgggcctgcgccgaggcttgggctcgcggtgggtatgccgccgagaaagaagaaaggcagcagtgggagtctcgcgagagaaagaagatcactgatagcatcgaagcactcgctatgatcaagcagcgggccgaggagcggaagcgccaaagggagagtcaagaaaggggggagatgaccagcagcgatgacggggaaaacgtgcccgcctctgcagaagggaaagaggagcctccaggagaccgggaaacacggcaaaagatggaactgttcgtgaaggagtcctttgaagcgaaagatgagctctgccccgagaagcccagcggggaagaacctccagtggaagcaaaacgcgaggacggcggaccagagcccgagggaactttaccggccgagaccctactgcttagtagtccagttgaagtaaagggcgaagatggtgatggagagccagaagggaccctgcctgccgaggcaccacccccgccacccccagtggaggttaaaggcgaggatggggatcaggaacccgaaggcacgcttcccgctgaaactttgctgttgtcaccacctgtgaaagttaaaggcgaagatggcgacagagaacccgaggggactttgccggcagaagcaccaccaccaccccccttgggcgccgctcgcgaggagcccactccccaggcagttgcaacagaaggagtttttgtgactgaacttgacgggacacggactgaagatctcgaaaccatcaggctggaaaccaaggaaactttctgtatcgacgatctgcctgacttggaggacgatgatgagacaggaaagagcctcgaagaccagaacatgtgctttccgaagatcgaagtcatctcttccctgtcagatgactcagaccccgaactggattacacatcccttcctgtcctggagaacctacctacagatacactcagtaacatcttcgccgtgtccaaagacaccagcaaagcagcccgggtcccattcacggacatctttaaaaaagaagccaaacgggacctggagatccgcaaacaggatactaaaagcccgcggcccttaatccaggagctctcagatgaggatcctagtggacagctcctgatgcctcctacctgccagagggacgctgcaccattaactagtagcggtgaccgtgactcagattttcttgcggctagctccccggtgccaaccgaaagcgccgccacccctccagaaacctgtgtcggagtggcacaaccctcccaggctttgcccacgtgggacctgacggcttttcctgccccaaaggccagttag

SEQ ID NO: 24622 - DNA, 957 bp, synthetic construct
  source 1..957: mol_type = other DNA; note = Synthetic coding sequence
tgaggcatcaacggcagcgagggcgacggcgccgagatcgccgagaaatttgtgttctttattggaagtaaaaacggcggtaagacaactataatccttaggtgcctggacagggacgaacctccaaaacctaccctggcacttgaatacacatatggccggagagcaaaaggacacaacacacccaaagacatcgcccacttttgggagctgggcgggggaacttcactcctggatctgatttctatccctattacgggtgatactctgagaacattcagcctggtcctggtgttagatctgtcaaagcctaacgacctatggcccactatggaaaatctgctgcaggctacaaagtcacacgttgacaaggtaatcatgaagcttggcaagacgaatgctaaagccgtgtccgagatgcgccagaaaatttggaacaatatgcccaaagatcatcccgatcacgaacttatagaccctttcccagtgcccctggtcatcattggttcaaagtacgacgtgtttcaggatttcgaatcagaaaagcgtaaggtaatttgcaaaaccctgcggttcgtcgctcactattacggcgcgagtcttatgtttacctcaaaaagcgaagctcttctgttaaagatacggggggtcattaatcaactcgctttcggcatcgataaaagtaaaagcatttgcgtcgaccagaacaagcctctgtttataactgctgggttagacagcttcggccaaatcgggtcgccgcccgtcccagagaacgacatcgggaagctgcatgcacatagccctatggagctgtggaagaaggtctacgaaaagctttttcctcccaaatctattaatactctcaaagatattaaggacccagcaagggacccacaatacgctgaaaatgaggtggatgaaatgcgcattcagaaggatctggtgttatcctag

SEQ ID NO: 24623 - DNA, 2559 bp, synthetic construct
  source 1..2559: mol_type = other DNA; note = Synthetic coding sequence
atggaggccctgggccccggcggcgaccgggccagccccgccagctctacctcatcgctggacctctggcacctgtcaatgcgggctgactcagcctattcctctttctccgcggcaagcggaggtcctgagccgaggacccaaagccccggaaccgacttactgccatatttggattgggattatgtgagagtcgtgtgggggggcccggggcccgcacccccagatgcagcgctttgcacttccccgcgcccaagacccgcagtagctgcaagaagcggccctcagcccactgaggtgcccggaaccccaggccccctgaaccgccaggctaccccactcctctacgccctggctgcagaggctgaggctgctgcccaggcagcggagccaccatccccccccgcttctagggctgcttaccggcagagactgcagggagctcagaggagagtcttgcgcgagacatcgttccaacgtaaagaacttcgtatgagtctgccagcccgcctgcgacccactgtgccggccaggccccctgccacccatcctagatcagcttcccttagccatccaggcggcgagggggagccagctcgctctagggcaccagctcccggcacggccggccggggacccttggccaaccagcagagaaaatggtgtttcagcgaacctggcaagctggaccgagttggccgtggcgggggacctgctcgggagtgcttgggggaggcctgcagtagcagcggactgccaggcccagagccattggagtttcagcacccagcactcgccaagttcgaagaccacgaggtgggatggcttcctgaaacacagccccagggctccatgaacctggattccgggagtctgaagctgggcgacgctttccggccggcgagccgctccaggtcggcttctggcgaggtgttagggtcctgggggggttcgggcggaactattcccattgtgcaggcagtcccacaaggggcagaaactcctcgacctttatttcagacaaaactgtcccgcttcctcccccagaaggaggctgctgtgatgtatccagccgagctgcctcagtcttcaccagcggacagtgaacaacgggttagcgaaacatgcatcgtgcctgcatggctgccaagccttccggatgaggtgtttctcgaggaggctcctctcgtgagaatgaggagtcccccggatcctcatgctagccagggacctccagcaagcgtccatgcttccgatcagccctatgggactgggctgggccagaggactggtcaggtcacagtccccactgagtaccctttgcacgaatgccccggaaccgccggcgccgacgattgctggcaaggggtgaacggctctgtgggaatatcacggcccacctcccacacaccgactggcactgccaatgacaatattccgaccatcgaccctacaggactgacaaccaatccaccaacggcagcagagtcagatctgctcaagccagtgcccgccgatgctcttgggctttccggcaacgatactcccggtccaagccacaataccgccctagcccgggggacgggacaaccagggtccagacccacatggcccagccagtgcctggaagaactcgtgcaggagctggcgcgacttgatcctagcttgtgtgatcccctggccagtcagcccagccctgaaccacctctggggttactggatggacttattccactggcggaagtgagggcagccatgaggcccgcgtgtggcgaggccggcgaggaggccgctagcactttcgaaccagggtcatatcagttttctttcacgcagctcctccccgccccaagggaagagactaggttagagaacccagcaacacaccccgttttggatcagccatgcggccagggactgcctgcacccaataatagcatacagggcaagaaggtcgagctcgccgccagactccaaaagatgcttcaggatcttcataccgaacaggagcgcctgcagggcgaggcccaggcatgggcccggagacaggccgcactggaagctgctgttagacaggcttgcgctccgcaggaactggagcgtttctcgagatttatggctgaccttgagcgggtactcggcctcttgctcctgttggggtcacgacttgctcgggtccgaagagcccttgccagagctgcgtccgattccgaccccgatgaacaagcaagtctcttgcaacgcctgaggctgctgcagaggcaggaagaagacgcaaaggaactcaaggaacatgttgcccggcgagagcgtgcagtccgggaggtgctggttagagcccttccagtagaagagcttagagtgtattgcgccttgctggccggcaaggctgctgtgcttgcacaacagcgaaatctggacgagagaatcagactgctgcaggatcagctggacgccattcgcgatgaccttggacaccacgcgccatcccccagccctgccaggccccccggcacatgtcctccagttcagccgccattcccccttctcctcacatag

SEQ ID NO: 24624 - DNA, 1776 bp, synthetic construct
  source 1..1776: mol_type = other DNA; note = Synthetic coding sequence
atggcccagggcagcgtgagcttcaacgacgtgaccgtggacttcactcaggaagagtggcagcatttggatcatgcccaaaagactctgtacatggacgttatgctggaaaattattgccacctcattagtgtggggtgtcacatgacaaaaccggacgttattctcaaacttgagagaggcgaggagccatggacttcgtttgctggacacacgtgtctggaagaaaattggaaggccgaggactttctggtgaaatttaaagaacatcaagaaaagtactcccgcagcgtggtctccattaatcataaaaaattggtcaaagaaaaatccaagatatacgaaaagacctttacccttggaaaaaaccccgttaattcgaagaacctaccacccgagtatgatacacatggccgcatattaaaaaatgtatctgagctgattatctcaaacttaaatcctgctcgaaagaggctgagcgaatacaacggttatggcaaatctctactgtctaccaagcaagagacaacccatccagaagtcaaatcccacaaccaaagtgcccgggcattctcacataatgaagtgctaatgcagtatcaaaaaacggaaactccggcccaatccttcggttacaacgattgtgaaaaatcctttctgcagagaggcggccttattacacattcacgcccatataaaggggaaaatccttctgtgtacaataagaaaaggcgcgccactaacatagagaagaagcatacgtgcaatgagtgtgggaagtcattctgccgtaaatccgtcttgatcctccatcagggaatccactcagaggagaaaccctatcagtgccaccagtgcggaaacgcgtttcgcaggaagagctacctgatcgatcaccagcgaactcatacaggcgaaaagccctatgagtgtaatgattgcggcaagtccttccgccagaagaccactctgtctttacaccagagaatccatactggcgagaagccgtacatctgcaaagagtgcggtaagtctttccatcagaaggccaaccttaccgtgcatcaaaggacccacacaggagagaaaccctatatctgcaatgagtgtggtaaatcattctcacaaaaaacaactttggcacttcatgaaaaaacacataacgaggaaaagccctacatttgcagcgaatgcggcaagtctttcagacagaagacaactctggtggctcaccaacggacccacacgggcgagaaatcctatgaatgtccgcactgtgggaaagccttccggatgaaaagctacttgatcgaccaccataggacacacacaggggaaaagccttacgagtgcaatgagtgtggaaaatcgttcagccagaaaacaaatcttaatctccaccaacgcattcacaccggcgaaaagccctacgtttgcaatgagtgcgggaagtcattcagacaaaaggccaccttgacagttcaccagaaaatccacaccggccaaaagtcttatgagtgtccacagtgtggtaaggcattctcgaggaaatcctacctcattcaccaccagagaacgcataccggagaaaaaccttacaaatgttctgagtgcggaaagtgtttccgtcaaaagaccaacctgattgtacaccagcggactcatactggcgagaagccttatgtttgtaacgagtgtggaaaaagtttcagttacaagaggaaccttatcgtccaccagagaacccacaaaggcgagaatatcgaaatgcagtag

SEQ ID NO: 24625 - DNA, 2934 bp, synthetic construct
  source 1..2934: mol_type = other DNA; note = Synthetic coding sequence
atgggctggaagcccagcgaggcccggggccagagccagagcttccaggcctcaggactgcagcctcggtctctgaaggccgctagacgcgcaaccggaaggccagaccggtctcgcgccgcaagaccaactatggacccaagcgctcaccgatcgagggctgctccccccaatatggatcctgacccccaggccggcgtccaggttggtatgcgtgtggtacgcggcgttgactggaagtgggggcagcaagacgggggggaggggggggttgggactgtggtggagctgggtcgtcatggaagcccctctacaccagataggacagtcgttgtgcaatgggatcagggcactcgtactaattacagggccggctaccagggggctcacgatttgttattatacgacaatgcacagatcggcgtgaggcatccaaacatcatttgtgattgttgcaagaagcacggccttcggggtatgcggtggaaatgtagggtctgcctcgattatgacctgtgtacacagtgctatatgcacaataaacatgagctggcgcacgcgtttgaccgctacgaaaccgcccactccagaccagtgactctgagtcctagacagggcctccccaggatacccttgaggggtatctttcagggcgcgaaggtggtacgggggccagactgggagtggggatcccaggatggcggagaagggaaaccaggacgcgtcgtggacatcaggggatgggacgtggaaaccggcagatcagtggcgtctgtgacttgggcagacggaaccacgaatgtgtatcgggtgggccacaagggtaaggtggatttgaaatgtgttggggaagcggcgggaggtttctactataaagatcacctgccacgacttgggaagccggcggagttgcagagacgggtttctgcagacagtcagccctttcagcatggagataaggtcaagtgtctccttgatacggacgtcttacgcgaaatgcaggaaggtcatggaggctggaacccccgcatggccgaacatcatagtttctgggtaggtgacgtggttcgcgtgattggcgacctggataccgtgaagagactccaggctgggcacggcgagtggactgacgacatggccccagccctgggcagggtaggcaaggtggtcaaagtgttcggagacggcaacctcagggtggccgtggcgggccagagatggaccttctctcccagttgcctcgtagcctataggccagaagaagacgctaacctcgacgtggctgagcgcgcccgagaaaacaagagtagcctgtctgtggcattagacaaactgcgggcccagaaaagcgatcccgagcatcctgggaggcttgtggtcgaggtagccctcggcaacgcagcgcgtgccctggatcttctgaggcggaggcccgagcaagtggatactaaaaaccaggggcgtaccgccctgcaggttgccgcatacctcggacaagttgaactgataagactgttgctgcaggcgcgggccggagtggatttacccgatgatgagggtaacaccgcgctccactatgcagccctgggcaaccaacccgaggcaacgagggttctgttatctgccggatgcagagctgacgccataaattcaacccagagcactgctctccatgtggccgtccagcggggctttctggaggtcgtgcgggctctgtgtgaacgcggttgtgacgtcaacctgcccgacgctcattctgatactcctcttcattcagctatttctgccggcaccggcgcaagcggcatcgtcgaagtcctcactgaagttcctaatatcgacgtgacagcgaccaactctcaaggatttaccctgcttcaccacgcaagtctcaagggccacgcccttgccgtgagaaaaatactcgccagggccaggcagctggtcgatgcaaagaaggaagatggtttcaccgcgctgcacctggcagctcttaataatcacagagaggtggcccaaatacttatcagggagggcaggtgcgacgtgaacgtgcgaaacaggaagctccagagccccctccaccttgcggttcaacaggcacatgtgggactggtgccattgctggtagatgccggttgttcagtgaacgccgaggatgaagaaggagataccgccctgcacgttgcccttcagcgtcaccagctgctgcccctagtggccgatggggctgggggcgatccagggcctctgcagctgctgtctcgtctccaggcgtctggcctccctggaagtgccgagctaaccgtcggcgccgccgtagcttgtttcctcgccttagaaggcgccgacgtcagctacacaaatcacaggggccgatcccctttggatctggctgcagagggcagggtcctcaaggctctccaggggtgcgcccaaagatttcgagaaagacaagccggagggggcgctgcgccaggcccacgccagactttggggaccccaaacaccgtcacaaacctgcatgtaggcgccgcgcccggcccagaggctgccgaatgcctagtttgctcagagcttgccctgctcgttttattctctccatgccaacatagaaccgtttgcgaggaatgcgccaggcgtatgaagaagtgtatcaggtgccaagttgttgtcagcaaaaaattgaggccagacggatccgaggttgcctcagctgcccccgctcctggtccccccaggcagttagtagaggagttgcaatcccggtataggcagatggaggagcgcattacctgcccaatctgcatcgatagccatattagactggtgttccaatgtggacatggagcctgcgccccttgtggatctgccttgagcgcttgtccaatatgccggcagcctattagggacagaatccagatattcgtgtag

SEQ ID NO: 24626 - DNA, 2262 bp, synthetic construct
  source 1..2262: mol_type = other DNA; note = Synthetic coding sequence
atggaccccgacccccaggccggcgtgcaggtgggcatgcgggtggtccgtggcgtcgattggaagtggggccaacaggatggcggcgagggtggggtcggcacagttgttgagctggggagacatgggagcccaagcacgcctgatcgcactgtagtcgtgcagtgggaccagggcacacgcaccaattaccgcgccggctaccaaggcgcgcatgacctccttctctatgataacgctcagataggggtgcgccaccctaacatcatatgcgattgttgcaagaaacatgggcttcgcggcatgcgctggaaatgtagagtttgtctggactacgacttgtgtacacagtgttatatgcacaataaacatgaactggctcatgctttcgacaggtatgaaaccgcacattctcgccccgttacgttgtccccacgccaggggctcccaagaattcctcttaggggcattttccaaggagccaaggtggtgcgggggcccgactgggagtggggatcgcaagacggcaagcccgcggagctgcaaaggagggtgagcgctgacagtcaaccttttcagcacggtgataaagtcaagtgtctgctcgacacagacgtattacgggagatgcaggagggccacgggggctggaacccgcggatggcggaattcattgggcaaacaggcacagtgcacaggatcacggatagaggcgatgttcgggtgcagtttaaccacgagactcgctggacatttcacccgggcgctctgactaaacatcactccttttgggtcggcgacgtagtgagagttatcggcgacctcgatacagtaaagcgtcttcaggctggacacggtgaatggacggacgatatggcaccggctctaggccgcgtaggaaaggtggttaaagtgttcggggacggaaatcttcgtgtagctgtagccgggcagagatggacctttagcccttcttgcctggtggcttacagacctgaggaggatgccaatctcgacgtggctgagcgagccagggagaataagagctccctgtccgtcgctttagacaagctgagggctcagaagtcggatcccgagcatcctggcaggctggttgtcgaggtggctctaggcaacgccgctcgcgccttggacctgctccgacgccgaccagagcaggtggacacaaaaaatcagggacggacagccttacaggtcgccgcgtacctgggacaggtcgaacttattcgactcttgttgcaagctagggcaggagttgacctccctgatgacgaagggaacaccgctctacattatgccgcgcttggcaaccaaccagaagcgactagggtgctgctgtccgcggggtgccgggccgatgccataaattccacccagagcacggcactgcacgtggctgtgcagagaggcttcctcgaagtcgttcgggccctctgtgagcggggctgcgacgtgaacttgccggacgctcacagtgatacacctctgcatagcgctatatccgcaggcacgggagcctctggtattgtcgaggttctgactgaggttcccaacattgatgtaaccgcaactaacagccaaggtttcaccctactgcaccacgcctctcttaagggacacgcactcgctgttcgcaaaatcctggcccgcgccagacagctcgtggacgccaagaaagaggatggctttaccgccttgcacttggccgcgctgaataaccatagggaagtcgctcagattctcatcagggaggggagatgtgatgttaacgtgcgaaatagaaaattgcagagccctctgcatctagctgtgcaacaggctcacgtcggtcttgtgcccctactggttgacgccggttgctccgttaacgcagaagacgaggaaggagacacagccctgcacgttgctctccaacggcaccagctgttaccactggtggccgatggcgccggtggcgaccctggcccccttcagttactctcgcggctgcaggcttctgggctgccaggctcggccgagctgacagtgggcgccgcggttgcttgcttcctggctctggagggagcagatgtgtcctatacgaatcacagagggcgttccccattagatctggcagccgaggggcgggtcctcaaagccctccaaggctgtgcccagaggtttagggtgagggcgcaggacgaggaagtgcaccaggtgcctggggggcgacagcaagaaacagcccctaggcggctgtag

SEQ ID NO: 24627 - DNA, 1161 bp, synthetic construct
  source 1..1161: mol_type = other DNA; note = Synthetic coding sequence
atgggcaaggactactacaagatcctgggcatccccagcggcgccaatgaggacgagattaagaaagcttaccgaaagatggcactaaagtaccaccccgataagaataaggagcccaatgccgaggaaaagttcaaggagattgctgaagcgtacgacgtactctccgatccaaaaaaacgggggctttacgatcagtacggcgaagagggccttaagaccggcggcggaacatccggcggcagttccggttccttccactacacctttcacggagatccacatgcaacattcgcttccttcttcgggggaagcaatcctttcgatatcttctttgcctcgtctaggtctacaagacctttctccggtttcgacccggatgacatggatgtggatgaagacgaagaccccttcggtgcatttgggagattcggctttaacgggcttagcagagggcccaggagggcccccgaaccattgtatccacgtcgaaaggttcaggacccccccgttgtgcacgaactgcgggtaagccttgaggagatctatcacggcagcactaagagaatgaagataacgaggaggcggctgaaccctgatggtcgcacggtcagaaccgaggacaaaatcctgcacattgttattaagcgggggtggaaagaaggaaccaaaatcacctttcctaaggaaggggacgcgactcctgataacattccagccgatatcgtgtttgttctcaaagacaaaccgcacgctcactttcggagagatggaaccaacgtgctctattccgctctaattagtctgaaagaggctctctgcggctgcactgttaatattccaaccatagacggccgtgttattccactcccctgcaacgatgtgatcaagcctgggacggtcaagcgcctgcggggagaggggcttccctttcctaaggtgcctactcaacgcggagatctgatcgttgaatttaaggtgcggtttcctgataggttgacaccacaaacacggcagatcctaaaacaacagtatccacaacacagtcttcactccatgtgtacccagctcgacgtacattggactctggccaccttcagcaagatgcagaaaaaggcgaccgggttccaagaaaacgtacctgttcctgacccattctag

SEQ ID NO: 24628 - DNA, 1008 bp, synthetic construct
  source 1..1008: mol_type = other DNA; note = Synthetic coding sequence
atgctgggcagcggcttcaaggccgagcggctgcgggtgaacctgcggctggttatcaacagacttaagctgctcgaaaaaaagaaaactgagctggcccaaaaggcccgcaaggaaatcgctgattatctggccgccggcaaagacgaaagagcccggataagagtggagcatattattagagaagactacctggtggaagctatggaaatcttggaactgtactgtgatctcctgctggctcgttttggcctaattcagtcaatgaaagaacttgactcaggcttagccgagtctgttagcacactgatttgggctgcaccaagactgcagtctgaagtggctgagctcaagattgtggctgaccagctgtgcgcgaaatactcgaaggagtacggaaagctgtgcagaacaaatcagattggcaccgttaatgaccgcctgatgcataagttgtcagtggaggctcccccaaagatccttgttgagcgatacctcatagagattgctaagaattacaacgttccctacgaaccagatagtgtggtgatggcggaagcaccacccggagtggagactgatctgatcgacgttggcttcacagacgatgttaagaaaggtggaccaggacgaggcggatcgggcgggttcactgcccctgtgggaggtcctgatggtactgtgcctatgcccatgcccatgcccatgcccatgcccagtgccaatacaccattctcgtatcctctgccaaaaggaccggtggatgacatcaacgcagataagaacatcagctccgcgcagatcgtcggtccaggacctaagcccgaagcctctgccaagctccccagcagacctgcggacaattacgataactttgtcttgcccgagctcccctccgttccggatacactaccaactgcctccgctggagcatccacaagtgcctcagaagatattgattttgatgatctctccaggaggtttgaagagctgaaaaagaaaacatag

SEQ ID NO: 24629 - DNA, 1101 bp, synthetic construct
  source 1..1101: mol_type = other DNA; note = Synthetic coding sequence
atgctgggcagcggcttcaaggccgagcggctgcgggtgaacctgagactcgtgatcaatcgactgaaattactagagaagaaaaagactgagttggctcaaaaagcccgcaaggaaattgccgactaccttgctgccggcaaggacgagcgggcacgcatacgggtggaacacatcatcagggaagactacctcgttgaggcaatggagattctagagctatactgcgatttgctgttggctcgttttgggctgatccaatccatgaaggaactcgattccggcctcgcagaatctgtgagtaccctaatttgggccgcaccaaggctccagtccgaggtagccgagctgaagattgtagctgaccagctatgtgcgaagtactctaaggaatacggtaaactctgtcggaccaatcagatcggaacggttaatgaccgcttgatgcataagctctcggtcgaggccccaccgaagatcctcgttgagcggtacttaattgaaatagcgaagaactataacgttccatacgagccggatagtgtcgtgatggccgaggccccaccaggggtggaaaccgacctgattgatgtgggctttaccgatgacgtgaagaaaggcgggcccgggcggggcggatctggaggattcaccgcgcccgtaggagggcccgacgggactgtgcctatgccaatgcctatgcctatgccaatgccctcagctaacacccctttctcctacccgctcccaaaggggccatcagactttaacggactgcccatggggacttatcaggctttccctaatatacaccccccacaaatccctgctactcctccctcatacgagtcggtggatgacattaatgctgataagaacatctcctccgcccagatcgtgggtcctggtcccaaacccgaggccagcgctaaattgccatcccggcccgcagacaattacgacaacttcgttctacccgaattgcctagtgtgccggacacccttccgacggcctccgcgggggcctccacttccgcatcagaggatatcgactttgatgacctaagtcgtcggtttgaagaactgaaaaaaaagacgtag

SEQ ID NO: 24630 - DNA, 948 bp, synthetic construct
  source 1..948: mol_type = other DNA; note = Synthetic coding sequence
atggagaagtacgagaagctggccaagaccggcgagggcagctacggcgtggtgttcaagtgtagaaataaaacgagcggtcaggtcgtggcggttaagaaatttgtggagtccgaggatgatcccgtcgtgaaaaagatagccctgagagaaattagaatgctgaagcagttaaagcaccccaacttggtgaacctcatcgaggtttttagaaggaagagaaaaatgcaccttgtgttcgagtactgtgatcatactttattgaatgagctggagaggaatcccaacggggtggcggatggggtcattaagtctgtactctggcagaccctgcaggcattaaatttttgtcacatccacaattgcatccaccgggatattaaacctgagaacattttaatcaccaaacagggtattattaaaatctgtgacttcggtttcgctcaaattctgatacccggcgatgcttatactgactatgtggccactagatggtaccgggcccccgagctgttagtgggcgacacgcaatacggcagctctgttgatatttgggcgatcgggtgcgtgttcgctgaactgcttacagggcagcccctatggcccgggaagagcgatgtggatcagctttatctgatcattagaacccttgggaagctgatcccacgccatcagtctatttttaaaagcaacggctttttccatggtatctctatcccagaacccgaggatatggaaactctggaggagaaatttagcgacgtgcatccggttgcgctgaactttatgaaagggtgtcttaaaatgaaccctgacgatcgcctaacgtgttcccaacttctggaatcttcatactttgacagcttccaggaggcacagatcaaaaggaaggctaggaatgagggaaggaataggcgacgccagcaagtgctgcctctaaaatcttag

SEQ ID NO: 24631 - DNA, 948 bp, synthetic construct
  source 1..948: mol_type = other DNA; note = Synthetic coding sequence
atggccaacgaccccctggagggcttccacgaggtgaacctggcctctccaacctcccctgacctgcttggagtttatgagtcaggaacacaggagcagaccacaagtcctagcgtgatttataggccccacccttctgccctctcatccgtgcctattcaggccaatgctttagacgtctcagaacttccaacacagcctgtttactcttcccctaggcggttgaattgtgcagagatctcttcaatttctttccacgtaaccgaccctgccccctgctcaacctcgggtgtcactgctggccttacgaaactcacaacaaggaaggacaactacaatgcggagcgggagttcttacaaggcgccaccatcactgaggcctgcgatggatccgacgacatattcgggctctctacagattctttgagccggttgcgttcaccttcggtgctggaggtgcgggagaagggctacgaacgactaaaggaggaattggctaaagctcagcgagagctcaaactaaaggatgaggagtgcgagagactatctaaggttagagatcagcttgggcaggaactcgaggagctgacggccagtctgttcgaggaagcccataagatggtaagggaggccaacattaagcaggcaactgcggagaaacagttgaaggaggcccaggggaaaattgatgtgttgcaggccgaagtggcagctctgaagacactggtgcttagcagcagccctacctctcctactcaggaaccattgccaggcgggaaaactccctttaaaaagggccataccaggaacaagtctacctcctcagctatgagcgggtcacatcaggatttgtctgttattcaacccatcgtcaaggattgcaaggaggtgacacatcaggggctgagccccctcacgttactgatacttgtcagttcacatcattag

SEQ ID NO: 24632 - DNA, 1074 bp, synthetic construct
  source 1..1074: mol_type = other DNA; note = Synthetic coding sequence
atggcccgggagaacggcgagagcagcagcagctggaagaagcaggcagaagacatcaaaaaaattttcgagttcaaggaaacattgggaaccggcgccttcagtgaggtcgttctcgccgaagaaaaagctactggcaagctgtttgccgtgaaatgtatccccaagaaagctctgaaaggaaaggaatcctcaatcgaaaatgaaattgcagtgttgagaaagattaagcacgagaacattgtggcccttgaggatatctatgaaagccctaaccatttatatctagttatgcagctggtgtccgggggcgagctttttgacagaatcgtcgaaaagggtttttataccgagaaagacgctagcaccctgatccgacaggttttggatgcagtttattacttgcacagaatgggcatcgttcaccgggacttaaaaccggaaaatctgctgtactactcgcaggacgaggagagtaaaattatgatatctgactttggcctctctaagatggagggcaagggagacgtcatgtccaccgcatgcggaactcctgggtatgtggccccagaagtcctggcccagaaaccctacagtaaagccgtggactgttggtcaataggagttatcgcttacatattgttgtgtggctaccccccgttctacgatgagaacgactctaagctgttcgagcagatcctcaaggcagagtacgaatttgacagcccctattgggacgatatatctgactctgcaaaagattttatccgtaacttgatggagaaagaccctaataaaaggtacacttgtgaacaggccgctcggcacccctggatcgctggagatactgcactgaacaagaacatccacgagagtgtgagcgcacagatcaggaagaacttcgccaaatctaagtggagacaggccttcaacgccaccgcagtggtgcgacacatgcggaagcttcatctaggatcatctctggattctagcaacgcctcagtcagttcaagtctctccctcgcgtcccagaaggactgtgcgtacgtagctaagccagaatccctgtcctag

SEQ ID NO: 24633 - DNA, 1158 bp, synthetic construct
  source 1..1158: mol_type = other DNA; note = Synthetic coding sequence
atggcccgggagaacggcgagagcagcagcagctggaagaagcaggccgaggatatcaaaaaaattttcgagttcaaggaaacccttggcaccggagccttcagtgaagtggtgctcgccgaagaaaaggcaactggaaagctgtttgctgtgaagtgcattccgaagaaggctctcaaaggcaaggagagttcaatcgagaatgaaatcgctgtgctcaggaaaatcaaacacgaaaacattgtggcgttggaagatatctatgagtcccctaatcacctgtacctagtcatgcagttggtgagtggaggagagctatttgataggattgtggagaagggtttctacaccgaaaaagacgcttccacactgattcggcaggtattagacgcagtctactatctgcacagaatgggaattgtacatagagatctaaagccagagaatttgctgtattattcccaagacgaagagtctaagatcatgatctcagactttggactcagtaagatggagggaaaaggcgatgtaatgagtactgcctgcgggacaccaggctacgtggcaccagaggtgttggcccagaagccatactccaaggccgtagactgctggtctattggtgttattgcctacattttgctctgcggctaccccccattttacgatgaaaacgactcaaaattgtttgagcagatcctcaaagccgagtatgagtttgactcaccctactgggatgatattagcgattctgccaaagactttatccggaatctgatggagaaggatcccaacaagaggtatacttgtgagcaagccgccagacacccatggatcgcaggcgacaccgccctgaataaaaatatacatgaatcagtttctgcacagatcaggaaaaacttcgcaaaatccaagtggcggcaagcatttaatgcaacagccgtcgttcgacacatgcgaaagctgcacctcgggagttcccttgattcaagcaatgcctctgtgagcagctctctgtcactagcaagccagaaggattgcttggcacctagcacgctctgtagttttatcagttcttcttccggcgtttctggcgtgggcgccgaaagacgacctaggccaaccaccgtgacagcagtgcatagcgggagcaagtag

SEQ ID NO: 24634 - DNA, 888 bp, synthetic construct
  source 1..888: mol_type = other DNA; note = Synthetic coding sequence
atgaagaaggagcacgtgctgcactgccagttcagcgcctggtacccatttttccggggtgtgactatcaagtcagtgatcctgcctctgccccagaacgtgaaagattacctgctcgacgatggaactcttgtagttagcggacgtgacgacccaccaacgcatagccagcctgactcggacgacgaggcggaagaaatccagtggagtgatgacgagaacaccgctacactgaccgccccagaatttcctgaattcgccaccaaggttcaggaggccatcaattcgctagggggaagcgtgttcccgaagctgaactggtccgctccaagggatgcctactggatagccatgaactcctcactaaagtgcaagacccttagcgacatcttcctgctttttaagagcagcgactttatcaccagggattttacccagccattcattcactgtactgatgatagccctgacccttgcatcgagtacgagttagtcttaaggaaatggtgcgaactcataccaggagcagaattccggtgctttgtgaaggaaaataagctgatcgtggtgttcgatatatatagggactcccgtggaaaggtttggctgatcgactttaatccttttggagaagtgactgactcactgctgtttacctgggaggaactaatcagcgaaaacaacctgaatggtgacttcagcgaggtggatgctcaggagcaggactcccccgcctttcgctgtacgaattctgaggtgacagtgcagccatctccatatctttcttaccggttgcctaaagatttcgtggacctatcaacaggggaggacgcccataagctcattgacttcttgaagttaaagcgcaaccaacaggaggatgactag

SEQ ID NO: 24635 - DNA, 3273 bp, synthetic construct
  source 1..3273: mol_type = other DNA; note = Synthetic coding sequence
atggagcagcccaagggcgtggactggaccgtgatcatcctgacctgtcagtacaaagattccgtgcaggtctttcagcgcgagctcgaggtccgccaaaaacgcgaacagattcctgctggaaccttactgcttgctgtggaggaccccgagaagcgcgttgggtcggggggtgcaacactgaacgcattactcgtggccgctgagcacctaagcgctcgagcaggattcacttggatttgcgtaggcgtgagtttatggattaggggctgccaccccccgggccgtctacctgaggcttccgtgcaccgagctttcccgctgctccaggtagtgacgtctgatgtcctacacagtgcgtggattctcatcctgcatatgggaagagacttcccgtttgacgactgtggccgtgcgttcacctgcttgccagtggaaaatccggaagctccagttgaagcactagtttgcaatttagactgtcttctggatatcatgacataccgacttggccccggctcacctccaggggtttgggtatgctctacggatatgctccttagcgtcccggcgaatccgggcatttcgtgggattccttcagaggagcgagggtaattgctttaccaggcagtcctgcttatgcccaaaatcacggcgtgtacctgactgacccccagggcctggtactggacatctattatcaaggtaccgaggcagaaatccaaaggtgtgtacgccccgacggtcgagtacccttagtctcaggtgtggtcttcttttcagtggagaccgccgagcgtctgttggcaacgcatgtttcccctccacttgacgcttgcacctacctggggcttgatagcggggcaaggcccgtgcagctgagtttgttcttcgacatacttcattgcatggccgagaatgtgacaagagaggactttctagtgggccgcccccctgaattagggcaaggcgatgcagatgttgctggttacctgcaaagcgcccgtgctcagttgtggcgggaacttagagatcaaccgctaacgatggcctatgtcagttcagggagctactcttacatgacatcgagtgcgtctgagtttttgttgtctctgacgctgccgggtgccccaggagctcagatagtacactctcaggtcgaagaacagcagctgctggccgctggctcttctgtggtgtcttgcctgttggagggtccagtccagctgggccctgggtctgttctgcagcactgccacttgcaaggccccattcatattggggctggttgccttgtcactggactggacacagcccacagcaaggccctccatggcagagaactgagggatctggtactccagggacatcatactcggctgcacggcagccccggtcatgcattcactctggtaggcaggctggactcttgggagcggcaaggcgcaggaacatatctaaatgtaccatggagcgagttctttaaacgcaccggcgttcgtgcctgggatctatgggacccggaaacattaccggccgaatattgcttaccgtctgctcggctgttcccagttctgcatcccagccgggaacttggtcctcaggatctactctggatgttggaccaccaagaggacgggggcgaagccctgcgggcttggagagccagctggcggctttcctgggagcagctgcagccatgcttagatcgggccgcgaccctggccagtcggcgagaccttttttttcgacaggccctgcacaaagccaggcatgtgctggaggcgcgtcaagatctctccctcagaccactgatttgggcggctgtgagggaagggtgtcccgggcctctgctcgcgaccctggatcaggtggcagccggtgcaggagaccccggggtggctgctagggcactggcctgtgtggcggacgtgttgggatgtatggcagagggacgaggaggcctgagaagcggaccagctgccaaccctgagtggatgcgtccgttctcctatctcgagtgcggcgacctggccgctggtgtggaagcattggctcaggagagggataagtggctgtcaagacccgcactgctggtgcgggccgctagacactatgagggagcaggtcagattttgatccgacaggctgttatgtcagctcagcattttgtgtcgacagagcaggtcgagctgcccgggcctgggcagtgggttgtcgctgagtgcccagctcgtgttgacttcagcggcggatggtctgacacacccccgctcgcttatgagttgggaggagcagttctcggactcgctgtgcgtgtggatgggcgacgacctataggggccagggcccgaaggatccctgagccggaattatggttagctgtgggccctcgacaggatgaaatgactgtcaagatagtttgccgctgcctggcagatctgcgcgactactgtcaaccccatgctccaggcgctcttttgaaggcagctttcatctgtgcgggaatcgttcatgtgcacagtgaactgcagttaagtaccagcagcatcctggccggcacagcactggccgctctgcagcgtgcagcgggaagagtcgtcggaacggaggctctcatacatgccgtcctccatctcgaacaggtgcttaccactgggggcggatggcaggatcaggtgggcgggcttatgcctggcatcaaggtagggcgtagccgtgcccagctccctttaaaggtagaggttgaggaggtaactgttccggaaggctttgtccagaagcttaacgaccatctgttactcgtgtataccggaaagactcgcctcgcaagaaatctgctgcaggacgtgttgagaagctggtacgctaggctcccggcagttgttcaaaacgctcatagcttggtgcggcagactgaagagtgtgccgaaggctttcggcagggctccctgccactgctgggtcagtgcttaacaagctattgggagcagaaaaagctgatggcacctggatgtgaaccgctcaccgttaggcgtatgatggacgtgcttgctccacatgtgcatggccagtccttggcgggagctggaggcggtgggttcctgtacctcctaactaaggaaccacaacagaaggaggcccttgaggccgtgctcgcgaaaacggaaggcctaggcaactacagcattcatctggttgaggtggacactcagggtctgtctctgaagctgctcggaacagaggcctctacatgttgcccatttccttag

SEQ ID NO: 24636 - DNA, 318 bp, synthetic construct
  source 1..318: mol_type = other DNA; note = Synthetic coding sequence
atgctggagctggcccaggaccggctgcagttcgagaccgtggaggtaagcgagccctctatgctgcagaagatcttgaccacccggcgccgggaaactggaggtaacgaacctctgccagtgccaacacttcagcaccaccttgcgcctcctgccgaagcccgtaaggtccccagtgctagccaggtccaggcaatcaagtgcttcctcagtaaatgctggtctttaaacattagtaccaaggaatatgcatatcttaaaggcactgtgttattcaatcccggcaaagggaaggagaacgattgtaaccatcattag

SEQ ID NO: 24637 - DNA, 1413 bp, synthetic construct
  source 1..1413: mol_type = other DNA; note = Synthetic coding sequence
atggccggcgagaaccaccagtggcagggcagcatcctgtacaacatgctgatgtcagccaagcagaccagagctgcaccagaggccccagagactcggctagtggaccagtgctggggatgtagttgcggcgacgagccaggagtgggcagggagggcttactgggcggcagaaatgttgccctgctgtatcggtgttgtttctgcgggaaagatcaccctagacagggtagtatactgtatagtatgcttacatcagccaagcagacatacgctgcacctaaagctcccgaagctaccttgggcccatgttggggctgttcatgtggaagcgaccccggtgtggggcgtgctggcctacccggggggcggcccgtggctctactgtatcgatgctgcttttgcggcgaggatcacccccgccaaggctccatcctttacagcctcttgacttctagcaagcagacccacgtagctccagcagcaccagaagcacgtccagggggcgcctggtgggataggtcttacttcgcccagcggcctggcggtaaggaggccctacccggtggacgcgccactgcccttctgtacagatgctgtttttgcggggaagatcaccctcagcagggctccactttgtactgtgtgcctacgtccaccaaccaagctcaggcggcaccagaagaaaggcctagagctccgtggtgggatacatccagcggcgccctaaggcctgtagctctgaagagcccacaggtggtgtgcgaggcggccagcgctggcctcctcaaaacacttcgcttcgtcaagtatcttccctgctttcaggttttgccactcgatcagcagttggttctcgtgcggaattgctgggcttctctgctgatgctggaacttgcccaggatagactacaattcgaaactgtagaggtgagtgagccgtccatgctccagaagatactcacaacccggcggagagaaacgggaggaaatgaaccacttccagtgcccaccttgcagcaccaccttgccccaccagcggaggcccgaaaggtcccatcagcatcccaggtccaagccattaaatgttttctttctaaatgctggtcactgaacatctccactaaagaatacgcatacctgaagggtactgttctgttcaatcccgatgtcccagggcttcagtgtgtcaagtacatacaggggctgcagtggggaactcagcagattctgagcgagcacaccaggatgactcaccagggaccacacgatcggtttatagaactgaactcaacactgtttctccttcgctttatcaacgctaacgtgattgctgagttgttctttcggccaattatcggaaccgtgtctatggatgatatgatgctggaaatgctttgtacaaaaatctag

SEQ ID NO: 24638 - DNA, 2028 bp, synthetic construct
  source 1..2028: mol_type = other DNA; note = Synthetic coding sequence
atgctgcgggccaccgccccctgctggttcccccccggctaccccgaggcgaagaaggtcgcagaagaagcagccctggaggcctccagacatttaggaggcgaacagtcccaagccggggcacctgaaggatccaaaatgctccgtgctaccgcgccttgttggttcagacccggttaccctgaagcaaagaaggttgcaaaggaagcagcacccgaagcatcccgacacctgggagccgaacagtctccagctggagcgcctgaaggttcaaagatgctgagggccactgctccatgctggttcccaccaggataccctgaggcgaagaaagtagccgaggaggcagccctggaggcaccagagttccccctccctagccatcagccggcccagagttttggcctctgggtgccccaaatgcataaacaggcctctgccttcgtagacattcaggctgagcctcagaatagaggccctgcagtgccccctgcctggccaaagatggtgaccgagtcctgttacttccctgcgcagcgaggaagtgcttgccgcttaccggctgcacctcgcctgactgagcgaccttctggggtacgaattagcgcccctcgtaagaggaagacaatcgctcactcctcaagcccatgtctcgtgacgggatatactgacgccaaaagaactcgggttgcatcatccagccagcgaagcagaggaagcaaagtaggaaggcagccggggaaaacaagaaaccggagtggcatggcgtgtaaaaccaccgctaccacaagctccaaacgtattgtcaggagagcatcattgccctcattatcgttgaagaaacccatcatccttagaagttcgggctgtcaggtgcccactgtgctgcggcggggctatctgcagcttttcaccgaagagtgtctgaagttttgtgcctccaagcaggaggctgaggaaaaagccctgaacgaagagaaggtggcatatgattgctctccaaacaagaaccggtacctcaacgtggtcctaaataccttgaaaagactgaaaggactcacaccatccagtatgccgggcctgagtagggccgccctctattcccgcctccaggaatttctgctcacacaggatcaacttaaggagaacgggtacccctttccgcatccagagaggcccggtggcgctgtactgttcaccgggcagggcaaagggcctggtgactcatcttgcagagtatgctgtcgatgcggcacagagtacctagtatcctcctctggcagatgcgtgcgggaccagctgtgttactaccactggggtcgcgtcagatcctctcaggtcgctggggggcgcgtgagccagtatacatgttgtgctgccgcacccgggtctgttggttgtcaagtggccaagcaacatgtaagagacggtagaaaagagagtctcgacggcttcgtggaaacattcaaaaaggaactttcgcgcgacgcataccctggtatttacgctctggattgcgaaatgtgctatactacccacgggctggagctcaccagagttacggtggtcgacgccgatatgagggtggtgtatgatacttttgtgaagcccgacaacgagatcgtggattataacaccagatttagtggggttacggaggctgatgttgccaaaacctctatcaccctaccccaagtccaagccatcttgctcagctttttctccgcccagacgattcttataggacacagtctggaatcagacctcctcgccctgaaactgatacatagtaccgtggtagacacagcagtgctgttcccccattacctgggatttccttacaagagatccctgcgaaatttagccgcggattacctcgcccaaattattcaggattctcaagatggtcacaattcttcggaagacgccagtgcatgcctgcagttggtgatgtggaaggtgagacagagggcacagatacagcctcgccatcgcagtgcctcacccgccgcgcttgcgtgcccctag

SEQ ID NO: 24639 - DNA, 711 bp, synthetic construct
  source 1..711: mol_type = other DNA; note = Synthetic coding sequence
atgcacaccacccagaaggacaccacctacaccaagatcttcgtggggggtctcccctaccacaccaccgacgccagtcttaggaagtatttcgaggtcttcggcgagattgaggaagccgttgtgattacagacagacaaacaggcaagagccgcggatatggattcgtcaccatggctgatagagcagccgctgaacgagcatgtaaggaccccaatcctattatagatggccggaaggctaatgtgaatctggcgtatttaggggctaagccccgtattatgcaacccggatttgcttttggcgtccagcagttgcacccggctctgattcaaaggccgttcggcattcccgcccactacgtgtacccacaagcgtttgttcagcctggcgtggtgataccccacgtacagcctactgccgcggcagcatctactacaccctatatcgattacacaggtgctgcttacgctcaatatagtgccgctgcagcagctgccgctgctgcagctgcatacgaccagtacccctatgccgcatcacccgctgctgccggatacgtgacggcaggaggctacggttacgcagtccagcagcctattaccgctgccgctcccgggaccgctgccgctgccgccgcagccgccgctgcagcagccgcctttggacagtatcaacctcagcagcttcaaacggacaggatgcagtag

SEQ ID NO: 24640 - DNA, 4389 bp, synthetic construct
  source 1..4389: mol_type = other DNA; note = Synthetic coding sequence
atggcccccgtgcacggcgacgacagcctgagcgacagcggcagcttcgtgtcaagtcgcgccagaagggaaaagaagtccaaaaaaggtaggcaagaggctctggagaggcttaagaaagccaaagctggcgaaaaatataaatatgaggtggaagactttactggtgtttacgaggaagtcgacgaggaacagtatagtaaacttgtgcaagccaggcaggatgatgattggatcgtggacgatgatgggattgggtacgtagaagacggcagagagatttttgacgatgacctagaggatgacgcactcgatgccgacgagaagggaaaagacggtaaggcaagaaataaggacaagcggaacgttaagaaacttgccgttacaaaacctaataatatcaagagcatgttcatcgcttgtgctgggaagaaaacggcggataaggccgttgatctgtccaaagatgggctcctgggcgatattctacaagacctcaacaccgagaccccccaaattactcctccgccagtgatgatactcaagaagaaaaggagcattggcgcctcacccaatcccttcagtgtgcacaccgctactgcagtgccctctgggaaaatcgcctccccagtaagcaggaaggaaccccctttaacgccggttccactcaagcgcgccgagttcgccggcgacgacgttcaagtggaatcgaccgaagaagagcaggaatcgggagccatggaattcgaggacggtgactttgacgaacccatggaagtcgaggaggtagacctggaaccgatggccgctaaagcctgggacaaagagtctgagcctgcagaagaagtgaagcaggaggcggattctggcaagggaactgtgagttatctcggctccttcctccccgatgtttcctgttgggatatcgatcaggagggcgactcctccttttcagtgcaggaagtacaggtcgattcgagccatctgcccctggtcaagggagctgacgaggaacaggtgtttcatttttactggctggatgcgtacgaggatcaatataatcagccaggagtcgttttcctcttcgggaaagtctggatagagtctgcagaaacacatgtgtcctgctgcgtcatggtcaaaaatatcgaacgcactctgtactttttaccgagggagatgaaaatcgacctgaacaccggaaaggagaccggcacccccatcagtatgaaggatgtctacgaagaattcgacgagaagatcgcaactaagtataaaatcatgaagttcaaaagcaagccagtggagaagaactacgccttcgaaatcccagatgtgcccgaaaagagcgaatatctagaagtgaaatacagcgcggaaatgccacaactgccacaggacctcaaaggcgagacttttagccatgtgttcgggacaaataccagctcgctcgaactgttcttgatgaatcggaaaatcaagggaccatgttggctggaggtgaaaagcccccagctactgaaccagcccgtgagctggtgtaaagtggaagccatggctctaaaaccagatctcgtgaacgtgataaaagacgtgtccccaccccctttggtagtgatggcattttctatgaaaacaatgcaaaatgctaagaaccaccagaatgagattattgccatggcagccctggtacatcacagctttgcgctagacaaagcagctcccaaaccaccctttcagagccatttttgtgtagttagtaaacccaaagattgtatctttccctatgcttttaaggaggtgatcgaaaagaagaacgtgaaagtcgaagtggccgccacggagcggacgctcctgggattcttcctcgccaaggtccacaagatcgatccagatatcatagtaggacataatatatacggctttgagctggaagtactgctccaacgcattaatgtgtgtaaagctcctcactggtcgaaaatcggtaggctaaaaagatctaacatgcctaaactcgggggcagatccggttttggcgaacgtaacgctacgtgtgggcgaatgatctgtgacgtcgaaattagcgctaaggagctcatccgatgcaaatcatatcaccttagcgagctcgtccagcagatcttaaaaacagaaagggttgtgattcctatggagaatattcagaacatgtattcagagtcttcccaactgctgtatctgctggagcacacttggaaggacgctaagttcatcctccagattatgtgcgagcttaacgtcctaccactggcactgcagattacaaatattgccggaaacatcatgagccggacacttatgggcggccgatccgagcggaatgaatttctcctgctgcacgccttttacgagaataattatattgtccctgacaagcaaattttccgtaagccccagcagaagctgggagacgaagacgaggaaatcgacggcgatacaaataaatataaaaaaggcagaaaaaaggctgcatatgcaggcggcttggtactggatcctaaagttggattctacgataaatttatcctcctgctcgacttcaacagcctatatccttccataatccaggagtttaatatctgcttcaccactgttcagcgggtggcatctgaggcacagaaggtgaccgaggatggtgaacaggagcagattcctgagctgcccgacccatcactcgaaatgggaatcctccctcgagagatcagaaaattggtggaacgcaggaaacaggttaagcagctgatgaagcagcaggatctgaaccccgacctgattctgcaatatgatataagacagaaggctctgaagttgaccgccaacagcatgtatggctgcctgggcttcagctattcgagattttatgcaaagcccctggcagcgctggttacatataagggacgggaaatactgatgcacactaaggaaatggtgcagaagatgaacttagaagtgatatatggagacactgactctatcatgatcaatacaaactccacaaatctggaagaagtattcaaattggggaacaaagtgaaaagtgaggtgaacaagctgtataaacttttagaaatcgacatcgacggcgttttcaaatctttacttttgcttaagaagaagaagtatgctgctctggtggttgaaccaactagcgatggaaattacgtaaccaaacaggaacttaagggtctcgatattgtcagacgggattggtgcgatttggcaaaagacactggcaattttgtcattggccagatactttcagaccaaagcagggacactattgtggaaaacattcaaaagaggttgatagagataggggaaaacgtgctcaatggttcagtgccagtgagccaatttgagattaataaagcactcacaaaggacccacaggactatcccgataaaaaaagcttgccccatgtccatgtcgcgctttggatcaatagccagggtgggcgaaaggtgaaagcgggtgacactgttagctacgttatttgtcaggacggctctaacctaactgcttcacaacgcgcttatgcccccgagcagctacaaaagcaggacaatctgaccattgatacacaatactacttagcccaacagatacaccccgtcgtcgctagaatctgtgagccgatcgatggaatcgacgccgtccttatcgcaacttggttgggcctggacccaacgcagttcagagtccatcactaccataaggacgaggaaaacgatgccctgctgggtggccccgcccagttgaccgatgaagagaagtacagagactgtgagcggttcaagtgtccttgtcccacttgcggtaccgagaatatttacgacaatgtattcgacggaagcggcacagacatggagccctctctgtatcgctgtagcaatatcgattgtaaggcctcgccactgaccttcaccgtgcagctgtcaaacaagctgatcatggacatcaggcggttcattaagaaatactatgatgggtggctcatatgtgaggaacccacgtgtcgcaacagaacacggcatctgccgctccagttcagtcgcactggccccctgtgcccagcctgtatgaaggctaccctccaacctgaatacagcgacaagtccctctatacccagctatgcttctacagatacatttttgacgccgagtgcgcactggaaaagctgaccaccgaccacgaaaaagataaactgaaaaaacagttcttcaccccaaaggtgctgcaggattaccggaaacttaagaacaccgcagaacagttcctcagccggagtgggtatagtgaggttaatttgtctaagctgtttgccgggtgcgccgtgaaaagttag

SEQ ID NO: 24641 - DNA, 2673 bp, synthetic construct
  source 1..2673: mol_type = other DNA; note = Synthetic coding sequence
atgagcgccaacaacagcccccccagcgcccagaagagcgtgctgcccacagcaattcccgctgtccttcccgccgcaagcccttgctcctcccctaagacaggcctgtccgcccgcctgtctaatggatccttcagtgcccctagcttgaccaattctcggggatccgtgcatactgtctcattcttactgcagatcggtttgacacgagaaagcgtgaccatcgaggctcaagaattatccctgagcgccgtgaaggacctggtctgcagcatagtataccagaagttcccagaatgcggcttctttggcatgtacgacaagatcctcctgtttaggcatgacatgaattctgagaatattctccagctcattacctccgctgacgaaatccacgaaggcgatcttgtggaggtcgtcctttctgctctcgcaacagtcgaagactttcaaatccggccgcatacactgtacgtacattcgtataaagctcctacattctgcgactattgcggggaaatgttatggggccttgtgcgacaggggctaaagtgtgagggatgtggactgaattaccacaaaaggtgcgccttcaagatcccgaacaattgcagcggggtgagaaagagacggttgagcaacgtgagtcttccaggccccgggttatccgtgccccggccattgcagccggaatacgtcgccctgcctagtgaagagagccacgttcaccaggaaccctccaaaaggatcccctcttggagcgggaggccaatttggatggagaagatggtgatgtgtcgggtgaaagtcccacatactttcgctgtgcattcatatactagaccaactatttgccagtattgtaagcgacttttgaagggactctttcggcaaggtatgcaatgcaaagactgtaagtttaattgtcacaaacggtgcgcctccaaggtgccgagggattgtctgggcgaagtgacctttaatggagagccctccagcttggggactgacactgatattccaatggatatcgacaataacgatatcaatagcgactcatcgcggggtttagatgataccgaggagccatcacctccggaagataagatgttttttctggacccatccgatctagatgttgaaagggatgaggaagccgttaagaccattagcccctctacatcgaacaatattcccctgatgcgcgtagtccaaagcatcaagcatacaaagaggaagtcttctactatggttaaagagggttggatggttcactacacgtcacgcgacaacttgcggaaacgtcattattggcgtctggatagcaaatgcctcacactgtttcagaatgaatccggctcaaaatattataaagaaattccgctttctgaaattctgaggattagtagccccagagatttcacaaacatttcgcaggggagtaatccccactgcttcgagatcatcaccgataccatggtttattttgttggcgagaataatggggacagcagccacaacccagtcttggctgccactggtgttggcctggacgtggcccaaagctgggaaaaagcaattagacaggctctcatgccagtcaccccacaggcctccgtctgcaccagtcccggtcagggaaaagaccacaaagatctgtcaaccagcatttccgtgagtaactgtcaaatccaggaaaatgtggatatcagcaccgtgtaccagatattcgctgacgaggtgctgggttccgggcagtttgggattgtgtacgggggaaagcataggaaaactggcagggacgtggcgattaaggtaattgataagatgcggttccccactaaacaggagtcacagctgagaaatgaggttgccatactgcagaacttacatcaccctgggatcgtcaaccttgaatgcatgttcgaaactccagaaagggtgtttgtggttatggagaaactgcacggggacatgctcgagatgatcctcagctcagaaaaaagtaggctgccagagcggattacgaaattcatggtcacacagattctggtcgcactgcgcaatctgcactttaaaaacatcgtccactgcgatttgaaaccagaaaatgttttgctcgcttctgccgagccgttcccccaagttaaactgtgtgattttggttttgcccgcataattggcgagaaatcctttagaagaagtgttgtcgggacacccgcctacctggcgccagaggttctacgctccaaaggatacaatcgtagtctcgatatgtggagtgtcggtgtaatcatctatgtcagtttgtccgggactttcccattcaacgaggatgaagatataaacgaccagatccaaaacgctgccttcatgtatccccccaacccctggcgcgagatctcaggtgaggcaatcgatctcataaacaacctgctccaggtcaagatgcggaaaagatacagtgtggacaaatctctctcgcacccctggctgcaggattatcagacgtggctggatcttcgggaatttgagaccagaattggcgaacggtatatcacgcacgagtcagatgacgctagatgggagattcacgcctacacccacaatcttgtttatcccaagcactttatcatggcacccaatccagatgacatggaagaagacccctag

SEQ ID NO: 24642 - DNA, 4407 bp, synthetic construct
  source 1..4407: mol_type = other DNA; note = Synthetic coding sequence
atggcccccgtgcacggcgacgactgcgagatcggcgccagcgccttgtctgatagcggatccttcgtgtcttccagggccagacgcgaaaagaaatccaaaaaaggacgccaggaggccttggagcgactcaagaaggccaaggcaggcgaaaaatataaatatgaagtggaggacttcacaggagtctatgaagaggtggacgaggaacagtactctaagcttgtgcaggcaagacaggacgacgattggattgtggacgatgatggcatcggttacgtcgaagacggtcgcgaaatttttgacgacgatctggaggatgatgcacttgacgctgacgagaaaggaaaagatggcaaggcccgaaacaaagacaagagaaatgtgaagaagttggcggtgacaaaaccaaataatattaagtcaatgtttattgcctgtgccggcaagaagacagccgataaggccgtagacttgtccaaagacgggcttctgggagatatactccaggatcttaacaccgagacacctcagatcaccccaccacctgtgatgattctgaaaaagaagagatcaatcggagcgtctcccaatccattctcagtacataccgcaacagccgtaccttcaggcaagattgcctcccctgttagcaggaaagagcctccactgaccccagttcctctcaaaagggccgaattcgccggagatgatgtgcaagtcgagtcaaccgaggaggagcaggagtcaggcgccatggagttcgaggacggcgatttcgatgagcccatggaggtagaagaggtcgatttagagccgatggctgctaaagcttgggacaaagagagcgagcccgcagaggaggtcaagcaggaggctgactctggcaagggaacagtgagttacctcggtagcttcctccctgatgtgagctgctgggacatcgatcaagagggtgacagtagctttagcgttcaggaggtacaagtcgactcttcacacttaccactggtcaagggagcagatgaggaacaggtgttccatttttattggttggacgcttacgaggatcaatacaatcagccgggggtcgtgttcctattcggcaaggtttggatcgaaagtgccgaaacccacgtgtcatgttgcgttatggtgaaaaacatcgagaggaccctttacttcttgcccagggaaatgaaaattgatctcaataccggtaaagagacgggaactccaatctcaatgaaagacgtgtatgaggaatttgatgaaaagatcgcaacaaagtacaagattatgaaattcaagtccaagcctgtagaaaaaaattacgccttcgagatccctgacgtgcccgaaaaatcagagtatctggaagtaaaatattccgcagaaatgccgcagttgcctcaggacttaaagggtgagacattttctcacgtttttggaactaatacgtcaagcctcgagctcttcctgatgaatcgcaaaatcaaaggcccgtgttggcttgaggtcaagagccctcaactcctgaaccagcctgtctcctggtgcaaggtggaggccatggctctcaaacccgatctggtgaatgttatcaaggatgtcagcccgccgccccttgtggtgatggctttctcgatgaagacaatgcaaaatgccaaaaatcaccagaacgagatcatcgctatggctgcacttgtacaccacagtttcgccctggataaagccgcgcccaaaccacctttccaaagtcatttctgcgttgtgagtaagccaaaagattgtatttttccgtacgcctttaaagaggttatcgaaaagaagaatgtgaaagtcgaggtagctgctaccgagcgaacactgctgggcttctttttggcgaaggtgcacaagattgatccggacattattgtgggtcacaatatttatggtttcgagttagaggtcctgctgcagagaataaacgtgtgcaaggcccctcactggtctaaaattggtcgcctaaaaagatcaaacatgcccaaactgggggggcggagcggctttggggagcgtaacgctacctgcggcaggatgatctgcgatgtagaaatcagcgcaaaggaactcattcggtgtaagtcttatcatctctcagagttggttcaacaaatcttgaaaaccgaacgcgtcgtgattccaatggagaatatccagaacatgtactccgagagttcacagctactgtatctgcttgagcacacctggaaagatgcaaagttcatcctgcaaatcatgtgcgagctgaatgtcctgcctctggcgctccaaatcaccaatatcgcaggtaacatcatgtctcggaccctgatgggcgggaggagtgagaggaatgaatttctcctgctgcacgccttctacgaaaataattatatcgtgccggacaagcagattttccggaaaccacaacaaaagcttggggatgaagatgaagaaatcgatggagatacaaacaaatacaaaaaagggcgtaaaaaagcggcttatgcaggagggctggtgctggatccaaaggtgggattctacgacaagttcattctgctgttggacttcaactcactgtatcctagcatcatacaggagtttaacatttgttttaccacggtccagcgcgtagccagtgaggcacagaaggtcactgaggatggggagcaggagcagatccccgagctccccgacccttccctggagatgggcatactcccccgcgagattaggaaactggtcgaaaggaggaaacaggtgaagcaactgatgaaacagcaggacctcaacccagacctaatccttcagtacgatattagacaaaaggccctgaagcttactgccaattcaatgtatggatgtttgggcttctcttactcaagattctatgctaagccactagccgctctcgtaacttacaaaggacgggaaatcctcatgcatacgaaggaaatggtacagaagatgaatcttgaggtaatttatggtgatacagattctatcatgattaatacaaatagcaccaatttggaggaggttttcaaactgggcaataaagtaaagtcagaggtgaataagttatataagctgctcgagattgatattgatggagtattcaagagcctgcttttactgaaaaaaaaaaaatacgcagccctcgttgttgaacctacctccgatggcaactatgtgaccaaacaggaactcaagggacttgatatcgtacggcgggattggtgcgatctggcgaaggataccggcaacttcgtgattgggcagattttgtctgaccaatcacgggataccattgtggaaaatatccaaaaaaggttgatcgaaattggcgaaaatgtgctcaacgggtcggtgccagtgagtcagttcgagataaataaggcattgacaaaggaccctcaggactaccctgacaaaaaatctttaccacatgttcatgtggcactgtggattaactcccaaggaggaagaaaggtgaaagcaggtgatacggtaagttatgtgatctgccaggacggatccaatctgacagcaagtcagcgggcatacgcacctgagcaactgcagaagcaggataacttgactatcgacacccaatattacctcgcccagcagatccaccctgtggtggcccgtatctgtgaaccaatcgatgggattgacgcagtgctgattgctacctggttagggctggatccaacacaattcagagtacatcattaccacaaggacgaagagaatgacgctctgcttggtggaccggcccagttgacagatgaagagaagtatcgggactgcgaaagattcaaatgtccgtgtcccacctgtggaaccgagaacatctatgataacgtgtttgacggaagcggtaccgacatggagccaagcctataccggtgctcaaacatcgactgcaaagcaagtccactgacatttactgtgcagctgagcaataagttgatcatggatatccggaggttcatcaagaagtactatgacggctggctgatttgtgaggagcctacatgcaggaatcgcacgaggcacctgcctcttcaattctcgcgaaccggccccctttgccccgcctgcatgaaagccactctgcaaccagagtacagcgacaagtccttatacacccagctgtgtttttacagatatatcttcgacgctgaatgtgctctggagaagctgaccacggatcacgagaaggacaagctgaagaagcagttttttacacctaaagtgctgcaggattacagaaagttgaagaacactgctgaacagtttctgtctcggtctggctatagcgaggtcaacctaagcaagctgttcgccggctgcgccgtaaagtcttag

SEQ ID NO: 24643 - DNA, 399 bp, synthetic construct
  source 1..399: mol_type = other DNA; note = Synthetic coding sequence
atggtggagcccttcctgggcacctggaagctggtgagcagcgagaatttcgaagactacatgaaagaattgggagtgaactttgcagcccgcaatatggccggcctcgtcaaaccaaccgtgactatatctgtcgacggaaaaatgatgaccattcggacagagtccagcttccaggacacgaaaattagcttcaaactaggcgaggagttcgatgaaacaacagccgacaacagaaaggtgaagtccactataacacttgagaatggtagtatgatccacgtgcaaaaatggcttggcaaggagacgactatcaaacggaagatcgttgatgagaagatggttgtcgagtgcaagatgaacaacattgtttccacacgtatctatgaaaaagtctag

SEQ ID NO: 24644 - DNA, 555 bp, synthetic construct
  source 1..555: mol_type = other DNA; note = Synthetic coding sequence
atggaccggggcgagcagggcctgctgcggaccgaccccgtgcccgaggaaggcgaggacgttgctgccactattagtgctactgagacactctctgaagaggaacaggaagaactgagacgggagctagcaaaagtggaggaggagatccagacccttagtcaagtcctggccgctaaggagaaacatttggccgagatcaaacggaagctaggtatcaacagtctccaggaattgaaacagaatatcgccaaagggtggcaggatgttactgctacaagcgcatacaagaagactagcgaaacactcagccaggctggacaaaaagcatcggccgccttttcctccgttggttctgtcatcaccaagaaactcgaggacgtaaaaaacagccctacctttaaaagctttgaggagaaggtggaaaaccttaagtccaaggtgggcggtacaaagccagctggtggtgacttcggtgaggtcctgaatagcgcagcgaacgcttcagccaccactaccgaaccactacctgagaagactcaggagagtttatag

SEQ ID NO: 24645 - DNA, 675 bp, synthetic construct
  source 1..675: mol_type = other DNA; note = Synthetic coding sequence
atggactgccgggagatggacctgtacgaggactaccagagccccttcgacttcgacgcgggcgtgaataaatcctatctatacttgagcccatccggtaattcctccccgccgggatctccaactctgcagaagtttggtttgctgcggacagatcccgtgcccgaggagggcgaggacgtggctgcaaccattagtgcgacggagactttgtccgaggaggagcaggaagagctccggagggagctggccaaggtggaagaagaaatacagactttatctcaagtgctggctgcgaaggaaaagcatttggcagagattaaaagaaaactgggcattaacagtctacaggaactgaaacaaaatatagctaaaggttggcaagacgtcactgccacgagcgcgtataaaaagactagtgaaaccctctctcaagccgggcagaaagcttccgctgccttctcgtcagtcggcagcgtcatcactaagaagcttgaggatgtgaagaattcccccaccttcaaatcctttgaggaaaaggtggagaatttaaagagcaaggtcggtgggaccaaacccgcaggaggcgatttcggggaagtcttgaactcagccgcaaacgcttccgccaccacaacggaaccactgcctgagaaaacacaggaatccttgtag

SEQ ID NO: 24646 - DNA, 285 bp, synthetic construct
  source 1..285: mol_type = other DNA; note = Synthetic coding sequence
ccccgggccgcccggagccggggccccgccgtgagccggccccgggcacctcgacccgagctcactaccgaagccggcgagcccgcccgccggtgcgtcccgccctacgaacaccggccaggcatgcagtgcgccgtgactacccccccccccagctattacccatatcctaatctgagatgggacacctcacattttaaaaagtctggtggaccacaaagaaacaattatgtgattcatcccgagttcgtaagcgaaacttaccccgattatcgatgttggtag

SEQ ID NO: 24647 - DNA, 1110 bp, synthetic construct
  source 1..1110: mol_type = other DNA; note = Synthetic coding sequence
atgcccgtggtgaccaccgacgccgagagcgagaccggcatccccaagtccctgagcaacgagcctccctcagagaccatggaggagatcgagcacacctgtccacagcctcgcctcaccctgacagcccccgctcctttcgctgacgagactaactgtcagtgtcaggcgcctcatgaaaagctcacaatagcccaggctcgactgggcacacctgcagaccgcccagtgcgagtgtacgcagatggcatctttgacctgtttcatagtggccatgcacgcgcgctgatgcaggctaagaccctgttccctaacagctaccttttggtcggcgtgtgttcagatgatcttactcataagtttaaagggttcaccgtcatgaacgaagccgagcgctatgaagccctaaggcattgtagatacgtggatgaggtgatccgagatgcaccatggacgcttactcctgaatttctcgaaaaacacaaaatcgattttgttgcgcacgatgacattccctattcatctgcaggctccgatgatgtttacaaacatatcaaggaggcaggcatgttcgttcccactcagaggaccgagggcatctccaccagcgatattattacccgtatcgtgcgggactacgacgtatacgctaggcggaaccttcagaggggctacaccgccaaggaactgaatgtaagtttcatcaatgagaagcgataccgatttcagaatcaggtcgacaaaatgaaagaaaaagtcaaaaatgtggaggaaaggtcaaaggagttcgtgaatagagttgaggagaagtcccacgatctgatccaaaagtgggaagagaagtctcgcgagttcatcggaaacttcctcgagctctttgggcccgatggcgcttggaaacagatgttccaagaaaggtcatcgaggatgctgcaggccctttcgccaaagcaatctccagtgagctcccccacccggagtaggtccccctctcgcagtccaagtccaactttttcttggctaccgctgaagacatccccacccagcagtccaaaggccgcctctgcctctatttcatcaatgtccgaaggggacgaggatgaaaaatag

SEQ ID NO: 24648 - DNA, 1056 bp, synthetic construct
  source 1..1056: mol_type = other DNA; note = Synthetic coding sequence
atggtgggccaccaggagtgcatcatggaggaggacaaccgggccccgcagctgtggagaaagacattaacggctccagccccttttgcagacgagacaaactgtcagtgccaggccccccacgagaagctgaccattgcccaggctaggctcggcacacctgcagaccggccagtgcgcgtgtacgcggacgggatctttgatttgtttcacagtggccacgctagggccctgatgcaagctaagactctgtttcctaactcctacctcctggtgggcgtgtgttccgacgacctgactcacaagttcaagggctttacagtgatgaatgaagcagaaagatatgaagccttacggcactgcaggtacgtggatgaggtcatcagggatgctccatggaccttaacaccggaattcctcgagaagcataagatcgatttcgtggctcacgatgacatcccctacagctccgcagggtctgacgatgtctacaagcatatcaaagaagctggtatgttcgtcccaacgcagaggactgagggaatcagcaccagcgacatcattactaggattgtgagagactacgatgtgtatgctaggcgtaacctgcagcgaggttatactgcgaaggagctgaatgtgtcttttataaacgaaaagcgatacagatttcagaatcaagtcgacaagatgaaggaaaaagtgaaaaacgtggaggaaaggtcaaaagagtttgtgaacagagttgaggaaaaatcacatgatctaatccagaaatgggaggaaaagagcagagaattcattgggaacttcttagagctcttcggcccagatggcgcctggaagcagatgtttcaggagcgatcctctagaatgttgcaggcgctgagcccaaagcagtctcccgtgtcctctcccacacgctcgcgatcgccctcccgatcacctagtcccaccttttcttggctgccacttaaaacttcaccaccgtcttcacctaaggctgccagtgcctcaatctctagcatgtcggagggcgacgaagatgagaaatag

SEQ ID NO: 24649 - DNA, 600 bp, synthetic construct
  source 1..600: mol_type = other DNA; note = Synthetic coding sequence
atggccgacaagagcaagttcatcgagtacatcgacgaggccctggagaagtccaaggagactgccctaagccacctcttcttcacgtaccagggtatcccctacccaatcaccatgtgcacgtcagaaacattccaagcattagatacctttgaagccagacacgatgatattgtgctcgcttcctaccccaagtgtggttccaattggattctgcatatcgtctctgaactgatttacgctgtctcaaagaaaaaatataagtatcctgaatttccagtgctggaatgtggcgactccgaaaagtaccagaacttagcagccggcattaagcagatcgctgagttcttggggttcttcctgaccggcgagcaaattcagactatctctgtgcagtctacctttcaggcaatgcgtgcgaagtcacaggatacccacggggccgttggcccctttttattcaggaagggggaggtgggggattggaaaaacctgttctctgagatccagaatcaggagatggacgagaagttcaaggagtgtctggcgggtacaagtctgggcgcaaagctgaagtacgaatcttactgccagggttag

SEQ ID NO: 24650 - DNA, 1527 bp, synthetic construct
  source 1..1527: mol_type = other DNA; note = Synthetic coding sequence
atgcggtgccccaagagcgccgtgaccatgcggaacgaggagctgttgctaagtaacggcacagccaacaagatgaacggagccctggatcattcggatcagcctgatcccgatgcaataaagatgtttgtgggccagatccctagatcatggtcagaaaaagagctgaaggagctgttcgagccttatggtgcggtatatcagatcaacgttttgcgcgatcgctcccagaaccctccacaatccaaaggatgctgcttcgtcactttctacactcggaaagccgccctggaggcccagaatgccctccacaacatcaaaacactgcctggcatgcaccatcccatccagatgaaacctgctgactccgagaaaagcaacgcagtcgaggaccggaagctgttcatcggcatggtgtccaagaagtgcaacgagaatgacattagggtaatgttctccccgtttggtcaaattgaagagtgtcggattcttcgtggcccagacggtttgtcaagagggtgcgccttcgtgacctttagtacaagggctatggctcagaatgcgataaaggccatgcaccaatcccaaaccatggagggatgcagcagtccgatagtggtgaaattcgctgacacccagaaggacaaagaacagaggcgcctgcagcagcagctcgcgcaacaaatgcagcaattgaataccgcgacctggggtaatctgacagggctgggaggactgacacctcagtatctagctctcctccagcaagccaccagcagctcaaacctgggggcattctctggtatccagcagatggcaggcatgaatgccctacaactccagaatctggccacgcttgcagccgctgctgctgcggctcagaccagcgccactagtactaatgctaaccctttgtcaacaacttcgtccgccttgggcgccctgacctcacctgttgccgccagcactcccaattcaacggccggtgctgccatgaactctctgacatcgctcggtacactgcaaggccttgctggcgcaacagttggcctgaacaacatcaatgcactggcagggatggccgcactcaacggcggcctgggcgctacaggcctgactaacgggactgcaggtactatggatgcccttacccaggcatactcaggaatacagcaatacgccgcagctgcactgccaaccctgtattcccagtcactcctgcaacagcaatcagccgccggctctcagaaggagggcccagagggggctaacttattcatttaccacctgccccaggagtttggcgatcaggacattctgcagatgttcatgccattcggaaatgtgatcagcgccaaagtgtttatagacaaacagacgaacctatccaagtgtttcgggtttgtgagctacgacaaccccgtaagtgcacaggccgcaatccaggctatgaacgggttccagattggaatgaaacggctgaaggtgcagctcaagagatccaaaaatgattccaaaccatactag

SEQ ID NO: 24651 - DNA, 1215 bp, synthetic construct
  source 1..1215: mol_type = other DNA; note = Synthetic coding sequence
atgggcagcagccaggaggagggcctgcggtgccagcccagccagcccgatcacgacgctgatgggcattgcggccccgatctcgaaggagccgagcgagccagtgctacacccggcccccctgggctcctgaatagccacaggcccgcagacagcgatgacacgaacgccgccggtcctagcgcagcgttgttggaagggctcctgcttggtggtggaaaaccatcgccacactctacgaggccagggcccttcttctacatcggtggctctaatggtgctaccatcatcagtagctattgtaagagcaaagggtggcagcggattcacgattctcggagggatgactacacactgaagtggtgcgaagtcaagtcgcgggactcttatggctcattccgcgaaggcgagcagctgctgtatcagttaccgaacaataagctcctgaccacaaagattggccttctgagtacactccggggcagagcaagggcaatgtcaaaagccagcaaagtacccgggggggtgcaggctagactggagaaagacgctgctgcccccgcccttgaggacctcccgtggacctctcctgggtatcttcggccccaacgtgtgctgcggatggaagaattcttccctgagacatatcgtctcgatctcaagcatgaacgggaggctttcttcacactcttcgacgaaacccagatctggatttgtaagcctacagcatcgaatcagggcaagggaatttttctgctgcgaaatcaggaggaggttgctgccctccaagccaagacaaggagtatggaggatgatcccatccaccataaaaccccattccgagggccacaagctagggtcgttcaacgctacatacaaaacccacttctggtggatgggcgcaaattcgacgtccggtcctacctcctcattgcatgtaccaccccttatatgatttttttcggtcacgggtatgcgcgcctgactctgagcttatatgaccctcattccagtgacttgggtgggcacctgaccaatcaattcatgcaaaagaaatccccgctgtacatgttactgaaagaacacaccgtctggagtatggagcacctaaataggtacatcagcgacaccttctggaaggcccggggactggctaaggactgggtgttcaccactctcaaggtgaggccactctgtccccccgtgtgggagtag

SEQ ID NO: 24652 - DNA, 2022 bp, synthetic construct
  source 1..2022: mol_type = other DNA; note = Synthetic coding sequence
atggaccacagctgcacccggttcatccaccggcggggcccccccacccggaccagagcgggtttcaaacggggtaagcggccacgaattcagcagagacccagagcccgcgtgagcggaaccattcctgcgagtaggctccatcccgctcctgccagtcaaccgggaccgtgtcctgctccggggcactgcccagtgggcccagcccatgagaggcctatgggctcgtcccaagaagaggggctcagatgtcaaccgagccagccagaccacgatgctgacggacactgtggccctgacctggagggagcggagcgggcctccgccacacccggacccccgggtcttttgaactcccacaggcccgccgactccgatgacaccaatgcagccggcccctctgccgccctgctggaggggctgctcctgggcggtggcaaaccctcaccacattctactcgtcccggaccattcttctatattggcggctccaacggtgctaccattatttcttcctattgcaaatccaaggggtggcagaggatccatgactcacggcgcgatgattacaccttaaaatggtgcgaagtgaagagccgcgactcgtatggctcgtttcgcgaaggtgagcagttgctttatcagttaccaaacaacaaactgctgacgactaagattggcctgctatccacgctcagaggacgggcgagagctatgtccaaggcttcgaaagtgccaggcggggttcaagctagattggagaaggacgcagccgcgcctgcgctggaagacctcccttggaccagtcccggctatctccggcctcagcgggtactgcgaatggaagaattcttccccgagacctaccggctggacctgaaacatgagagagaagctttctttaccctgtttgacgaaacccagatatggatttgtaagcctacagcctccaaccaaggcaaaggcatctttcttcttagaaatcaggaggaggtcgctgccctgcaagcgaaaactaggtctatggaggatgatcctatccaccataaaaccccattccgcgggccccaggctcgggtggtgcaacgatatatccagaaccccctgcttgttgatggccgcaaattcgacgtgcgaagttatttacttatcgcgtgcactacaccttatatgatcttttttgggcatggctacgcccgtctaaccctctcactgtatgatccacactcctcagacctcggtggccatctcacgaatcagtttatgcagaaaaagtccccactgtatatgctgctgaaggagcacacggtatggtccatggaacatctcaatagatacattagcgataccttctggaaagcgcgtggcttggccaaggattgggtgtttacaaccttgaagaaacgaatgcaacagattatggcccactgctttctcgccgcaaaacctaagctagactgcaaacttggatatttcgacttgatcggctgcgattttttgattgatgacaattttaaggtgtggctactcgagatgaacagtaaccctgctttacatacgaactgtgaggtactgaaggaagtgataccgggtgtggttatagagaccttggacctagtcttggaaacttttcgcaagagtctgagggggcagaaaatgctgcccctcctatcacagcgacgctttgttttgcttcataatggagaagctgatccacggcctcacctaggcgggtcctgcagtctgaggcgctggcctccactgcctaccaggcaagccaaatcttcaggtccaccgatgccgcatgcccctgaccagccaggagcacggaggccagcacccccacccctggtccctcaacgaccgagaccaccagggcccgacctggatagcgcacacgacggtgaaccccaggctccgggaacagaacagtcaggcacaggtaaccgacaccctgcacaggagccatcaccaggcaccgccaaggaagagcgcgaagaacccgaaaatgcccgaccatag

SEQ ID NO: 24653 - DNA, 2022 bp, synthetic construct
  source 1..2022: mol_type = other DNA; note = Synthetic coding sequence
atggaccacagctgcacccggttcatccaccggcggggcccccccaccaggacgcgggccggctttaaacggggtaaacggccgaggatccagcagcgcccgagggcccgggtgtcaggtaccataccagctagtagactccatcctgctcctgcctcccagccgggaccttgcccggcccccgggcactgccctgttgggcctgcccatgaacgccccatgggctctagtcaggaggagggactccggtgtcaaccaagtcagcccgatcacgacgcagacggccattgcggccctgacctggaaggagctgaaagagcctccgcaactcccggacctcccggcttgttgaactcacacaggcctgcggattcagacgacactaatgccgcaggcccttcagcagccctgttggagggtttgctgctaggtggggggaagccctcaccccattctaccagacctgggccatttttctacattggaggctctaatggcgctaccatcattagctcctattgcaagtccaagggctggcagcgaatccacgactctcgtcgagatgattacactctcaaatggtgcgaggtcaaaagcagggacagctatggcagtttcagggagggcgaacagctgctgtaccaattacccaataacaaactcttgaccactaagattggtcttctctcaacattgagaggcagagcgcgggctatgtcaaaagcttctaaagtccccggtggagtgcaagcccgcctcgaaaaagatgcagccgcacccgccctcgaggacctgccttggaccagcccgggctatctaaggccccagagggtgctccgcatggaagagtttttcccggagacctatagactagacctcaagcacgagcgggaagctttctttacactgtttgatgagacccagatatggatatgcaagcccactgccagcaaccagggaaaagggatattcttgctgcggaaccaggaggaagttgcagctctccaggcaaaaacacggtccatggaagatgatcctatacaccacaaaacgccctttcggggcccacaggcccgcgtcgtgcagcgctacatacagaatccactgttggttgacggccgcaaattcgacgtccgcagctacttgctcatagcctgtacaacaccttatatgattttttttgggcacggttatgcacgcctcaccctttctctctatgacccacacagctctgacttgggcggtcacctgacgaatcaattcatgcagaaaaaatcacctttatatatgctgctgaaagaacatacagtgtggtctatggagcatctgaaccggtacatcagtgataccttttggaaggccagaggactcgcaaaagattgggtctttaccaccctcaaaaagagaatgcagcagatcatggcacactgctttctggcggccaagccaaagttggattgtaagctgggctacttcgatctgatcgggtgtgacttcctcattgatgataatttcaaagtgtggctacttgaaatgaactcgaatcccgcgttgcatacgaattgcgaggtcctgaaggaggtcattcccggcgtcgtcatagagacactcgatttggtccttgagacattcaggaagtcattgaggggacagaagatgctgccactgttgagccagaggaggttcgtgctcttgcacaacggcgaggctgatccccgcccccacttaggtggttcctgtagtttgaggaggtggccacccctccccacaaggcaggccaaaagctcagggcctccaatgccgcatgctcccgatcaacccggagcccgccgacctgcccctcctccactcgtacctcagcgacctcggcctcctggccctgacctggatagcgcacacgacggagaaccccaagcccccgggaccgaacagtctggcacaggaaataggcaccccgcccaggagccatccccaggaacagctaaggaagagcgcgaagaacctgagaatgctcgaccctag

SEQ ID NO: 24654 - DNA, 393 bp, synthetic construct
  source 1..393: mol_type = other DNA; note = Synthetic coding sequence
atgaccgaggacagccagcggaacttccggagcgtgtactacgagaaagtcgggtttaggggcgtggaagagaaaaaatccctagaaatactgctaaaagacgataggcttgataccgaaaagctgtgcaccttctctcagagatttcccttaccatccatgtacagggcgttggtgtggaaagttctgctggggattttgccaccacaccacgagagtcacgcaaaagtgatgatgtatcgaaaagagcaatacctggacgtactccatgccctgaaggtcgttaggtttgtctctgacgcaaccccgcaggcagaagtgtatctccgcatgtaccagctggagtcagggaagttgcccaggagcccaagctttccattagaaccagactag

SEQ ID NO: 24655 - DNA, 882 bp, synthetic construct
  source 1..882: mol_type = other DNA; note = Synthetic coding sequence
atgaccgaggacagccagcggaacttccggagcgtgtactacgagaaggtgggattccgaggggtcgaagaaaagaagagcctagaaattcttcttaaagacgatcgccttgatactgaaaagttgtgtaccttctctcaaagattccctcttccttccatgtacagggccctggtatggaaagtgcttctgggtattctccccccacatcacgagagtcatgcaaaggtcatgatgtataggaaggagcaatacttagatgtattgcatgccttaaaggtggtcaggttcgtcagcgatgctacccctcaggcagaagtgtatttgcgcatgtaccagctcgagagcgggaagcttccccggagtccgtcctttccactagagcctgatgacgaggtcttcctggccatcgccaaagccatggaggagatggtggaggatagcgtagattgttactggattacacggcgattcgtaaatcaactgaacaccaaataccgggactctcttccacagttgccaaaggctttcgaacagtatcttaatcttgaggacgggaggttgctaacccacttgaggatgtgctcagccgcgccaaaattgccatatgacctttggtttaaacgatgcttcgcgggttgtctccctgaatctagcctacagagagtgtgggacaaggtagtcagtggatcttgtaaaattctggtgtttgtcgccgtggagatccttctgacatttaaaattaaagttatggccttgaatagcgccgagaaaatcacaaaattcctggaaaacatcccccaggacagctccgacgccatcgtaagcaaagccattgacttgtggcacaaacattgcggtactcctgttcactcttcctag

SEQ ID NO: 24656 - DNA, 801 bp, synthetic construct
  source 1..801: mol_type = other DNA; note = Synthetic coding sequence
atgaccgaggacagccagcggaacttccggagcgtgtactacgagaaagtggggtttcgcggagtggaggagaagaaatccctggaaatattactgaaggatgacagattgggaatactccctccccaccacgaaagccatgccaaggttatgatgtatagaaaagagcagtacctggacgtcctccacgctttgaaggtagtcaggttcgtgtctgacgcaacgcctcaggccgaggtttatctgagaatgtatcaacttgagagcggcaagttacctagatctcccagtttcccattggagcccgatgacgaggtgtttttggccatcgccaaagccatggaagagatggtggaggactcagtcgattgttactggatcacgcggcgcttcgtgaatcaactgaacacaaagtaccgggattcactgcctcagctgcccaaagctttcgagcagtatctgaacctagaggatgggcgcctacttacacacctgcgtatgtgcagcgcagccccaaagctaccatacgatctgtggtttaaaaggtgctttgccggatgccttccagagtcaagtcttcaacgcgtgtgggacaaagtagtctcaggcagctgcaagattctggtgtttgtagccgtagaaattctcctcactttcaaaataaaagtaatggcgttgaattccgctgagaaaattacaaagtttctcgagaacattcctcaggactcttccgatgcgattgtgagcaaggccatcgacctttggcataagcactgtggcactcccgttcatagctcttag

SEQ ID NO: 24657 - DNA, 3672 bp, synthetic construct
  source 1..3672: mol_type = other DNA; note = Synthetic coding sequence
atgatgagcctgagcgtgcggccccagcggcggctgctgagcgccagagtcaatcgttcacagagcttcgcgggagtgctaggctctcacgaaaggggaccgtcactcagtttccgctcttttcctgtgtttagcccacctggtcctccgcgaaaaccgcctgctttatcgcgggtgtcacggatgttttcagtggcgcaccccgcagccaaggtgcctcagcctgaacggcttgatctcgtgtacacagccctgaaacgcggattgaccgcatatctcgaggtacaccaacaggagcaagagaagctccaggggcaaatccgggaatccaaacggaacagcagactcgggtttctgtatgatctggataagcaggtcaaatctattgagaggtttctaagacgcctggagtttcatgccagtaaaatcgatgaattgtacgaggcgtactgcgttcagaggcgactgcgagatggtgcgtataacatggtgagagcctacactacagggtctccagggtctcgcgaagcccgagactcactggcagaagccacccgggggcaccgcgagtataccgagtctatgtgccttctggaaagcgaattagaggcgcaactgggggaattccatctgcgcatgaagggactcgccggcttcgcccgcttgtgtgtgggggaccaatacgagatctgtatgaagtacggccgccagagatggaaattacggggccgcattgagggaagcggcaaacaagtctgggatagtgaagaaacaatcttcttgcccctgctgaccgaatttctgtctataaaagtcacagaactaaagggactggctaaccacgttgtagtcggctctgtgagttgtgaaactaaagatctgttcgctgcattgccacaggttgttgcagtcgatatcaacgatttagggactattaaactaagccttgaggtgacatggtcccccttcgataaagacgatcagcccagtgctgcctcctccgtgaataaggcctctaccgtgacgaagagattctcaacgtactcgcagtctccacctgatacgccatcactccgcgagcaggcattctacaacatgctgagacggcaggaggagttagaaaacggtacagcttggtccctgagtagtgagtcgtcggatgattcatcctcccctcagttgagcggtactgcacgccatagtcccgccccccgaccacttgttcagcaaccagaacctctccccatccaagtggcgtttcgacgcccggagactccctcgagtggccccctcgacgaggagggcgctgtggctcctgttctcgccaatgggcatgcaccatattcccggactctgagccacatctccgaggcatctgtagacgcagcgctggccgaagcttctgttgaagcagtcggacccgagtccctcgcgtggggaccgtctccgcctacacatcctgctcccacccacggtgagcatccctccccagtcccgccagctctggatccaggtcatagcgccacatcctccaccctggggactactggctcagtacctacctcaacggatccggccccatcggcacatcttgacagtgtccataagagcactgactctggtccatccgaacttccagggcctacccatacaaccactggaagcacatattcagctatcaccacaacccactccgctccttcgcccttaacccacacgacgacaggaagtacccacaagccaataatctccaccctcacaacaaccggtcccacactgaacattattggtcccgtgcagacaactactagccctactcatacaatgccatcccccactcacaccactgcttcccccacccatacatccacatctcccacacacactccaacctccccgacacacaagacctccatgagtccgcctaccacaacaagtcctaccccctctgggatgggattagtccagactgctactagccctactcaccccaccaccagtccaacacaccctacgacttctcccattctgattaacgttagccccagcacctccttagagttggcaacgctgtcgtcccctagcaaacactcagacccaactctgccaggtacagattccttaccttgttcccctccagtgtccaattcctacacccaggccgatcccatggcccctagaacacctcatccctcgccggcccattcatcgagaaaacccctgacaagcccagcccctgatcctagtgaatccaccgtacaaagcctctcacctactccttcccctcctacaccggctccccagcacagcgatctgtgcctggcaatggctgtccaaacaccagtgcccaccgcagccggtggaagcggagatcggtcccttgaggaagcccttggtgccctgatggccgccctggacgactatcgcggccaatttcccgagctgcaggggcttgagcaggaggtgacgagacttgagagccttcttatgcaacgacagggactgaccaggtcaagggcgagttctctcagtatcacggtcgagcacgcactggaaagtttctcttttctgaatgaggatgaggacgaggacaatgacgtcccaggtgatcggcctccctcttctcctgaggccggagccgaggacagcatcgatagcccatccgcacggcccctgtcaaccggctgcccagctcttgacgcagccctcgtgcgacacttataccactgcagccgcctattactcaagctcgggacgttcggaccactgcgatgtcaagaggcctgggcactggagcggcttttacgtgaggcaagggtcttagaagccgtatgcgagttttctcggcggtgggagatccctgcctcgagcgcccaggaggtggtacagtttagtgcatcccggccagggttcctgaccttttgggatcagtgcacagaacggctttcttgctttctgtgtcctgtcgagagggttttgcttactttttgtaaccaatacggagcccgactgtctctccgacagcccggcttagccgaagccgtgtgtgttaaatttctcgaagatgcgcttgggcagaagctgccaaggcgcccccaacccggacccggagaacagctaaccgtctttcagttctggtcctttgtcgagaccctggactctccaacaatggaagcatacgtaacagagaccgccgaagaagtcttactggtgagaaacctcaattcggacgatcaggccgtggttttgaaagcactccggctcgccccagagggacgccttcggcgagacgggttacgtgcactttcatctctactcgtgcacggaaacaacaaggtcatggctgctgtctccacccaattgcgaagtctaagcctgggaccaacgttccgagagcgcgcgctcctatgcttcctggatcaactggaagacgaggatgtgcagacaagagtcgctggttgcctggcacttgggtgcatcaaagccccagagggaattgagccccttgtttatctgtgtcaaaccgacacggaggcggttcgggaggctgcgcgacaatctctgcagcagtgcggagaagaaggacaatcggcccaccgccggctggaggaatctctggatgccctcccgaggattttcggccctggatctatggccagcacagcattttag

SEQ ID NO: 24658 - DNA, 123 bp, synthetic construct
  source 1..123: mol_type = other DNA; note = Synthetic coding sequence
atggccgacgaggagctggaggccctgcggcggcagcggctggccgagttgcaggctaaacatggtgaccccggtgatgctgcccaacaagaagcaaaacattcatccacggaggaaaaatag

SEQ ID NO: 24659 - DNA, 414 bp, synthetic construct
  source 1..414: mol_type = other DNA; note = Synthetic coding sequence
atgaagccccccgccgcccagggcagccccgccgccgccgccgccgcagcacccgcactggacagtgcagccgctgaagatctcagcgacgctctgtgtgaatttgacgcagtactggccgattttgcctctcctttccacgagaggcattttcattacgaagaacatctagagcgaatgaagcggaggtccagtgccagcgtttccgactcttcaggattctccgatagcgagagtgccgattcattatataggaattcattttcattttccgatgaaaagttaaatagccccacagacagtacacccgccctgctttcagcaacagtcacaccccagaaggccaagttgggcgatacaaaggagcttgaagcttttattgcagacctcgataagacattagcaagtatgtag

SEQ ID NO: 24660 - DNA, 1593 bp, synthetic construct
  source 1..1593: mol_type = other DNA; note = Synthetic coding sequence
atgcccaacgtgctgctgccccccaaggagagcaacctgttcaagcgcatattgaaatgctacgaacagaaacaatacaagaacggactgaagttttgcaaaatgatcctgagtaatccgaagtttgcggagcatggagaaacccttgctatgaaaggcctaaccctcaactgccttggaaagaaagaagaggcatacgagttcgttcgaaagggcctgaggaatgacgtgaaatcccacgtctgctggcatgtgtacggattactgcaaaggagcgataagaagtatgatgaggctatcaaatgttatcggaatgcacttaagcttgataaggacaatctccaaatactaagagatctttctctattgcaaatccaaatgcgagacctggagggatatcgtgagacccgttaccagctgctgcagcttaggcctacccaacgcgccagttggattgggtatgctatcgcttatcatctcctgaaagactacgacatggctctcaagctccttgaggaattccgtcagacccagcaagtaccccccaataaaatcgactatgagtacagcgaattaattttataccagaatcaggtgatgcgggaagccgatcttctccaggagtcactggagcacatcgaaatgtatgagaagcagatctgtgacaagcttctggtagaagagattaaaggggaaattttgctaaaactcggccgcctaaaggaagcgtccgaagtgtttaagaatctcattgaccggaatgctgagaactggtgctactatgagggactcgagaaagcgctgcaaatcagtacccttgaggagcggctccaaatttacgaagagatttccaaacagcatcctaaagcgatcacgcccagaaggctgcctcttaccctggtgccgggagagaggttccgggagctgatggacaaatttctgcgggtgaacttttctaagggctgtccacctctgtttactactctcaaatcgttgtactacaataccgaaaaagtatccatcatccaggagttagttactaactacgaggcctctttgaagacttgtgattttttctctccatacgaaaacggagaaaaagagccacccaccactcttttgtgggttcagtacttcctcgcccagcacttcgataagctaggccaatattcacttgccctggattacatcaacgccgccatcgcctccactcctacactgattgaacttttctacatgaaggctaagatctacaagcacattggcaatctgaaggaggcagcaaagtggatggatgaagctcagtctctcgacacggcggatcgcttcataaactccaagtgcgccaagtacatgctacgcgcgaacatgataaaggaggcagaagagatgtgctctaagtttacacgagagggaacttccgccatggaaaatctcaatgagatgcagtgtatgtggtttcagaccgagtgtatctctgcctatcaaaggctaggtcgctatggtgatgcacttaaaaagtgccatgaagtcgaaaggcactccccttctacatggacaactggcggaaaagagccgcagatgcacccctag

SEQ ID NO: 24661 - DNA, 2595 bp, synthetic construct
  source 1..2595: mol_type = other DNA; note = Synthetic coding sequence
atgcccaacgtgctgctgccccccaaggagagcaacctgttcaagaggatcctcaaatgttatgaacagaaacagtataagaacggcctgaaattctgtaaaatgatcctgagtaatcccaagtttgcagagcatggagaaacactggcgatgaaagggttgacactgaactgcctgggaaaaaaggaggaggcctatgaattcgtccggaaaggcctacgtaacgacgttaaaagccacgtatgttggcacgtttatggcctgctgcaaagaagcgacaagaagtatgacgaggccatcaaatgctacaggaatgctctcaagctggataaagacaatctgcagatccttcgagatctttccctgctacagatacagatgagggatttagaggggtaccgggagactcggtatcagctgcttcaactgcggccgacccaaagagccagttggattggctatgctatagcctatcatctgctgaaagactacgacatggccctcaagctccttgaagagttcagacagactcagcaggtccccccaaataagattgattacgagtacagcgagctgatcctgtatcagaaccaggtaatgcgcgaggccgacttgctgcaggagtctctcgaacatatcgagatgtacgagaaacagatttgtgacaagctgcttgtggaggaaataaaaggcgagatactgttaaagctcgggaggctcaaagaagctagcgaagtctttaaaaacctcatcgaccgcaatgccgagaactggtgttactacgaagggctggagaaggcactgcagatttcgaccctagaggagagactgcagatctatgaggagatcagcaagcaacatcccaaagccattacacctagaaggctcccactcaccctcgtgccaggggaacggttcagagagcttatggataaatttttaagagtgaatttttccaagggctgccccccattatttaccacgttgaagtctctttactataacacagagaaggtttcaattatccaggaacttgtcaccaactatgaagctagtctgaaaacctgcgatttcttcagcccttacgagaatggtgagaaagagcctcccaccaccctcctgtgggttcagtattttctggcgcaacacttcgacaaactggggcagtacagtctggccctggactacattaatgcggctatcgccagtaccccgacgctgatagaactattttacatgaaggccaaaatatataaacatattgggaatcttaaggaggcagccaaatggatggatgaggcacagagtcttgataccgccgatcggtttatcaatagcaagtgcgcaaagtacatgctgagggccaacatgataaaagaagcagaagagatgtgcagcaagtttacacgagagggcaccagtgccatggaaaacctgaatgagatgcaatgtatgtggttccagaccgagtgtatctctgcctatcagaggctagggaggtatggtgatgcactgaaaaagtgccatgaggttgaacggcacttttttgagataaccgacgatcaattcgattttcacacctactgcatgaggaaaatgacactgagagcctatgtggatctgctacgcttggaggatatccttcgacggcatgcattctacttcaaagccgcccggagcgccatagaaatctacctgaaactctatgacaatcctctgacaaatgaatctaagcagcaagaaattaacagtgaaaaccttagcgccaaggaactcaagaaaatgctgtctaaacaacggcgggcccaaaaaaaggctaagctggaggaggaacggaaacacgccgagagagaacgccagcagaagaatcaaaagaaaaagcgtgacgaggaggaagaagaggcatcaggcctcaaagaagagctgattcctgagaaattggaaagagtggagaatcctcttgaagaagcggtcaagttcctgattccactcaagaatcttgtggccgataatatcgacacccaccttctggccttcgaaatatacttcaggaaagggaagttccttctgatgctgcagtctgttaagcgggccttcgcaattaactctaataacccttggctacatgagtgtttgatcagattcagtaaatctgtatccaatcactcaaatctgcccgacattgtgtccaaagtgttgtcccaggagatgcagaagatattcgtgaaaaaagatctggaatcattcaatgaagattttcttaaaaggaatgctacgtcacttcagcacctgttatctggcgccaaaatgatgtacttcctcgataagtcccgccaggaaaaggctattgctatcgcgacgcgcctcgatgagactatcaaggataaggatgtaaaaacgcttattaaggtcagcgaagctctgctagatggcagcttcggcaattgcagcagtcagtacgaagagtaccggatggcctgccataacctgttgccttttacgagcgcgtttcttcccgccgtgaatgaagttgacaatccaaacgttgccctgaaccacaccgcaaattatgatgtgcttgccaacgaaatctag

SEQ ID NO: 24662 - DNA, 1668 bp, synthetic construct
  source 1..1668: mol_type = other DNA; note = Synthetic coding sequence
atgcagagctgcgagagcagcggcgacagcgccgacgaccccctgagccgcgggctacgaaggagaggtcagccgcgggtggttgttatcggagcaggcctggccggactggccgccgctaaagcattgctggagcagggctttaccgatgtgaccgtcctagaggcctcatcccatatcggggggcgcgtgcagagtgtgaagttagggcatgcgacttttgaattaggagctacgtggattcatggatcgcacggtaacccaatttaccacctggccgaagccaacggcctcctggaggaaaccaccgatggtgaacgtagtgtgggccgcatcagcctatattccaaaaacggagttgcatgctatctcactaaccatggtagaaggatacccaaggatgtcgttgaagagttcagcgacctgtataatgaggtgtataatctgactcaggaattttttaggcacgataaacctgtgaacgcggaatcccagaacagtgtaggcgtcttcacgcgggaagaggtaagaaatcgaatccgtaacgatccagacgatcccgaggctacgaaaagattaaaactggccatgatccagcagtatcttaaagtggaatcttgcgaatcttctagccactcaatggatgaagtgtcactgagtgctttcggagagtggacagagattccaggagcacaccacatcatcccctctgggtttatgcgcgtggttgagctgctcgccgaagggatcccagcccacgtaattcagctagggaagcctgttcgctgcatccactgggaccaggcatccgctaggccgcgtggtccagagatcgagcccagaggagaaggggaccacaatcatgatactggcgagggtggacagggaggcgaggagcctcgagggggaagatgggacgaagacgaacagtggagcgtggtagtcgagtgcgaagattgcgagctgattcctgcagaccatgtgattgttacggtgtctttaggagtcctcaagcgacagtatacctcattcttccggcccggcctcccaactgaaaaagtggccgccattcacaggctcggcatcggcacaactgacaagattttcttggaatttgaagagcccttctggggacccgagtgcaacagcctgcagttcgtgtgggaagacgaggctgaaagccacaccttgacttacccgccggagctgtggtaccgcaagatctgcggattcgacgtactgtaccccccagaacgatacggacacgtactgtcaggatggatatgtggtgaagaggcactggtgatggaaaagtgcgacgacgaagcggtagcagaaatatgcaccgaaatgctgcgccagtttactggtaaccccaacatccctaagccacggcgtatcctgagatcagcctggggctccaacccttacttccggggttcttattcttatacacaggtgggctccagcggagctgatgtggaaaaattggcaaaaccactgccctatacagagtcctccaagacggcaccaatgcaggtgcttttttccggagaagccacccacaggaaatattatagcactacacacggggcactgctgtcagggcagagggaggcagctcggctcattgaaatgtaccgggatctctttcaacagggcacctag

SEQ ID NO: 24663 - DNA, 630 bp, synthetic construct
  source 1..630: mol_type = other DNA; note = Synthetic coding sequence
atggcccccgtgggcgtggagaagaagctgctgctgggccccaacggtccagccgtagccgccgctggagacctgacatcagaagaagaagagggacaatctctgtggagctctatcctgtccgaggtgagcactagggcgagatctaagcttccttccggaaaaaatatactagtgtttggcgaggatggcagcggcaaaactaccctaatgaccaagcttcagggggcggaacacgggaaaaaggggagaggcttggaatatctatacctttctgtccacgacgaggaccgggacgatcacactcggtgcaatgtgtggatactagacggagatttataccataaggggctcctgaaatttgcagtcagcgcagaatccctgccagagacactggtcatctttgtggctgatatgagccgtccctggacagtgatggaaagccttcagaaatgggcctctgtgctgcgagagcatattgataagatgaaaatcccccctgaaaagatgcgcgaactggaacgtaagttcgttaaggactttcaggattatatggagcctgaagaaggatgccaggaggggcccctgagcaaccgcgtcgaacaaatgcgacctcggaatcactggtag

SEQ ID NO: 24664 - DNA, 858 bp, synthetic construct
  source 1..858: mol_type = other DNA; note = Synthetic coding sequence
aactggaacctggccagctggaaccccagcaaccccgagtgcctgctgcttgtagtaaaagaattagtgcagcagtaccatcagtttcagtgcagtagactgcgtgaaagctctcggctgatgttcgaataccagacgttactggaggagccccaatacggagagaatatggaaatatacgcgggcaagaagaataactggacaggagagttctccgctagattcctgctcaaactgcctgtggacttcagcaatatccccacctacctcctcaaggatgtgaacgaagatcccggcgaggacgtggcgctgctctctgtttctttcgaggacactgaagcaacacaagtttatccaaaattatatctgagcccccgaatcgagcacgcacttggcgggagcagcgcgcttcatatcccggccttcccaggcggcggttgtctgattgattacgtcccccaagtttgtcacctgctcactaataaagtgcaatacgtgatccaaggttaccacaagaggagggagtatatcgccgcgttcctgagtcactttggcactggtgtagtggagtatgacgccgaaggctttaccaaactcaccctgttgctgatgtggaaggacttctgtttcctggtacacatcgacctaccactcttttttccaagagaccagcccaccctgacgttccagtcagtgtaccacttcaccaactccggccagctttattcacaggcccaaaagaattatccctacagtccccgctgggatgggaacgagatggctaagcgggccaaggcatactttaagaccttcgtgccacaatttcaagaggctgcgttcgccaatggaaaactatag

SEQ ID NO: 24665 - DNA, 1152 bp, synthetic construct
  source 1..1152: mol_type = other DNA; note = Synthetic coding sequence
atgagccccgaggtggccctgaaccggatcagccccatgctgagccccttcatatccagcgtggtgcggaacggcaaagtaggcctagacgcaacaaattgccttagaattactgatctgaaaagcggctgtactagccttactcccggtccaaattgtgatagatttaagctgcatatcccctacgccggtgagactctgaagtgggatattatatttaatgctcagtatcctgagctgccaccagattttatctttggggaggatgcggaattcctccctgatccatcagcgctgcaaaatttagctagttggaatccctcgaatcccgaatgtttacttctggtagtgaaggagctcgtgcagcagtaccatcaattccagtgctctcgattgcgcgagtcttcccgacttatgttcgaataccagactttattggaagagccgcagtatggcgagaatatggagatatacgcggggaagaagaacaattggaccggcgaatttagcgcccgattcctgctcaagcttccagtggacttttcaaatatccccacctacctcctaaaggatgtcaatgaagaccctggggaagatgtcgcacttttgtctgtaagttttgaagacacggaggcaacccaggtttaccccaaattgtacctgtctccaaggattgaacatgcactgggaggcagcagcgcactgcatatcccggctttcccaggggggggctgcctgattgactatgtgccccaagtgtgccatctgctgacaaataaggtgcagtacgtgatccaggggtaccacaagcggagggagtatatcgcggccttcctttctcacttcgggaccggtgttgtggagtacgacgccgagggctttacaaagttaacactgctcctgatgtggaaagacttctgctttctagtgcacatagacctgcctctgttcttcccacgagatcagccaaccctgaccttccagtcagtgtaccactttaccaactcagggcagctgtatagccaggcacagaaaaattatccatacagccctcgctgggatggtaatgagatggccaagcgggctaaggcatacttcaagacatttgtgccccagtttcaggaggccgcgttcgctaatggcaaactgtag

SEQ ID NO: 24666 - DNA, 1131 bp, synthetic construct
  source 1..1131: mol_type = other DNA; note = Synthetic coding sequence
atgagccccgaggtggccctgaaccggatcagccccatgctgagcccttttatctcttcagtggtgcgaaacggaaaagtggggcttgatgccacaaactgtcttagaattaccgatttgaagtctggctgcacctcactgactcccgggccgaattgtgataggtttaagctgcacatcccttatgcgggagagaccctcaaatgggacatcattttcaacgcccaatatcctgagctgccgcctgatttcatctttggggaagacgccgagttcctaccagacccgtctgccctgcagaatcttgccagttggaacccatctaaccccgagtgcctgctgctcgtggtgaaagagctcgtgcagcagtaccaccagttccagtgctcccgccttagggagtcgtctcgactgatgttcgaatatcaaactctgttagaggagccacagtacggagaaaatatggaaatctacgccgggaagaaaaacaactggaccggcgagtttagtgcccgctttctcctgaagctaccggtcgacttctcaaacattcctacctatttactcaaggatgtgaatgaggaccccggggaggatgtcgctctactttccgtctccttcgaggatactgaagctacccaggtttacccgaaactctatctctctccaaggatcgaacatgcgctcggcggatcttcagcattacacattcctgcgtttccggggggcggctgcttaattgactacgtaccccaggtgtgtcatctgttgaccaacaaagtgcagtacgtcatccaagggtaccacaagcggcgggagtacatcgctgcattcctgagccatttcggtaccggtgtagtggagtacgacgccgaaggattcacaaaactgacgttgctgttgatgtggaaagacttctgcttcttggtccacatcgacctgccgctattcttcccgcgcgaccagccaaccttgacctttcagtcagtgtaccacttcactaacagtggtcagctctatagtcaggcccagaaaaattacccctattccccgagatgggatggcaatgagatggcaaaacgggccaaacgggaaagtaacagagatggggaagagagcagctccgcctag

SEQ ID NO: 24667 - DNA, 312 bp, synthetic construct
  source 1..312: mol_type = other DNA; note = Synthetic coding sequence
atgatccgggccttccccaccaccaccccccggagcctgcacctgttcacatcctccacattcttggccagggcgttgcccggggcatttcccacaggagcgtgcgaagagcgactgtccgtgccggaatcaacgcccttcaccgcggttctgaagtttgccgccgaggagtttaaggttcccgctgctacatcagcgattatcactaatgacgggattggcataaacccagcccagactgcgggcaacgtgtttttgaaacacggtagcgagttgcgaattatccctcgagaccgggtgggctcctgctag

SEQ ID NO: 24668 - DNA, 1968 bp, synthetic construct
  source 1..1968: mol_type = other DNA; note = Synthetic coding sequence
atggccacccccgtggtgaccaagaccgcctggaagctgcaggagattgtggcccacgccagcaatgtgtcctccttggtgctgggtaaggccagcggcaggctcctggccacgggcggtgacgactgtcgggtgaatctttggtccattaataaaccaaactgtattatgagtctcaccgggcatacctcaccagtagagtccgtgcggctgaacactccagaggagctgattgttgcgggctcccagtctggaagtatccgtgtgtgggacctggaggccgcaaaaatcctgcgcacactgatgggtcataaggccaatatatgctctctggattttcatccgtatggggaatttgtggcctcggggtctcaagacaccaatatcaaactttgggacattaggcgcaaaggctgtgtttttcggtatagagggcacagccaggccgtacggtgtctgaggttcagccccgatgggaagtggctggcctccgcggcagacgatcatacggtgaagctctgggatctcaccgcaggaaaaatgatgtccgaatttcctgggcacactggaccagttaatgtagtcgaattccaccccaatgagtacctgctcgccagcggcagcagcgatcgcaccatccgcttttgggatcttgaaaagttccaggtcgtcagctgcatagaaggcgagcccggccccgtgcggtccgtcttgttcaacccagatgggtgctgcttatattccgggtgtcaggattctctgcgcgtgtatggctgggagcccgagcgatgtttcgacgtcgttctggtcaattggggtaaggtagcagacctggcaatctgcaatgatcaactcatcggagtggcattttctcagtccaacgtgtcgagttatgtcgtggacctgacccgcgtaacaagaaccggcactgtagcacgagatcccgtgcaggatcacagacctctggcacagccgctacccaacccgagtgcgccactgaggagaatatacgaaaggcctagcactacatgttccaagccccagcgggtgaaacagaacagcgagtctgagagacgctcaccaagctccgaggatgaccgagatgagcgggaatccagggcagaaattcaaaacgctgaggattataatgagatctttcaacctaaaaactccatatcccgaacaccgcccagacgctccgaaccatttccggccccacctgaagatgatgcagcaacagctaaagaagccgccaagccatctcctgcaatggacgtccagttccctgtccccaacctggaggttctacctcggccacctgtggttgccagtacacctgctcctaaggctgagccggctataatacctgccacacggaacgagccaattgggttaaaggcctccgacttcctcccagccgtgaaaattccgcagcaagcggaactagtggatgaggacgccatgagtcagataagaaagggacatgataccatgtgtgtggtgttgactagcaggcataagaatttagacacggtgcgggctgtctggacaatgggggacatcaagacctctgtggactcagcagtagccattaacgatctgtctgtagttgtcgacctgcttaatattgtgaatcagaaggcgtccttatggaaactcgacctctgcacaacggtattaccccagatcgagaagttgttgcagagtaaatatgagtcttacgtgcagactggttgtacttcacttaaattgatccttcagcggtttctgcccttaatcacggatatgctggctgccccccccagcgtgggggtggatatttcacgcgaagagaggcttcacaaatgtaggctgtgctacaagcagctgaagtccatcagtgggctggtcaagagcaaaagtggcttgtcgggaaggcacggaagcacgttcagagagctccatcttcttatggcatccttagattag

SEQ ID NO: 24669 - DNA, 165 bp, synthetic construct
  source 1..165: mol_type = other DNA; note = Synthetic coding sequence
atgttcctgagcgccgtgttcttcgccaagagcaagagcaacgagaccaaatcgcccttgcgggggaaggagaaaaacactctgcccttaaacggcggtcttaaaatgactctgatctacaaagagaagactgaaggaggcgacaccgatagcgagatcttgtag

SEQ ID NO: 24670 - DNA, 2457 bp, synthetic construct
  source 1..2457: mol_type = other DNA; note = Synthetic coding sequence
atgaagaagcagttcaaccggatgcggcagctggccaaccagaccgtgggtcgtgctgagaaaactgaggtgctgtcagaggatctgctacaggttgaaaagcggctagagctcgtgaagcaggtgagtcactctacacacaagaagctgactgcctgcttgcaaggacagcagggtgctgaagccgacaaacgttcgaagaaactgcctctgacaacgttagctcaatgtctgatggaaggaagtgccatactaggagatgacacactcctaggaaagatgttgaagctgtgcggcgagacagaagataagctcgcacaagaactgatccattttgagctgcaggtggagagggatgtgattgagccactcttcttactcgcagaagtcgaaatccccaacatccaaaagcagcgaaagcatctcgctaagttggtcctcgatatggactcctctaggactagatggcagcaaacttcaaagagttccggcctgtcttcctcactgcagcctgcaggagccaaggccgatgcattgagagaagagatggaggaggcagcaaatagggtggaaatttgtagagaccaactctcagcagacatgtactcattcgtggcaaaggagatcgattacgccaattactttcagacactgatagaggtccaggctgaatatcatagaaagtccctaacactcctccaagccgtccttccacagataaaggcgcagcaggaagcctgggttgaaaagccatccttcggaaagcccctcgaagaacacctcacaatctccgggagagaaatcgccttccctatcgaggcttgtgtgactatgctgctggaatgcgggatgcaggaggagggcctcttccgagtggcgccttccgcctcgaagctcaaaaagttgaaggcagccttggattgctgtgtcgtagacgttcaggagtatagtgccgatcctcacgctatcgctggggcactcaaaagctacctacgggagctgccagaacccctaatgacatttgagctctacgatgaatggattcaggcctccaacgtccaggaacaggataaaaagttgcaagctctctggaatgcatgcgaaaagctgcctaaagccaaccacaataacatccgctaccttatcaagttcctgagcaagctaagcgagtaccaggacgtgaacaagatgacaccctctaacatggccattgttctggggcccaacttactctggccgcaagcggaaggaaatatcaccgaaatgatgaccaccgtttccctccagatcgtgggcatcatagaacctattatccagcatgcggattggtttttccctggcgagattgaatttaacattactggaaattacgggtctcctgttcacgtgaaccataacgcaaattacagctcaatgcctagtccagacatggaccctgccgataggcggcagccagagcaggctcgacgaccgctaagcgtcgcgactgataacatgatgctggaattctataaaaaggatggcttgaggaagatccagtctatgggcgtccgagttatggatactaactgggttgcaagacgaggtagtagcgccggccggaaggtgagctgcgccccaccatctatgcagccccctgcaccccccgccgagctcgccgctcctctgcccagtcctcttcctgagcagccgttggactctcctgcggcaccagctctgagtcccagcggccttggactgcagcctgggcccgaaaggaccagtacaacaaaatccaaggagctcagcccaggcagcgcccaaaagggctctccggggtcaagccaaggcactgcatgcgcaggaacacagcccggtgcccagccaggcgcgcagcctggcgcctctcccagccctagtcaaccccctgccgaccagagtcctcataccctgcgaaaagtttctaagaagctagctcctataccacccaaggtgcctttcggtcaacctggagcaatggcagaccagtcagccggacagccttctcccgtatctttgtcccccacacctccttcaacgccctcaccatacgggctcagttaccctcagggctattcactagctagtgggcaactgagccctgccgcagctcccccactggcctcgccatccgttttcacaagcacactgtcaaagtctagacctactccgaaacccaggcaaaggccgacactcccccccccccagcccccaacagtgaacctgagcgcatcatcccctcagtcaaccgaggcaccgatgctggatggtatgagccccggggagtctatgagtaccgatttggtgcactttgatatcccttccattcatatcgaactgggcagcactctgcgcctgtctcccctggagcatatgaggaggcacagcgtgacagataagcgcgacagtgaggaggaatccgagtcaactgccctatag

SEQ ID NO: 24671 - DNA, 1014 bp, synthetic construct
  source 1..1014: mol_type = other DNA; note = Synthetic coding sequence
atgaccaacaacagcggcagcaaggccgagctggtggtgggcggcaagtataaactagtccgtaaaattggctctggctcttttggagacgtttacctcggcatcactactactaatggcgaggacgttgccgtaaaactggagagccagaaggtgaagcacccgcaattgctctatgagtccaaactgtatacaatcctccaaggaggggtaggcatcccccacatgcactggtacgggcaggagaaagacaataatgtgctggtcatggacctgctcggccccagcctcgaggatctcttcaacttctgctctcgtaggtttacgatgaagacagttttgatgctggccgatcagatgatttcccgcattgagtatgtgcacactaagaatttccttcaccgagacataaagcccgataactttctcatgggaacaggtcgtcattgtaacaaactgtttttgattgactttgggttggccaagaagtacagggataaccgcacacgccagcacattccataccgtgaggacaagcacttgattggcaccgtcagatatgcctcaattaatgctcatctggggatagagcaaagtcgtagagacgacatggaaagtctaggctatgtattcatgtatttcaacaggacctctctcccgtggcagggtctccgagccatgactaaaaaacaaaagtatgagaaaatatccgagaagaaaatgagcacacctgtcgaggtcctgtgcaagggatttcccgcagagttcgccatgtacctgaactattgtcggggcctgaggttcgaagaggtgcccgattacatgtatttgcgacagctgtttaggatcctgtttaggacccttaatcaccagtacgattacacatttgattggaccatgttaaagcagaaggcggcgcagcaagcagcctcctcatctgggcagggccaacaggcacagactcagactgggaagcagacagagaaaaataaaaacaacgtaaaggataactag

SEQ ID NO: 24672 - DNA, 1608 bp, synthetic construct
  source 1..1608: mol_type = other DNA; note = Synthetic coding sequence
atgagcgagggcgagagccagaccgtgctgagcagcggcagcgacccaaaagtggagagctcctcatccgcccctggcttgaccagcgtgtccccccccgtcacatccactacctctgctgcctcacccgaggaggaggaggagtctgaagatgagtcggagattttagaagagtccccctgtggcagatggcaaaagcggagagaggaggtgaatcaacggaacgtcccaggcatagattctgcctacttggcgatggacaccgaagagggagtagaagtggtttggaatgaagtgcagttttccgagcggaagaactacaaacttcaagaggagaaggtgagagctgtgtttgataacctaattcaactggagcacctgaacattgttaaattccataagtattgggctgacattaaagaaaacaaggccagggttatcttcataacagagtacatgagcagcgggtctctgaagcagttcttgaagaaaaccaaaaaaaaccataaaactatgaatgaaaaagcttggaagcggtggtgtacgcagatcctgtcagccctgtcctaccttcactcatgtgatcccccaattatccatggtaatctgacctgtgatacaatattcattcaacataacgggctcattaagatcgggagcgttgcccccgacacaatcaataatcacgtaaagacctgccgtgaggagcagaagaacctccacttcttcgcacccgaatacggcgaggtgaccaacgtgacaacggcggtggacatctattcctttggcatgtgtgcactggaaatggctgtgctcgaaatccaggggaatggcgagtcttcttacgtgccacaggaggcaatttcctctgcgattcaacttctcgaggaccctctgcagagggaattcattcagaagtgtctgcagagcgaaccagctcggagaccaaccgctagggagctgctattccatcccgccctgtttgaggttccctctttgaagctccttgcagctcactgtattgttgggcatcagcacatgatacctgaaaacgcccttgaggaaatcaccaagaatatggatactagtgctgtcctcgctgaaatcccggctggtcctgggagggaacctgtacagacactgtactctcaatctcctgctctggagctagataaatttttagaggatgtccggaatggcatctacccgctgacagcatttggccttccccgcccccagcagccacagcaggaagaagtgaccagccccgtggtgcctccttccgttaagacaccaacccctgagcctgccgaggttgaaaccaggaaggtcgtgctgatgcagtgtaacatcgagagcgtagaagaaggcgtgaagcatcatttgacgctgctcctgaaacttgaggataagttaaacagacacctgtcatgcgaccttatgcctaatgagaacatccctgagctggccgctgaactggtccagctgggattcattagtgaagcggatcagtctcggttgacctccctccttgaggaaacactcaacaaatttaacttcgcacgcaacagtaccttgaactcagcagccgtcaccgtgagcagctag

SEQ ID NO: 24673 - DNA, 2169 bp, synthetic construct
  source 1..2169: mol_type = other DNA; note = Synthetic coding sequence
atggagaccagcgacatccagatcttctaccaggaggaccccgagtgccaaaatttgagcgaaaatagctgccccccatctgaggtcagtgacacgaacctgtattcgcccttcaagccaagaaactatcagctcgaactcgccctgccagcgatgaaaggcaagaacaccatcatctgcgccccgactggctgcggcaagacattcgtgtcccttctgatctgtgaacaccacctcaagaagttccctcagggccaaaaaggtaaagttgtctttttcgcaaaccagatcccggtctatgaacagcaaaaatccgtgttctccaaatactttgagagacatggctatagggtcactgggatctccggcgcgacagcagagaatgttcccgtagagcagatcgtcgagaacaacgatattattatattaaccccccagatcttggtgaataacctaaagaagggcactattccatcgctgagtatatttaccctcatgattttcgatgagtgtcacaatacttcaaaacagcatccttacaatatgatcatgttcaactacttagaccagaaactcggcggaagtagcggtccactcccccaggttattggcctcactgctagcgtcggggtgggggatgcaaagaatactgatgaagcactagattacatctgcaagttatgcgcctctttagatgcctctgttattgccactgtgaagcacaacctagaagagctcgaacaagttgtgtacaaaccccagaagttcttccgtaaggtagagtctcgcatcagcgacaagttcaagtacatcattgctcagctgatgagagatactgagtcccttgctaagaggatttgtaaagaccttgagaacctctctcagattcagaacagagagttcgggacacagaagtacgagcagtggattgtgacagttcaaaaagcttgtatggtgttccagatgcccgacaaagatgaagagtctagaatttgcaaagctttattcctctacacaagccatctccgcaaatacaatgacgcattaattatcagcgaacacgctcggatgaaggatgccctagattatcttaaagactttttcagtaatgtccgcgccgcagggttcgacgagatcgagcaggacctgacccagagatttgaggagaaacttcaggagctggagtcggtgtcccgggacccatccaatgagaacccgaagctggaagatctgtgcttcatactgcaggaggagtaccacttaaatccagagacaatcacaattctctttgtgaagaccagggcgctggttgacgccttgaagaattggatcgagggtaatcctaagctctctttcctgaaacccggaattctcaccggccggggaaaaaccaatcagaacacaggcatgacacttcctgcccagaagtgcatcttagatgccttcaaagcgagcggggatcacaatatccttatcgcaacctctgtcgctgacgagggaatcgatatcgcacagtgcaacttggttattctttatgaatacgtgggaaatgttatcaagatgattcagacacgcggtaggggtagggctcggggctcaaagtgttttttgttgactagtaatgcaggcgtcattgagaaagaacaaattaatatgtacaaagagaaaatgatgaatgactccatcttacggcttcagacttgggatgaagctgttttccgggaaaaaattctgcatatccagacccacgagaagttcatacgggactcgcaggagaagcctaagccagtgcctgacaaagagaacaaaaagctcctatgcaggaaatgtaaagccctggcttgctacactgcagacgtgagggtgatcgaggaatgccactacacagtgctgggcgatgcttttaaggaatgctttgtctctagaccacatcccaagccaaagcaatttagctcttttgagaagcgcgccaaaatcttctgcgccaggcagaactgttcccatgactgggggatccacgtgaagtacaagacttttgagatcccagttataaagattgagagctttgtggttgaagacattgcgacaggggttcaaacattgtacagcaagtggaaggatttccattttgagaaaatcccctttgacccagcagaaatgagtaaatag

SEQ ID NO: 24674 - DNA, 2643 bp, synthetic construct
  source 1..2643: mol_type = other DNA; note = Synthetic coding sequence
atgaccaccgagcagcggcggagcctgcaggccttccaggactacatccggaagacactcgatccaacatatatcctcagctacatggcaccttggttcagggagggctattcaggactgtatgaggcgatcgagtcctgggactttaaaaagattgagaagctggaagaataccgcctactgttaaagcgactccagccagaatttaaaacccgcatcatccctacggatattatctccgacttgagcgagtgtcttattaaccaggagtgcgaagaaattttacagatctgtagtaccaagggaatgatggccggagccgagaaactggtggagtgcctgctgagaagtgacaaagagaattggcccaaaactcttaagttggccctggaaaaagagcgcaacaagttcagtgaactctggatagtggagaaaggaattaaggacgtggaaaccgaggacttagaggataagatggagaccagtgatattcagatcttttatcaggaggacccggaatgccaaaatctatctgagaattcatgtccaccttctgaggtgtccgacactaacctctatagcccgtttaaaccccgaaattaccagctggaactcgccctaccagcaatgaagggaaaaaacaccattatatgtgcccccacggggtgtggaaagacctttgtatccctgctgatctgtgaacatcatttaaagaaatttccacagggccaaaagggcaaggtggtgttctttgcgaaccagatccccgtttacgagcagcagaaaagcgtgttcagtaaatactttgagcggcacgggtacagggttactggcattagtggcgccaccgctgagaacgtgcccgtagaacagattgtggagaataacgatattataatacttaccccccaaatcctcgtcaataacctgaaaaagggaaccataccaagtctgtccatattcaccctaatgattttcgatgaatgtcacaacacctcaaaacagcatccgtacaacatgattatgtttaattacctcgatcagaagcttggcgggagctctggccctctgccacaggtgattggcctcacagctagtgtcggcgtgggcgatgcaaagaatacagatgaggccctggattatatctgtaagctatgtgcatccttggatgcctcggtgatagccacagtaaaacataacctcgaggaacttgaacaggtagtttacaagccacagaagtttttccggaaagtcgagagcagaatatcagataagttcaaatatataattgcacagctgatgagagacacagagagcctcgccaaacgcatctgcaaagatctcgaaaacctgtcacagattcagaaccgggagttcggcacacaaaaatatgagcagtggatcgtcaccgtgcaaaaggcttgcatggtgtttcagatgccagataaggacgaggaatcacgaatctgtaaggcccttttcctgtacacatcacacctgcgcaaatacaatgacgccctgattatcagcgagcatgcgaggatgaaggacgcactggactacctaaaagacttcttctccaacgtcagggccgctggcttcgacgagatcgagcaggatctgacacagcggttcgaggagaaactacaggaattagaatcggtgagccgtgacccatcaaatgagaatcctaaactcgaagacctctgttttatcctccaggaagagtaccatctgaacccggagacaatcacgattctctttgtcaagacccgcgcgctggtcgatgctctcaaaaactggatcgaaggcaaccctaagctgtcattcctgaaaccaggcatcctaactgggcggggaaaaacaaaccagaatacaggcatgacgctgcccgcgcaaaagtgtatcctcgatgctttcaaggcgagcggtgatcacaatattttaatcgccacctccgtggccgatgagggtatcgacatagcccagtgcaatcttgtgattctgtacgagtatgttgggaacgtgattaagatgatacagacaagaggcaggggcagagcgagaggcagcaaatgtttcctcttaactagcaacgcgggcgtgatcgaaaaggaacaaataaacatgtataaggagaagatgatgaatgattccatactacgcctccaaacttgggacgaagccgtatttcgtgagaagatcttgcacatacaaacccacgagaaatttattcgtgacagtcaagaaaaacccaagccagttccggataaagaaaataagaaacttctctgccgcaaatgcaaggcactagcttgctatacagcggacgttagggtgatcgaagaatgccactacaccgtgcttggagatgcattcaaggaatgctttgtcagtagaccccatccaaagccaaagcaatttagttcctttgagaagagagcaaagattttctgcgcacgccagaattgctcacatgactggggtatccacgttaagtataagaccttcgaaatacctgttataaaaatcgagagttttgtggtggaagacatcgccacaggggtgcaaaccttatactctaaatggaaagactttcactttgaaaaaatccccttcgacccagctgagatgtcaaaatag

SEQ ID NO: 24675 - DNA, 2778 bp, synthetic construct
  source 1..2778: mol_type = other DNA; note = Synthetic coding sequence
atgaccaccgagcagcggcggagcctgcaggccttccaggactacattaggaagacattggaccctacctacattttgtcatatatggcaccgtggtttcgggaggaggaagtacaatacatccaagctgagaagaataataaaggacccatggaggccgccacactcttcttaaaattcctgctcgaattgcaggaggaaggatggtttcgaggttttctggatgcgctcgatcatgctggctattcaggcctgtatgaagccattgaaagctgggatttcaaaaaaatagagaaactagaggagtataggctactgcttaagcgcctgcagcccgaatttaaaacaagaataattccgacagacattatcagcgatctgagcgagtgcctgattaaccaggaatgcgaggagatccttcagatttgctcaacgaagggtatgatggcaggcgccgagaaactagtggaatgcctcctccgctcggacaaagaaaattggcctaaaacactaaaactcgccttagaaaaagagaggaacaagttttcagagctctggattgtggaaaagggcattaaggatgtcgagacggaggatttagaagataagatggagactagtgacattcagatcttctaccaagaagatccagaatgccaaaacctcagtgaaaattcatgtccaccatcggaagtgagtgatactaatttgtacagcccatttaagcctcggaactatcaactcgagttagctctgccagccatgaagggtaagaatacgatcatatgcgcacctacagggtgtggaaagacgttcgtttcccttttgatatgtgagcaccacctgaaaaagttcccgcagggccaaaaggggaaggtggtattctttgcaaaccaaatacccgtgtacgagcagcagaaatctgtgttctcaaagtattttgagagacatgggtaccgggttacaggcatttctggggctaccgccgagaacgtaccagttgagcagattgtcgagaacaacgacatcatcatactcacaccacaaatcctggtaaacaacctcaagaagggaacaattccctcactaagcatctttacactcatgattttcgacgagtgtcacaatacttccaaacagcacccttacaatatgatcatgtttaactacctagaccagaaattgggaggctcttctggcccactcccccaagtgattgggctgactgcaagtgtgggggtgggtgacgccaagaacaccgacgaagctctggattatatatgcaaactctgtgcctctctggatgccagcgtgatcgccactgtaaagcataatctcgaggaactggagcaggtcgtgtataagcctcagaaatttttcaggaaggtggaatcacgaataagcgacaagttcaagtacatcatcgcccagttgatgcgcgacactgagagcctcgcaaagcggatctgcaaggatttggaaaacctttcccagatacaaaatagagagttcggaactcagaagtacgaacagtggattgtaaccgtgcagaaagcctgcatggtctttcagatgccagacaaggatgaagagtcaagaatttgcaaagccttgttcctttatacatcacacctacgaaaatacaacgatgccctaatcatcagtgaacacgcgaggatgaaagacgcattggattacctcaaggacttcttctctaatgtcagagcagctggattcgacgaaattgagcaggatctgacacagcgttttgaggagaagctacaggaacttgagtcagtgagcagggatcctagtaacgagaatccaaagttggaggacctatgctttatcctccaagaggagtatcacctgaacccagaaaccataacaatacttttcgtcaagactagagccctcgtagatgcactgaagaactggattgagggtaacccaaagctgtctttccttaaacccggtattctgaccggacggggtaagaccaaccagaacacgggaatgaccctccctgcccagaaatgcatccttgacgctttcaaagcatctggggaccataatatattaatagcgaccagcgtcgcagacgaagggattgatatcgctcaatgtaacctcgttatactgtatgagtatgtcggaaatgtaatcaaaatgatccagacgaggggcagaggaagagcccgggggtctaaatgctttctactcacctccaatgctggtgtgatcgagaaagagcagatcaatatgtacaaggagaagatgatgaatgatagcattttgaggctccagacctgggatgaggccgtatttagggaaaaaatactgcatattcaaacccatgagaaattcattagagacagtcaggagaaacccaaacccgtgcccgataaggagaataaaaagctgctatgtcggaaatgtaaagcgctggcctgctacaccgccgatgtccgggtgatagaggagtgccattacacagttttgggagatgcttttaaagaatgctttgtgtctcggccacaccccaagcccaagcagttttcttcttttgagaagagagcaaagatcttttgcgccaggcaaaactgctcccatgactggggtattcacgtcaaatataaaacttttgaaatccctgttattaaaattgagtccttcgtggttgaagacattgctaccggagtgcagacattatattcaaagtggaaagacttccacttcgagaagatccccttcgatccagcagagatgtccaagtag

SEQ ID NO: 24676 - DNA, 987 bp, synthetic construct
  source 1..987: mol_type = other DNA; note = Synthetic coding sequence
atggacggcgaggacatccccgacttcagcagcctgaaggaggagacagcatactggaaggagctctcactcaagtacaaacagtccttccaagaggcgagggacgagctggtagaatttcaagaaggctcccgagagctcgaagctgaactagaagctcagctcgtgcaggccgagcagaggaaccgggaccttcaggcagacaaccaaaggctcaaatatgaggtggaggccctcaaagagaaattggagcaccaatacgcccagtcttataaacaggtaagcgttttagaggatgaccttagtcagactcgtgctatcaaggagcaactccacaaatacgtccgggagctggagcaggctaacgacgatctggaacgggctaagcgcgcgaccatagtgagtctcgaggacttcgaacagagactgaaccaagctatcgaacgcaacgccttcttagaaagcgagttagacgagaaagagagcctcctcgtgtccgtgcagcgactgaaggacgaggcgcgagatcttcgacaggagctggcagtgagggagagacagcaggaagtgaccaggaaatcagccccatccagcccaacattggactgtgagaagatggacagtgcggtccaggccagccttagcctgcccgctacccctgttgggaagggcactgagaataccttccctagccccaaggctataccaaacggtttcgggacaagcccacttacaccttctgcccgaatctctgccctcaacatagtcggcgacttgctgcggaaggttggggccctggaatctaaactggccgcgtgccggaactttgccaaggatcaggcatcccggaagtcgtacatcagcgggaatgtaaattgcggggtgctcaatggaaatggtactaaattttcaagaagcggacacacgtcctttttcgacaaaggacaggaaaaggtcatctttcccactctgttcatgggacagtag

SEQ ID NO: 24677 - DNA, 2898 bp, synthetic construct
  source 1..2898: mol_type = other DNA; note = Synthetic coding sequence
atggccctgctgtgcggcctgggccaggtgaccctgcggatctgggtgagtctccctagccaatctgaaaatggcattggttttttggcggcccgcgctttccttaggagcggaggcatggaagccctgaccacccagcttggacccggcagggaaggctcatcctctccaaacagcaaacaggaattacagccatatagtgggtcttccgccttgaagcctaatcaggtgggggaaacctccctctacggggttccaattgttagtttggttattgatgggcaggagcggctgtgtcttgcacaaatcagcaacacgctgctgaagaattattcctataatgagatacacaatcggagggtggcactaggcataacttgcgtgcagtgcactcctgtacagctggagattcttagaagggccggggctatgcctatttccagccgaagatgcggtatgatcacgaaacgggaagcagagcgcctctgcaaatcttttctgggagagcacaaacctcccaaactgccggagaattttgccttcgatgttgtgcacgaatgcgcttggggaagcagaggcagcttcatccctgccaggtacaattccagtcgtgccaagtgtattaaatgtgggtactgctctatgtatttcagtcccaataagttcatcttccacagtcacaggactcctgatgcaaaatacacccagcccgacgcggcaaattttaatagctggcgccggcacctgaagctgagtgacaaatccgccactgatgaactgtcacatgcatgggaggacgtgaaagccatgttcaacggcggcacaaggaaacgcacattttccctgcaagggggaggcggagggggggcaaatgggggaagcggggggcaagggaagggcggagccggcggggggggcggcggggggccagggtgtggcgcagagatggcacctggaccccccccacataagagcctccgttgtggcgaggatgaagctgccggaccgccaggaccacctcctcctcatccacaacgagggttaggactcgctactggagcgtccggtcctgcgggccctggtggaccggggggcggagcaggtgtgcggtcatatcccgttatacctgtccctagcaaaggctttgggctcctccagaagctgcccccaccgctttttcctcatccctatggcttccccaccgcattcgggctttgccctaaaaaggatgatccggtactgggcgcaggcgaaccgaagggtggtcccggaacaggctcaggtggggggggagcagggaccggtggtggggccggaggaccaggagcatcgcaccttccaccaggcgcaggggccggacccggcggaggggcaatgttttggggtcatcaacccagtggtgccgccaaagatgcagccgccgtggccgccgccgcagccgctgcgaccgtatatcctactttccccatgttttggcccgcggccgggtctttaccagtgcctagctatcccgccgcacaaagtcaggcgaaagctgtggccgctgcagtagccgctgcagcagcggcggcagccgctgccgctgggagcggcgcgcccgagcctttggatggcgcggaaccggccaaagagtccggcttgggagccgaggagcggtgtccctccgccctttcacgtgggccacttgacgaggacggaacagatgaggccttacctccgcccctcgcaccactaccccccccacccccacctccagctaggaaaggcagctatgtcagtgcctttcgcccggtcgtgaaggatactgagtctattgccaaattgtacggatccgcccgggaggcttatggggccggccccgctcgtggcccaggtcctggagccggctcaggagggtacgtatcccctgacttcctatctgaaggctcctcaagttataactccgccagccccgatgttgataccgcagacgaaccagaagttgacgtagagagcaataggttccctgatgacgaggatgcgcaagaggagacagaaccatcggcacccagcgccggaggcggacccgacggcgagcaacccaccgggccgccatcagccacgtcatccggagcagacggtcctgctaactctccggacggcggatccccacgcccccggagaagacttggacccccgcccgccggacgaccagcctttggtgacttggctgcggaggatctcgtgaggcgccccgaacgctccccgccgtcgggcggggggggctatgaattgcgcgagccatgtggccccttaggaggcccagcgccagccaaagtgtttgctcccgagcgagacgaacatgtcaagagcgcggctgtggccttgggaccagcggcctcctacgtgtgtaccccagaagctcacgagcctgataaggaagataatcactcccctgccgacgatctggaaactaggaaatcctaccccgatcagagaagcattagtcagccctcccccgccaataccgaccgaggagaggatggcctcaccctggacgtcacaggcactcatctggtcgagaaagacatcgagaatttggcccgggaagagctgcagaaactactgctggagcagatggagctgcgcaagaagctggaacgagagtttcagtccctgaaggacaattttcaggaccagatgaaacgtgaactggcctatcgcgaggagatggtgcaacagttgcagatcgttagagatacactctgtaatgagctggaccaagaacggaaagcaaggtatgctatccaacaaaagctcaaggaggcccacgacgctctccaccatttcagttgtaaaatgttgactccaagacactgtacagggaattgctcattcaagccgcccctcctgccttag

SEQ ID NO: 24678 - DNA, 1803 bp, synthetic construct
  source 1..1803: mol_type = other DNA; note = Synthetic coding sequence
atggccagcaaccacaagagcagcgccgcccggcccgtgagccggggcggcgtaggtctgacaggcaggcccccgtccggaatccggcccctgtccggaaatatccgggtcgctacagccatgcccccaggtactgctagaccgggctctagaggctgccctataggcaccggtggggttcttagtagccaaattaaagtggcacaccgcccagtaacccaacaaggattaactggtatgaagaccggcactaaaggccctcagcgccagatactggataaatcctattacctgggcttgctccgatccaaaatctccgagttaactacagaagtgaataaactccagaagggcatcgagatgtacaaccaagagaactccgtttacctctcctacgagaaacgggcagaaacactcgctgttgagattaaggaattgcagggacagctagccgactacaacatgctcgtggataaactgaacaccaacactgaaatggaggaggtcatgaacgactacaatatgctcaaggctcagaacgatagggaaactcagagtctggacgtgattttcacagaacgccaagctaaggagaaacagattcgcagcgtagaggaggagatcgaacaggaaaaacaagcaacagacgacatcatcaaaaacatgagttttgagaaccaggttaaatacctggaaatgaaaacaactaacgagaaactcctgcaagaactggataccttgcagcaacagttggactctcagaacatgaagaaagaatctctggaggccgaaattgctcattcacaggtcaaacaggaggccgtcctcctgcacgaaaagttatatgagcttgagtcccatcgcgatcagatgatcgccgaagacaagtcaattggctcacctatggaggaaagggagaaattgctgaagcagattaaggacgacaaccaggaaattgctagcatggagagacagctcacagatacaaaagaaaaaattaatcagtttatcgaggaaatcaggcagcttgatatggatctggaggagcatcagggggagatgaaccagaagtataaagaactcaaaaagcgtgaggaacatatggacacattcattgagacctttgaggagacaaaaaaccaggaactaaagcgtaaggcccagattgaggctaacatcgtggcactgctggagcattgttctagaaacatcaacaggatcgaacagatctcgagtatcacaaaccaggaactgaagatgatgcaagacgacctgaacttcaagtccaccgaggtacaaaagagccaaagcaccgcccaaaacctgacatccgatatacagcgccttcagctggacctccagaaaatggagttacttgaaagcaagatgaccgaagagcagcattcgctgaaatccaagattaagcaaatgacgaccgacctcgaaatctacaacgatctgccggctctgaagagttccggcgaggaaaaaatcaagaagctgcaccaggagcgaatgatactgtccacacaccgcaacgcctttaaaaagataatggaaaagcagaacatcgaatatgaggctctgaaaacccagttacaggagaacgaaacacactcccagctcaccaaccttgagaggaagtggcagcacctcgagcagaataattttgccatgaaggagtttattgcaacgaagagccaagagagcgattaccagccaatcaagaaaaatgtgacaaaacagatcgcagagtacaataaaaccattgtggatgccctccactctacaagcgggaactag

SEQ ID NO: 24679 - DNA, 582 bp, synthetic construct
  source 1..582: mol_type = other DNA; note = Synthetic coding sequence
atgctggtggccggcaacgaccgggtgcaggccgtgatcacccagatggaggaggtctgtcaaaccatagaggacaattctcgtcgccaaaaacagcttctgaatcaacgatttgaatccctgtgcgccgtgctcgaggaacggaaaggagagctcctccaggcactggccagggagcaagaggagaagcttcagagagtccgcggcctgattaggcagtacggggatcatctagaggctagtagtaagctggttgaatccgcaattcagtctatggaagaaccacagatggccttgtacctgcagcaagccaaagaattaatcaacaaagtaggcgcaatgagcaaagtggaactcgcgggtcggcccgaacccggctacgagtccatggagcaattcacggtacgggttgagcatgtggccgagatgctgagaaccattgacttccagccaggcgcctctggtgaggaggaggaggtggcccccgatggagaggaaggatctgcagggcctgaagaggagaggcccgacggccctctcggaccttacagtgcctacgtgtcgttgtgcggtgccccctag

SEQ ID NO: 24680 - DNA, 1077 bp, synthetic construct
  source 1..1077: mol_type = other DNA; note = Synthetic coding sequence
atgaacttcaccgtgggcttcaagcccctgctgggcgacgcccacagcatggataacttggaaaagcaactgatttgtcctatatgtctcgaaatgttctcgaagccagtcgtcatcctcccctgccagcacaacctttgtagaaaatgcgccaacgacgtcttccaggcctcaaaccccctgtggcagtcaagggggtctacaaccgtcagttcaggtggccgattccggtgtccttcctgtaggcatgaagtcgtacttgacaggcatggagtttacggtttgcagcgcaatctcttggtcgaaaacattatcgatatatacaaacaggaatctagccgccccttgcactcgaaggcggagcagcacctgatgtgtgaagagcatgaggaagaaaaaataaacatctactgcctgagctgtgaggtccctacttgctccctttgtaaagtgttcggcgcacacaaagactgcgaggtagctcccctgcccaccatatacaaaagacagaaaagtgaacttagtgacggaatcgctatgcttgtcgccgggaacgatcgggtccaggccgtgattacccaaatggaagaagtgtgccagacgatcgaagataattcgcgaaggcagaagcagctgctgaaccagcgatttgagtctctctgtgccgtgcttgaggagagaaagggagagctcctgcaggccctggcaagggagcaggaagagaaacttcaacgagtccgcggactcatccgacagtacggagaccacttagaggcttcaagcaagctcgtggagtcggcaatacagtctatggaagagccccagatggcattatacttgcagcaggctaaggaactaatcaataaggtcggtgctatgtcaaaagtggagctcgctggccgacctgagcccggatatgagtcgatggaacaattcacagtcagagtcgaacacgtggccgagatgttgcggacaatcgatttccagcccggcgccagcggcgaggaagaggaagtcgcaccggatggggaagaggggtccgccggacccgaggaggaacggccggacggcccgtag

SEQ ID NO: 24681 - DNA, 756 bp, synthetic construct
  source 1..756: mol_type = other DNA; note = Synthetic coding sequence
atggccgccagcaccatgagcatctgcagcagcgcctgcaccgacagctggagggtcgtggactgccccgaaagctgctgtgagccgtgctgttgcgcccccgcccctagtctgacgctggtgtgcacgcccgtgtcctgcgtgagtagtccttgttgccagacagcctgtgagccatcagcatgtcagtcgggatacacatcaagctgtactaccccctgctatcagcagagctcctgtcagcccgactgttgcacatcaagcccttgtcagcaggcttgttgcgtcccagtgtgctgtgtgccggtatgttgcgtcccggtttgcaacaagcccgtttgttttgtccccacctgctctgaatcgtctcctagctgctgccagcagagctcctgtcagccaacatgttgcacatcctcaccttgccagcaggcctgttgcgttcccgtctgcagcaaaagcgtatgttatgtgcccgtctgtagcggcgccagtactagttgttgtcagcagagcagctgccagcctgcttgttgcactgcctcgtgttgccggcctagttccagtgtgtcattattgtgccaccccgtgtgtaaatccacttgttgcgtgccagtccccagttgcggtgcctccgcttcttcctgtcaaccctcttgctgcagaaccgcctcttgcgtgtctcttctgtgtaggcccgtttgctccagaccggcatgctactcgctgtgtagcggacagaagagtagctgttag

SEQ ID NO: 24682 - DNA, 1128 bp, synthetic construct
  source 1..1128: mol_type = other DNA; note = Synthetic coding sequence
atggccgccagcaccatgagcgtgtgcagcagcgacctgagctacgggtctagggtgtgcctgccaggttcctgtgactcgtgttcagacagttggcaggtcgacgattgtcctgaaagttgctgtgagcctccttgctgcgccccctcttgttgcgcgcctgctccttgcctaagtctcgtctgcacaccagtgtccagagtatccagcccctgctgtcctgtgacatgtgagccctcaccctgtcagagtggttgcacatcctcttgcaccccttcttgttgccagcagagctcttgtcagcttgcctgttgcgcaagctctccttgtcaacaggcctgttgtatgccggtgtgctgcaagacagtgtgctgtaaaccagtttactgtgttcctgtatgttcaggagacagctcttgctgtcagcaaagctcctgccaatcggcctgctgcacctcatcaccttgtcagcaggcctgttgcgtgcccatatgctgtaaacccgtgtgctccgggatctctagctcgtgttgccagcagtcttcttgcgtaagttgtgtcagcagcccatgttgtcaggccgtgtgcgagccaagtccttgtcagtcgggatgcatttcgagctgtactcctagctgctgccagcagagcagctgccagcccgcctgttgcaccagctcaccctgtcagcaggcctgttgtgtgccggtgtgctgcaagccagtgtgctgcgtgccaacttgcagcgacgacagtggcagctgttgccagcccgcctgctgcactagctcccaatcccaacaaggatgttgtgtgccggtgtgttgcaagcctgtgtgttgcgtgccggtttgttccggcgctagttcctcttgttgtcagcaaagttcatgtcagcctgcttgctgcacaacctcctgctgcaggccttcctctagcgtttccctcctgtgccggcccgtttgccgccccacatgttgtgtcccagtgccgtcgtgctgtgcgccgacctcttcctgtcaagcatcttgttgcaggccggcaagctgcgtttctctgctgtgtcgccccgcgtgttcccgacccgcctgttgtggacccacttcaacacagaagagttcctgctag

SEQ ID NO: 24683 - DNA, 1587 bp, synthetic construct
  source 1..1587: mol_type = other DNA; note = Synthetic coding sequence
atggccacccgggtggaggaggccgcccggggccggggcggcggcgctgaggaagcaacagaagcgggccgaggcggaaggcgccggagcccccgacagaagtttgaaatcgggactatggaagaagcggggatctgtgggcttggggtgaaggccgatatgctgtgtaatagccagagcaacgatatcctgcagcaccaagggagtaattgcggcggcacatctaacaaacattccttggaagaagacgaagggagcgactttatcactgagaacagaaatctggtctcaccagcctattgtacccaggaatcgagagaggaaattccaggcggcgaagcccggaccgatcctcctgatggacagcaagattccgagtgcaatagaaacaaagagaaaacgctgggtaaggaagttttgctgttgatgcaagcgttaaacactctgagtacccccgaggagaagctagctgccctgtgtaagaagtacgctgacttgctcgaagagagccgctctgtgcaaaaacagatgaagatcctccaaaaaaaacaggcccagatcgtcaaagaaaaagtgcatttacaatcagaacattctaaggcaatattggccaggagcaaattggaaagcctgtgtagagaattgcagcgccacaacaaaactctgaaggaggaaaacatgcagcaagcgagggaagaggaagagaggagaaaagaggccacagcccacttccagatcacgctgaacgaaattcaggcccagctggagcaacacgatattcacaacgctaagctgcgacaggaaaacatagagcttggggaaaaactaaagaaattaattgagcagtacgcattgagggaggagcacattgataaagttttcaagcacaaagaattgcaacaacagctcgtcgatgctaaactgcagcagactacccagctgattaaggaggcagacgagaaacatcaacgagaaagagaattcttgcttaaagaggccaccgaatcccggcacaagtacgaacaaatgaagcaacaggaagtgcaattgaagcagcagctctctttatatatggataagttcgaagagttccagactaccatggccaagagtaacgaactctttaccacctttaggcaggaaatggaaaagatgacaaaaaagatcaaaaaattagagaaggaaactatcatctggcggaccaaatgggagaacaataacaaagccctgttacagatggctgaggaaaagaccgtccgggacaaagagtataaggccctgcaaattaagcttgaacggttggaaaagctgtgcagggctttgcaaaccgaaaggaatgagctcaacgaaaaggtagaggtgctgaaggaacaggtatccatcaaagctgctataaaagcggctaatcgcgatctcgccacgcccgtgatgcaaccatgtactgctctggactctcataaggaactgaatactagttcaaagcgcgccctgggcgcacacttagaagcggaacctaagagccagagatccgccgtgcaaaagccaccatccaccgggtccgcccccgcgatcgagtctgtcgattag

SEQ ID NO: 24684 - DNA, 399 bp, synthetic construct
  source 1..399: mol_type = other DNA; note = Synthetic coding sequence
atgcgggccagcccctgcatcagccagcccgccgccagctggcaccctcggcccagcgccctgaggcctacagctggaagcggcccagacacccgcaccccaggcacagtcgaggacggtagtgctccctgccccgccttccgctctccagctgtttcaccttgcggggaggaaccttgttgttttcaaatttctcctgccgaggaaaccctggaacttggcaggctcgtctcccctggaaattgtgatacactctccccccgtgccgctgggttttatgcctgccacgtgcggagcctgatcccatgccgttccaccaagggccggtggcctctcactgcatccgcagcaggtctaagccggcacgctcagtgtggcccttctctcggattgggctag

SEQ ID NO: 24685 - DNA, 1944 bp, synthetic construct
  source 1..1944: mol_type = other DNA; note = Synthetic coding sequence
atggccgagttccgggtgcgggtgagcaccggcgaggccttcggcgctgggacttgggataaagtctccgttagtattgtgggcacacgtggtgaatcccctccacttcccctggacaatctcgggaaggaatttacggcaggcgcggaggaggattttcaggttactctgcccgaggacgtaggtcgagtcctactgctccgcgtgcataaagcacctccagtgcttcccttgctaggtcccctggctcccgacgcctggttttgtcggtggttccaacttacacccccacggggcggacacctcctgttcccttgttatcagtggcttgaaggcgctggcacactagttctgcaggaggggactgcgaaagtcagctgggccgaccaccacccagtcctgcagcaacagagacaggaggaactgcaagcacggcaggagatgtaccagtggaaagcatacaaccccggatggccacactgtctggatgaaaagactgtggaagacctggagctcaacatcaagtattccacggctaaaaatgctaatttctacctccaagcaggcagtgcatttgccgaaatgaaaatcaaaggcctgctggacaggaagggactgtggcggtccctaaatgaaatgaaacggatctttaacttccgcaggacgcccgctgcagagcacgcttttgagcattggcaggaagacgcttttttcgcaagtcaattcctcaacggactcaatcccgtgctgatcaggcgttgtcactatctgcctaagaacttccccgtgacagacgccatggtggcaagtgtgctaggccccgggacttcgctccaagcggaactcgagaaagggtccttgttccttgttgatcatggcatcctttcgggcatccagactaatgtcataaatggtaagcctcaattttctgccgcaccaatgacgctgctctaccagagtccagggtgtggacccttgttgcccctggcaatccagttgtcacagactccaggccccaattcccccatctttttgccaaccgacgataagtgggactggcttctggccaagacctgggtcagaaacgcggagttttcttttcatgaagcactcactcacctgctgcactcccacttgctgccagaagtattcaccttagccaccctgaggcagttgccacactgtcacccactattcaagtctaccggaatcgggatagagggcttctctgaattaatccagcgcaatatgaagcagcttaattactcgttactctgcctgcccgaagatatcagaaccaggggagtggaggatattcccggatattactacagggatgatgggatgcagatatggggcgccgtcgagcgttttgtgagcgaaatcattggaatttattatccgtctgatgaatccgtgcaggacgacagagaattacaagcatgggtgagagagatcttctcaaagggctttctgaaccaggagtcctcgggaatcccatccagtctcgagactcgcgaagcccttgttcagtatgtgacaatggtgatattcacatgctctgccaagcacgccgccgttagtgcaggtcaattcgattcatgcgcatggatgcctaacttgccaccttccatgcagctgccccctccaacctcgaaagggctagccacttgcgagggatttatcgctaccctccctccagttaatgctacttgtgacgtgatcctcgctctctggctactgtctaaggagcccggggatcagcgacctcttggtacataccctgatgaacatttcacagaagaggcaccaagaaggagcatcgccacattccagtctcgcctggctcagatcagtagaggcatacaagagaggaatcagggcctggtactgccgtatacctatctcgatcccccactgatcgagaactctgtgtctatctag

SEQ ID NO: 24686 - DNA, 2031 bp, synthetic construct
  source 1..2031: mol_type = other DNA; note = Synthetic coding sequence
atggccgagttccgggtgcgggtgagcaccggcgaggccttcggcgccggaacttgggacaaagtgtccgtatcaatcgtgggtacccgaggcgaaagcccaccgttgcctcttgacaacctcggcaaggagtttacagctggtgccgaagaggattttcaggttacactccctgaagatgttggaagagttttactgctccgcgttcataaggcccctcctgtgctcccactccttgggcccttagcaccagatgcatggttctgtcggtggtttcagctgacccctccccgaggtggtcacttactttttccctgttatcaatggcttgagggggctgggactctcgtcctgcaagaggggacggccaaggtgtcgtgggcggaccatcatcctgtgctacagcaacagaggcaggaggagctccaggcaagacaggaaatgtatcagtggaaagcctacaaccccggttggccccactgtctggacgagaaaacagtggaagaccttgagctgaacattaaatattctaccgcaaagaatgccaatttttatctccaagcaggctctgcgttcgcagagatgaagatcaaggggctgctggacaggaaaggcttgtggcggtcactgaacgaaatgaagagaatctttaatttccgcagaacacctgccgcagaacatgcatttgagcattggcaggaggatgcctttttcgcttcccagttcttaaatggactgaatcccgtgctgatacgccgctgccattacttgcctaagaattttcccgtcacagacgctatggtcgcatccgtgctgggaccagggacgagcctgcaggccgagttggagaagggctctctgttcctggtggaccacgggatcctctcaggcatccaaacgaacgttatcaacgggaaaccccaattctctgccgcacctatgacactgctataccagtctcctggatgcggtcctctgctgccactggccatacagctttcacagacgcccggacctaacagcccaattttcctccctacagatgataagtgggattggttgctggcaaagacgtgggttaggaacgcggagtttagctttcatgaggcactgacccaccttctccatagccacttgttgcctgaagtctttaccctggcaactcttcggcaactaccccattgtcatcccctcttcaagttgctgatcccccacacccggtacaccctgcacataaacacattagcacgcgagcttctcatcgtgcctggacaggtcgtggatcgctcaactgggattggcattgagggcttctccgagctgatccaacgcaacatgaaacaactgaattacagccttctctgcctcccggaagatatcaggacccggggcgtcgaggacatccccggctattactatcgcgatgacggcatgcagatttggggcgccgtcgaaagatttgtgtcggagatcatcgggatatactatccaagcgacgaaagtgtacaggatgacagggagcttcaggcatgggtgcgggagatctttagtaagggcttcctgaatcaagaatccagcgggatcccttcatcactggagaccagggaagccttggtacaatacgtcactatggtgatcttcacttgtagtgccaaacacgccgccgtgtctgctggtcagttcgattcctgtgcctggatgccaaatttgcctccgagcatgcaactgccaccgcctactagcaagggtctggccacctgcgaagggttcattgccaccctaccacccgtaaatgctacctgtgacgtcatactagccttgtggctcttgtctaaagaacccggcgatcagcgtcccctgggcacttatccagacgagcactttaccgaggaggctcctaggcggagtatcgcaacattccaatcgaggttggctcaaatcagccggggcatccaggagcgaaatcagggccttgtcctgccttacacataccttgatccccctcttattgagaattccgtgagtatttag

SEQ ID NO: 24687 - DNA, 1665 bp, synthetic construct
  source 1..1665: mol_type = other DNA; note = Synthetic coding sequence
atggccaccagcgccgacagccccagcagccccctgggcgccgaggacttgctgtccgactcttctgaaccaccgggtctcaatcaggtttcctccgaagtcacatcccaactctatgcctccctgcgcttatcacgccaggcggaggctacagctagagcccagctttacctgcccagcacttcaccccctcatgaagggttggacggcttcgcccaggagctttctcgaagcctttcagtgggcctcgagaagaatttgaaaaagaaagatggttcaaagcacatctttgaaatggaaagcgttagaggtcagttgcaaactatgttacagacctcacgggataccgcgtacagagatcccttgattcctggggccggaagcgagaggcgggaggaggatagttttgactctgatagtacagcaaccctgctcaacactagacccctccaggacctcagcccctcatcgtccgcacaagcacttgaagagttgtttcctaggtacaccagtctgcggccaggcccccctctgaatccccccgactttcagggacttcgggatgcattggactccgagcatactaggagaaagcactgcgaacggcacatacagagtctccagactcgggtcctcgaactccagcagcagctcgccgtggctgtggcagctgataggaaaaaggacacaatgatagagcagctcgataaaacactcgcacgagttgttgaaggatggaatcgccacgaagcagagagaactgaggtgttgagggggctgcaggaggagcaccaagcggctgaactcacacgcagtaaacagcaggagaccgtgacccggctggagcagtctctttcagaggctatggaagccctgaaccgagaacaggagtccgccaggctccaacaacgggagcgagagacactggaggaggaaagacaggccttaacgttgcggctggaagcagagcagcagcggtgttgtgtgctccaggaggaaagggatgcagctagggccggccagttatcagagcaccgggagctggagacactcagagccgcactggaggaagagcgccaaacatgggcgcaacaagagcatcagctgaaggagcattatcaggcgctgcaggaggaatctcaggctcagctggaacgcgaaaaagagaagtctcagagagaagctcaggctgcctgggaaacccagcaccagttggctctggtgcagagtgaggtccgaaggctggaaggggaattagacaccgcccggagagaaagagacgcgctgcaactggaaatgtccctcgtccaggcccgttatgagagtcagaggattcagctcgagagcgaacttgctgtgcaactggagcagcgagtgactgagcgactggcccaggcccaagagtcttccctcagacaggccgcatcactgagagagcatcaccgtaaacagctgcaggacctgtccggtcagcatcaacaggaattagccagccaacttgctcagttcaaagtcgaaatggccgagcgtgaagagagacaacagcaggttgccgaggattacgaacttaggcttctcctgctggatccgccggcacctggtctgcgctctccgagacgaaggcgagggggatcgggcctttgccttccttggccgtggccttag

SEQ ID NO: 24688 - DNA, 2778 bp, synthetic construct
  source 1..2778: mol_type = other DNA; note = Synthetic coding sequence
atggccaccagcgccgacagccccagcagccccctgggcgccgaggaccttttgtccgactcctcagagccccctgggctcaaccaggttagtagcgaagtgacttctcagttatacgcgagcttacgactcagcagacaggccgaagcaaccgcccgggcccagttatacctgccttccacgagccctccacacgagggactggatggatttgctcaggaattgagccgaagcctttccgttgggcttgaaaagaatctgaagaagaaggacggctcaaaacatatcttcgagatggagagcgtgagaggccaactgcaaacaatgctgcaaactagcagagacacagcatatagagatccgctgatacccggtgccggatccgaacgccgggaggaagactctttcgatagtgactctaccgccaccctgctgaacaccagacccttacaggatctatccccttcctcctctgcccaggccctggaagaattgtttcccagatatacctcccttagaccagggccccccctgaatccaccggattttcagggactcagagatgcccttgactccgagcacacccgaaggaaacactgcgaacggcacatccagtcgctccagacccgagtcctggagcttcagcaacagcttgcagttgcagtcgcagccgaccgtaaaaaagatacaatgattgagcagctggataagaccctggctagggtggtcgagggctggaatagacacgaggcggagcgcacggaggtactccgcggtctgcaggaggaacaccaggctgccgagttaacaagatctaaacaacaggaaacagtgactaggttggaacagtcactgtctgaagccatggaggcattaaatcgagagcaggaaagtgctagactccagcagagggagcgagaaaccttggaggaagagagacaggcgctgaccctgcggctggaagcagaacaacaacgttgttgtgtgctgcaggaggaacgcgacgctgctagagccggacagctgtcagagcacagggagttggaaacccttagagccgcactcgaggaagaacgccaaacgtgggcgcagcaggagcatcagcttaaggagcactatcaggccctgcaggaggaatcccaggcccagttagagcgcgagaaagagaagagtcagagagaagcccaggcagcgtgggaaactcagcatcaattggctctggtgcaatcggaagttaggagactggaaggagagttggacactgctcgcagggaaagagatgccttacaattagagatgagtctggtgcaggcccgctacgagagtcagaggattcaactcgaatctgagctcgcagtccaattggaacagagggtgacagaaagactcgcccaagctcaggaatcctccttgcggcaggccgcatcattacgggaacatcaccggaagcagctgcaggatctgtctggccagcaccagcaagagctcgcatcccagctggcacaattcaaggtggagatggctgagcgggaagagcgacagcagcaggtagctgaagattatgagctgcggctggcccgtgagcaggcacgggtatgcgagctgcagtccggaaatcagcagctcgaggagcagcgagtagaactggtcgaaaggctgcaggcaatgcttcaagcccattgggacgaggccaatcagctcctatctaccactcttcctccaccaaatccaccagctccacccgcaggcccttcttctccaggcccacaggagcccgagaaggaagagcggcgggtgtggactatgcccccaatggcagtggcactgaaacccgtcttgcagcagtccagagaagctagggatgaactgcccggtgcgcctccagtgctctgctcttctagcagtgatttgtccctgctactaggtccatcctttcagtcgcagcactctttccaacccctcgaaccaaagcctgatcttacaagcagcactgctggcgcattctctgctctgggagcctttcatccagatcatagggctgaacgtcctttcccagaagaagatccagggccagacggcgagggcctccttaagcagggattgcctcccgctcaattggaaggcctcaagaattttctgcaccaattgctagagacggtgccacagaataacgagaacccctctgtcgatcttctgccccctaagtcaggacccctaaccgtgccatcctgggaggaagctccccaggtgccacgaatccctccccccgtccacaagactaaagtaccgttggctatggcctcctctcttttccgggttccagaacccccatcaagtcacagccaaggatccggtccctcctccggcagtcccgaaagaggaggcgacggcctcacctttccacggcagctgatggaggtttctcaattgctacgcctctatcaagcccgtggttggggcgcactcccagctgaggacttgctattatatctgaaacgccttgaacactcagggtacaagcccgggagaaaagaggaggggttcagcgggtggaagttagattatggtgaatggagcggcacagatggcaggggcgataatgtgccccgccgcaacacagattcaaggttgggggaaatcccccggaaggagataccgtctcaggccgttcctagaagactggctacagcccccaagaccgaaaaaccgcctgcacgaaagaaatctggacatccagctccttctagtatgagatcccgcggcggtgtttggagatag

SEQ ID NO: 24689 - DNA, 2961 bp, synthetic construct
  source 1..2961: mol_type = other DNA; note = Synthetic coding sequence
atgtacttctgctggggcgccgacagccgggagctgcagcggcggagaaccgccgggagccctggtgcagaactgctgcaggcagcctccggtgaaaggcacagcctccttcttttgaccaatcacagggtactcagttgtggcgacaactctcgcggccaactgggccgccggggagctcagagaggcgaattacctgagcctatccaggctcttgaaacgctgatagtagatctggtgagttgcggcaaagaacattcactggccgtttgccacaaaggccgcgtattcgcttggggggccggatctgaggggcagttaggcatcggggagttcaaagagatttccttcactcctaaaaaaatcatgacattaaacgatataaaaatcatacaggtctcctgcgggcactatcatagcttagcgctctccaaagattcacaagtcttctcctggggtaagaactcccacggacagttgggcttggggaaggagttcccttcacaagcttcaccacagagggtccgatccctggagggcattccccttgcccaggtggccgcaggtggagcgcacagcttcgctctcagcctctgtggaaccagtttcgggtggggtagtaactccgctggtcaattagccttatcagggagaaatgtgccagtgcagagcaacaagccactctccgtgggagcactgaaaaacctaggcgtggtctatatttcgtgtggagatgcccataccgctgttttaacacaagatggcaaagtgtttacttttggcgataatcggagcggacaactgggatacagccccactcccgaaaaacgaggtccccagctcgtggagagaattgatggactggtatcacagattgattgtggctcctatcatactctggcctatgtgcacactactggacaggtggtgtcctttggccatggcccatccgacacctctaagcctactcacccagaggcactgactgaaaacttcgacatctcttgcttgataagtgctgaggacttcgtggacgtccaggttaagcatatctttgccggcacatatgccaacttcgttactacacatcaggatacctcctcaacccgagcccctggaaagacattgccagaaatcagccggatatcccagtccatggccgagaagtggatcgccgtgaagagacgctcaacagagcacgagatggccaaatccgagattcggatgatcttctctagtcccgcgtgtctaaccgcgtcgttcctgaaaaaaagagggacgggtgagaccacctcaatcgatgtagacctcgagatggcaagagacacctttaagaaactgaccaaaaaggagtggatctcaagcatgattactacgtgccttgaggatgatctgttgcgcgctctgccgtgccacagtcctcaccaggaagcactctcggtgtttctcctattgccggagtgtccagtgatgcatgattcaaagaattggaaaaacctggtggttccttttgccaaagccgtctgcgagatgtccaaacagtcacttcaggtgcttaaaaagtgctgggcatttctgcaggagtcatctttgaaccctctcattcaaatgctgaaagcagctataatctctcaactgctccatcagacgaagactgagcaggatcactgcaatgttaaagccctgctcggtatgatgaaggagttgcacaaagtgaacaaagcgaattgtaggcttccagaaaatactttcaatattaatgagctgagcaaccttcttaacttttatattgacagggggcgccagctcttccgtgataatcacctcatgtccgagaaaaaagcatacatgctgatgcacgaaaccattctgcagaaaaaagatgaattccccccctccccccgtttcatcctccgggtacgcaggagccgcctcgtcaaagacgccctgcgtcagctctcccaggcagaggccactgatttttgtaaggtccttgtggtggaattcatcaatgagatctgcccggagagtggtggcgtctctagcgagtttttccattgtatgtttgaggagatgactaagccagaatacggcatgttcatgtatccggagatggggagttgcatgtggttccccgcaaagccaaagcccgagaagaagcgttattttttattcggaatgctttgcggactttctttgttcaaccttaacgtcgctaacctgccgttcccgctggccctttacaaaaaactgctcgaccagaaacccagcctggaggacttaaaagagctgtccccccggcttggaaagtcgcttcaggaggttctcgacgacgccgcagacgacatcggggatgcactgtgtattcgatttagcatccactgggaccaaaacgatgtggacttgatcccgaatggcatcagtatacccgtggatcagacgaataaacgggactacgtgtcgaagtacatagattacatcttcaacgtttctgtgaaagcggtgtatgaggaattccagaggggcttctaccgcgtctgtgagaaggagattctcagacacttttacccagaggagcttatgactgccattatcggcaacactgattacgactggaaacagttcgaacagaactcaaagtatgaacaaggctatcagaaatcacatccaaccatccagcttttctggaaggcatttcacaaacttaccttagacgaaaaaaagaaatttctgtttttcctcacaggtcgtgatagactccacgccagaggcatccaaaagatggaaattgtattccgctgccccgagacattctccgagcgtgatcatccaacttcgattacctgtcataacatccttagcctgccaaaatactccaccatggagcgcatggaagaggccctgcaagtggccattaataacaaccgcggatttgtgtctccaatgctgacacagtcgtag

SEQ ID NO: 24690 - DNA, 435 bp, synthetic construct
  source 1..435: mol_type = other DNA; note = Synthetic coding sequence
atgaccacccggcaggccaccaaggaccccctgctgcggggcgtgagccccacccctagtaaaatccctgtgagaagccagaagcggacaccgtttccaactgttacttcatgcgctgttgaccaggaaaatcaagacccacgaaggtgggtgcagaaaccccctctcaacatccagcggccgctcgtagacagcgcaggacccaggcctaaagcccggcatcaggctgagacgagtcagcgactggtcggaattagccagccccgcaacccacttgaggagttacgcccttcaccccggggacaaaatgttggtcccggacccccagcccagaccgtgctggtgcccgcaccgggcaagctttttgccctacgacgtagtccgttccccccagccaagtgccacctagctcggtgtcatgggctgtatttgtag

SEQ ID NO: 24691 - DNA, 327 bp, synthetic construct
  source 1..327: mol_type = other DNA; note = Synthetic coding sequence
atggccgacccccgggtgcggcagatcaagatcaagaccggcgtggtgaagagactggtgaaagaaaaagtcatgtacgagaaggaagcaaagcagcaagaggagaagatagagaaaatgagggcagaagacggcgagaattacgatattaagaaacaagccgaaatactccaggaatccagaatgatgatccccgattgccagagacgcctggaggccgcttacctggatctccaacgcatcctggagaatgagaaggacctcgaggaggccgaggaatacaaagaggcccgtttagttcttgattcggtcaaactggaggcttag

SEQ ID NO: 24692 - DNA, 1341 bp, synthetic construct
  source 1..1341: mol_type = other DNA; note = Synthetic coding sequence
atgcgggagtgcctgagcatccacatcggccaggccggcatccagattggcgatgcctgctgggagctgtactgtctggagcacggtatccagcccaacggggtggttctggacacgcagcaagatcagttagaaaacgccaagatggaacacacgaatgcgtcttttgacacatttttttgcgagacgcgcgctggcaaacatgtcccaagggctctcttcgttgacctggagcctaccgttattgacggaatacgcactggtcagcaccgaagcctgttccaccccgaacagttgctgtctgggaaagaagacgctgccaacaactacgctagggggcggtacagcgtgggttccgaggtgatagatttagtgttggaacggacccgcaaattggccgaacaatgcggcggcctgcagggatttctgatttttcgcagttttggaggtgggacggggagtggattcacaagcttactgatggagcgtttgaccggcgagtactccagaaaaacgaaactggaattctccgtctaccccgccccacgcattagcacggcagtcgtggaaccctacaatagcgtgctcaccacgcattctacaaccgagcatacagactgcaccttcatggtagacaatgaggccgtgtacgacatttgccacagaaagcttggtgtcgagtgcccttctcacgctagcatcaatagacttgtggtccaagtggtctcttctattacagcctctctccgtttcgagggcccgcttaacgtagacttaattgagttccagaccaatctcgtgccttacccccgtattcactttcctatgactgccttcgctcctatcgtcagtgctgacaaggcttatcacgagcaattctccgtgagcgacataacaaccgcctgctttgagagcagcaatcagctggtcaaatgcgatcccaggttggggaagtatatggcatgctgtcttctgtacaggggagacgtggtgcctaaagaagttaatgcagccattgcggccacgaagagccgacattctgttcagttcgtggattggtgccctactggcttcaaagtgggaattaacaacaggccccctaccgtgatgcctgggggggatctggcaaaggtgcaccgcagtatttgtatgttgtccaataccacagcaattgttgaggcctgggctcgcctagatcacaagttcgatctgatgtatgcaaagcgagctttcctacactggtacctcagggagggcatggaagaagccgagttcctggaggcccgtgaggatctggctgctctggagagagactacgaggaggtagctcaatctttctag

SEQ ID NO: 24693 - DNA, 873 bp, synthetic construct
  source 1..873: mol_type = other DNA; note = Synthetic coding sequence
atgggcagcagcaagaaggtgaccctgagcgtgctgagccgggagcagagtgagggtgttggcgcccgcgtgcggaggtccattgggcgtccagagctgaagaatctagaccccttcctgctcttcgatgaattcaaaggcggccgccccggcggttttcctgaccacccacatagaggctttgagactgtatcataccttctggaggggggatctatggctcatgaggacttctgtggtcacaccggaaaaatgaatccaggtgacttgcagtggatgactgctggccgcgggattcttcatgccgagatgccttgttccgaagagcctgctcacggtctgcagctgtgggtaaaccttcggagctccgagaaaatggtggaaccacagtaccaggagttgaagagcgaggagatcccaaaaccatcaaaggacggagtgaccgtcgcagtgatcagcggcgaagcactgggaattaagtccaaggtatatactagaacgcctacactctacctggatttcaaattggatccaggtgcgaaacactcccaacccattcctaaaggttggacatcattcatttacaccattagtggggatgtgtacattggcccagacgacgctcaacagaagatagagccccatcacaccgccgtgctgggcgaaggagactccgtgcaggttgagaacaaggatcctaaacggtctcacttcgtgcttatagctggcgagcctctgcgagagcccgtaatacaacatggccctttcgtgatgaatacaaacgaggaaatcagtcaggccattctggacttcaggaatgctaagaacgggtttgagagagctaagacctggaaatctaagataggcaactag

SEQ ID NO: 24694 - DNA, 873 bp, synthetic construct
  source 1..873: mol_type = other DNA; note = Synthetic coding sequence
atgggcagcagcaagaaggtgaccctgagcgtgctgagccgggagcagtccgagggcgtgggggcccgcgtcaggcggagcatcggccggcctgagttgaagaacctggacccttttctgctcttcgacgagttcaaagggggccgtccgggtggcttccctgaccaccctcaccgtggttttgagactgtttcctatctcttggagggcggatctatggcacacgaggacttttgcgggcacacaggaaaaatgaatcccggcgacctgcaatggatgacagcagggaggggaattcttcatgcagagatgccttgcagtgaagaacccgcccacggactccagctgtgggtgaatctacgctcatctgaaaagatggtggaacctcagtaccaggagctgaagtctgaggagatccctaaaccttcaaaggacggcgtcactgtggccgttatcagcggagaagctctagggataaagtccaaagtgtacacaaggactccaactctgtacctcgacttcaaactggatcctggcgccaagcacagccagcccatacccaagggctggacatcttttatatacacaattagcggcgacgtgtatatcgggccagacgacgcacagcagaagatcgagcctcaccatactgccgttctgggagaaggcgattcagttcaagtagagaataaggatccgaagaggagtcacttcgtcctcattgctggcgagcccctgagagaaccagtgatccaacacgggcccttcgtcatgaacaccaatgaagagattagtcaggccatattggacttcagaaatgctaagaatggatttgagagggccaagacatggaaatctaaaattgggaattag

SEQ ID NO: 24695 - DNA, 1200 bp, synthetic construct
  source 1..1200: mol_type = other DNA; note = Synthetic coding sequence
atggacttcttcagcagccacctgctggccgacagcagcagccccgcaacgaattcttcccataccgacgctcatgagatcctggtgagtgatttcctcgtcagtgacgagaacctgcagaagatggagaacgtgctcgacctgtggagtagcggactgaaaacgaacataatctcggaactaagtaaatggaggctcaatttcatagactggcatcgtatggaaatgagaaaggaaaaggagaagcatgccgcacacctgaagcagttgtgcaatcagattaatgagttaaaagaacttcaaaagacattcgaaatttcgatcggccggaaggatgaagtgattagctcattgtcgcatgcaattggcaaacagaaagaaaagattgaactcatgagaaccttcttccactggagaatcgggcacgtgcgcgcccgccaggacgtgtacgagggaaaactggcagaccaatattaccagagaacattgctgaagaaagtttggaaggtctggcggagtgtggtgcagaagcagtggaaagatgtcgttgagagagcgtgccaggcccgcgctgaggaagtttgtatacagatctcaaacgattatgaagcgaaagtggccatgctctcgggcgccctggaaaacgcaaaggccgagatccagcgcatgcagcatgaaaaagaacatttcgaggattccatgaagaaggcgttcatgcgtggagtctgcgcactcaatctggaggccatgactatcttccagaatcgtaacgacgccgggatcgatagcaccaataataagaaagaggagtatggtcctggtgtccaggggaaagagcattcagcccatttagaccccagcgcccctccaatgcctttgccggttaccagtccactcttaccaagcccgccggctgcagtgggtggcgcctcggccacagccgtgccaagcgctgccagtatgaccagcaccagagctgctagcgcttcttctgtgcacgttcccgtgagtgctctcggtgctggctccgccgcgactgctgcaagcgaagagatgcaaactatcccacaggccacggcagcgaagtaccccagaaccatccaccccgaatcttcaacttcagctagtcgctctttggggacaaggtctgcccacactcagtccctcacaagtgtgcactctattaaagtggtggattag

SEQ ID NO: 24696 - DNA, 729 bp, synthetic construct
  source 1..729: mol_type = other DNA; note = Synthetic coding sequence
atggccgccgtgaaggccagcaccagcaaggccacccggccctggtatagtcaccctgtgtatgcacgctactggcagcactaccatcaggcaatggcctggatgcagtcccatcacaacgcctatcgcaaggctgtcgaatcttgtttcaacttaccttggtatctcccgagtgccctgctgccccagtcatcctacgataatgaagccgcctaccctcaatctttctatgaccaccacgtcgcctggcaggactatccctgcagctcctcacactttcgccggtccggacagcacccccggtattcctcccgtatacaggcgtccaccaaggaggaccaagcactgtctaaagaagaagagatggagactgaatcagatgctgaggtcgaatgtgatctctctaatatggagatcacagaagaactcagacagtactttgctgagactgagcgccaccgggaggagcgccggcgtcaacagcagctggacgctgaacggcttgactcgtacgttaatgctgaccacgatctgtattgtaacacccgccggagcgtcgaagccccaacagagcgtccgggagaacgccggcaagccgagatgaagaggctatatggggacagtgccgccaagattcaggcaatggaggccgctgtgcagcttagtttcgataagcattgtgacagaaagcaaccgaaatattggccggtgatccctctgaagttctag

SEQ ID NO: 24697 - DNA, 1482 bp, synthetic construct
  source 1..1482: mol_type = other DNA; note = Synthetic coding sequence
atggagcggagccccgacgtgagccccggccccagccggagcttcaaggaggaattactgtgtgccgtgtgttatgatcccttcagagacgctgtgacgctgcggtgcggacacaacttttgcagaggctgcgtgagccgttgctgggaggttcaggtcagccccacatgtccagtgtgtaaggaccgagctagccctgccgatctgaggacaaaccacactctcaataatttagtcgaaaagttgttgcgagaggaagcagagggagcaaggtggactagctatcggttttcccgtgtgtgcaggctgcatcgtggtcaattaagcttattttgtctggaggacaaggagcttctgtgctgctcatgccaggccgatccaaggcatcaaggacaccgagtccagcccgtgaaggacacggcgcatgacttccgggttcgcagtctgattgcagaggaacgccgaaattttttacctacccaccagtggatagttacaaaaacccgcctgcagacgtcttcgcccaacctgcagagccggaggcaggggcaggtgcaagagcatggggcttgtaccgccggagaagggcaggggctcctgggtcacgccgccctgctggatgctatggccgaggagacgaggcaaaaacagctgctggcagacgaaaaaatgaagcagctgaccgaggagaccgaggtgttagcccacgagattgaaaggttgcaaatggaaatgaaagaggatgacgtgagttttctgatgaaacacaaatcaagaaaacgccgtctcttctgcaccatggagcctgaaccagtccagcccggaatgcttatcgatgtatgcaagtatctcggatctctgcagtaccgcgtatggaagaagatgcttgcatccgtcgaatctgtgccgttttcttttgatcctaataccgccgccggctggctatcagtatccgatgacctgacaagtgtcaccaatcacggatacagagtacaggtggagaaccctgagagatttagctctgccccttgcctcctcggttctagggtattttcccaaggttcccacgcctgggaggtggccctcggcgggctccagtcatggcgcgtcggggtggttagagtacgacaggactctggggctgagggccactcccactcctgttatcatgacaccagatccggattctggtacgtctgccgaactcagggggtggagggcgaccattgtgtgactagcgaccccgctacttcccctctggtgctcgccatcccacgaagactccgggtggaactcgaatgcgaggagggggagctgtccttctacgacgctgagaggcactgccacctatacacctttcatgcaaggtttggagaggtgcgaccatacttttatctcggcggagctcgaggcgccggcccacccgaacctttaagaatatgtcctctgcacatctctgtaaaagaagagctcgacggatag

SEQ ID NO: 24698 - DNA, 1473 bp, synthetic construct
  source 1..1473: mol_type = other DNA; note = Synthetic coding sequence
atgaacctggccgagatctgcgacaacgccaagaagggccgggagtacgctctgctcgggaattatgactccagtatggtttattatcagggagtcatgcagcagattcagaggcattgccaatccgttagggatcctgctattaaggggaagtggcaacaagtgcgccaggagctgcttgaggagtacgaacaggtgaagtcaattgtgtctacactcgagagcttcaaaatcgataaaccgccagatttcccagtgtcatgtcaagatgagccatttcgagatccagcggtgtggccccctcccgtcccagccgagcatagggcgcccccacagatccggaggcccaacagagaggttagaccattacgcaaagagatggctggagtaggcgctaggggtcctgttggacgcgcacaccccatctcaaagtcagaaaagccgtccaccagtcgggacaaggactaccgcgcacgcgggagagatgataaaggccgcaagaacatgcaagatggcgcatctgacggtgagatgccgaagttcgacggggctgggtacgataaagatctggttgaagcacttgaacgcgacattgtgtcacgaaacccctcaattcactgggacgatattgccgacctggaggaggcgaagaaacttcttcgggaagccgtggtgctgcctatgtggatgccggacttcttcaaggggatacgcaggccctggaaaggcgtactgatggtgggccctcccggtaccggcaagaccatgctggccaaagccgtggccacagaatgcggtacaacattttttaacgtgagctcctcaacactcacatccaagtacagaggcgaaagcgagaagctggtccggctgctgtttgaaatggctcgcttttatgctccgaccaccatatttattgacgaaattgactctatttgttctcgccggggcacctcagatgagcacgaagcatcccggcgggttaaatccgagttgctcattcagatggacggagtggggggcgctctcgagaacgatgacccctccaaaatggtcatggttctcgcagccacaaacttcccctgggatatcgacgaagctcttcgccgccgacttgaaaagagaatatacataccattgcccactgcaaagggccgggccgagctattgaagataaacctgcgggaagtggaactcgacccagatatccagctggaggacattgctgagaagattgagggctacagcggtgccgatataacaaacgtatgcagggacgcatccctgatggctatgaggcggagaataaatggactgagtcctgaggagatcagggccctgtccaaggaggaactacaaatgcccgtgacaaagggggacttcgaactggctctcaaaaagattgccaaaagtgtatcggctgccgacctggagaagtatgagaaatggatggtggagtttggaagtgcttag

SEQ ID NO: 24699 - DNA, 1473 bp, synthetic construct
  source 1..1473: mol_type = other DNA; note = Synthetic coding sequence
atgaacctggccgagatctgcgacaacgccaagaagggccgggagtatgccctgctgggcaactatgattctagtatggtctactaccagggagtaatgcagcagatccagaggcattgccagtccgttagagacccggctatcaagggtaagtggcagcaggtgaggcaagagcttttagaggaatatgaacaagtgaaaagcatcgtatctacactagagagtttcaaaatcgataaacctcctgattttcctgtttcctgccaggacgagccattccgggatcccgccgtgtggcctccgccagtgccggccgaacatcgtgctccgcctcaaatcagacgccctaacagggaggtccggccccttcgcaaagaaatggcaggagtgggcgccagggggcccgtgggccgcgctcatcctatctcaaagagcgaaaaaccatctacatctagagataaagattatcgggcccggggcagggatgataagggccgaaaaaatatgcaggatggagcctctgacggggagatgccgaaattcgatggtgccggttacgacaaggacctcgtcgaggcgctcgagagagacattgtctccagaaacccttctatccactgggacgacatcgccgatctagaggaagcgaagaagctgctccgcgaggccgtcgtgctgccaatgtggatgcctgacttttttaagggcatccgacgaccatggaagggggttctgatggtggggccacccggtacaggtaaaacgatgctggccaaagcggtcgcaactgaatgcgggactacattcttcaatgtgagctcctctacactgacatccaagtatagaggggagagcgaaaaactggtaagactactgttcgagatggcaagattctacgcccccacaacaatatttatagatgagattgattccatatgcagtcgtcgcggaactagcgacgaacatgaagcatccaggcgcgtgaaatcggaactgctcattcagatggacggcgttggtggcgcgctggaaaacgatgacccatctaaaatggtcatggtcctggccgcaaccaactttccttgggatatcgacgaggccctgaggcggagattggaaaaaaggatctacataccgctgcccacagccaaaggtcgcgccgagctgttgaaaattaatctgcgcgaggtggagctggatccagatatacagctcgaggatatcgcagagaagatcgaaggttacagcggcgccgatataacgaacgtgtgccgggatgcttcacttatggctatgcgcagacggatcaatgggctctctcctgaggagataagggctctgtccaaagaggagctccagatgcctgtgactaagggagatttcgagctggccctgaagaaaattgccaaaagtgtctccgcagcggatctggaaaaatacgaaaagtggatggttgagttcggaagcgcttag

SEQ ID NO: 24700 - DNA, 1068 bp, synthetic construct
  source 1..1068: mol_type = other DNA; note = Synthetic coding sequence
atggacttcatcttccacgagaagcaggagggcttcctgtgcgcccagcactgtctgaacaacctgctgcagggggagtatttttcacctgtggaactggccagcatcgcccaccaacttgatgaagaagagcgcatgaggatggccgagggaggtgtaacttccgaggagtatctggctttccttcagcagccatccgagaatatggacgacacgggattcttcagtattcaagtgatctcgaatgcactgaagttctggggactggagattatccattttaacaacccagagtatcagaaactggggatcgatcctattaatgaaaggagcttcatttgtaattacaaacagcattggtttacaattcgcaagttcgggaagcactggtttaatctgaattcactgttggccgggccagagctgatctctgacacgtgtctggctaacttccttgcccgactgcagcagcaagcatacagtgtctttgtggtgaaaggtgatctgcctgattgtgaagccgaccagttgctgcagatcatttcggtagaggagatggatacaccaaagctgaatggcaagaagctcgtgaaacagaaggagcatcgcgtctataagactgtgttagagaaagtgagtgaggaatctgacgaatccgggacatctgaccaggacgaggaggatttccagcgagctcttgaattaagtaggcaggagacaaatagagaggatgaacacctaagaagcaccatcgagctgtccatgcagggatcgtccggtaacacaagccaggatctacccaagacatcctgcgtcacaccagcatccgagcagcccaaaaaaatcaaagaagactacttcgagaagcaccagcaggaacagaagcagcagcaacagcaatctgatctgcctggacactcgtcctatctccacgagaggccaacaacaagtagccgggccattgaatccgacttgtctgatgacatttcggaggggaccgtgcaggctgcagtcgacaccatccttgagatcatgcgtaagaacctcaaaatcaagggtgagaagtag

SEQ ID NO: 24701 - DNA, 5910 bp, synthetic construct
  source 1..5910: mol_type = other DNA; note = Synthetic coding sequence
atggccgcccggagcgcccccagctgccacctgcggctggagtgggtgtatggatacagaggacaccagtgtcgaaacaatttgtactacactgcagccaaagagatcgtgtacttcgtcgcaggcgtgggggtggtttatagtccacgggaacaccggcagaagttctacagaggccatagcgacgatattatatcgctggcccttcaccccgagagggtactggttgccaccggacaggttgggaaggaaccctacatttgcatttgggattcttacactgtgcagactatcagcgtgttgaaagacgtacatacccatgggatcgcctgtttagctttcgacctggacggacagcggctggtctccgtgggactcgacagcaaaaatgcagtgtgcgtgtgggactggaagcgcggaaaaatgctgtccatggctccgggccatactgatcggatcttcgacatatcttgggacctctatcagccaaacaagctcgtgtcttgcggggtcaagcacataaagttctggtcgctgtgcggcaacgccttaacacctaagcgaggagtgttcgggaaaaccggggacttacagactatactgtgtttggcctgtgcccgtgatgagctgacatatagtggggcgctaaacggcgatatctatgtctggaagggcatcaatctgatacggacgatacagggagcgcacgccgcgggtatctttagtatgaatgcatgtgaggaaggattcgcaactggcggacgggatggatgtatcaggttgtgggacctgactttcaagcccattaccgtgatcgacttacgggagactgaccaggggtataagggactttcagtaagatcagtctgctggcgcggggaccacatcctggtggggacgcaggattcagaaatctttgaaatcgttgttcaggagcgtaataaaccctttttgatcatgcagggccattgcgagggagaattgtgggcactggccgtccatcccactaagcccctggccgttacagggagtgacgacaggtcagtgcgtatctggtcgttagtggaccacgctttaattgctaggtgtaatatggaggagccgatcagatgtgctgccgtgaacgcggacgggatccacctggctctgggcatgaaggacggctcattcacagtcctcagagttcgggacatgactgaagtggtgcatatcaaagaccggaaagaagccatacatgagctgaaatattcccctgacggaacctatctggctgttggatgcaatgacagctcagtagatatatacggggtagcacaaagatacaagaaggtcggggagtgcctgggctctctgtcattcatcacccacttggactggagtagtgactctcgttacttgcagaccaacgacggtaatggcaagaggttgttctataggatgccagggggaaaggaggtcaccagcacagaggagattaagggggtgcactgggcctcatggacttgcgtttccggcttagaagtcaatgggatctggccaaaatactcggacattaatgatataaattcagtggatggcaactatattgggcaagtcctggtgactgccgacgactatggaattatcaaactgtttcgctacccgtgtctaaggaagggcgctaagtttagaaaatatattgggcatagcgctcatgtgaccaatgtgcgttggtcccacgattaccagtgggtcatatcaatcggcggcgccgatcatagtgtttttcaatggaaattcattcctgaaaggaagttgaaggacgctgtgcacatcgccccccaggagtcacttgccgactcacacagtgatgagagtgattcagatctgtccgacgttcctgagttagactccgagattgagcaggaaacccaacttacttacagaagacaagtctacaaggaggatctcccccagcttaaggagcaatgcaaggaaaagcagaagtcagctacttccaaaaggcgggaaagggcgcccggaaactccattcgcctgcactttgtccatggctaccgtgggtatgactgtagatcaaacctcttttatactcagatcggcgaaatcgtgtaccatgtcgcagccgtgggtgttatctacaaccgccagcaaaatactcagagattctacctgggacacgacgatgatatcttatgcctgactattcaccctctgaaggattatgtcgccaccggacaggtaggccgtgaccccagcatacacatatgggataccgagacaatcaaacccctcagcattctgaaagggcatcatcagtacggggtgagcgcagtcgatttttctgcggatggaaagaggctggcctcagtaggtatagatgattcgcataccgtcgtcctttgggattggaagaaaggggagaagctgtccattgcccgcggcagcaaggacaagatttttgtggtcaaaatgaacccttatgttccagacaaattgatcacagccgggataaaacatatgaagttctggagaaaggccggaggggggctcattggacgcaagggttacatcggcactttaggcaaaaatgacactatgatgtgcgccgtgtacggctggacagaggaaatggctttttcgggaacgtccacaggcgacgtgtgtatttggcgcgacatttttctggtcaagactgtgaaagctcacgacggtccagtcttttcaatgcacgccctggagaaaggctttgtgaccggagggaaagacggtattgtggccctgtgggacgactcattcgaacgctgcctgaaaacctacgcgatcaaacgggcggccctggctcctgggtccaaagggttgctgttggaagacaaccccagtatccgcgccatctctctaggacacggccacattctggtcggcactaagaacggcgaaatcctggaagtggataagtccggacccattacactactcgtacagggccatatggagggcgaagtttggggcctggcaacacatccttatctgcccatctgtgcaacagtctctgacgacaagacactcagaatttgggacttgtcaccttctcactgtatgctggccgtcagaaaactcaagaagggggggcgttgctgttgtttctctcccgatggcaaagctctggctgtgggactgaatgatgggagctttttgatggccaacgccgatacacttgaggacctggtgtcatttcatcatcgaaaggatatgatctccgacatcaggttttcccctggatctggaaagtatttggccgttgccagccatgatagtttcattgacatctataatgtgatgagttctaaaagggttggtatctgcaagggcgcgacatcatacattacacatattgattgggatattaggggcaagctcttgcaggtgaatacaggagcaaaagagcagctttttttcgaggcaccccggggcaagaagcagacgattccttcagttgaggtagagaagattgcgtgggcctcttggactagtgtgctggggctgtgttgtgaggggatttggccagtaattggcgaagttacggatgtaaccgcaagctgtttgacgtctgacaaaatggtgttagccactggtgatgatctcgggtttgtgaaactgttcaggtatcccacaaaaggcaagttcggaaagttcaaaagatacgtggctcacagcacccacgtcaccaacgtaagatggacctacgatgattcaatgctggttactctgggcggtactgacatgtcgttgatggtctggaccaatgaaatggaaggctatagagaaaaacgcccatgtgattccgaggagtctgacattgattctgaagaagatggagggtacgattctgacgtgactcgggagaatgaaattagctacacgataagagccctcagcacaaacattcgtcccatgttaggaatcaaaccgcatttgcagcagaaagagccttctattgatgagcgccctcctgtgtcacgcgcacctccccagccagaaaaactgcagacaaacaacgtggggaagaaaaagcgccctattgaagacctggtgttagagctgatatttgggtacaggggccgggattgcagaaataatgtgcattatctgaatgacggagacgatattatctaccatactgcttcagtcgggatactgcacaacgtggctacagggtctcaatctttctaccaggaacacaatgacgacattttgtgtctgaccgttaatcagcatcctaagttcattaacatcgtagcaacaggccaggtgggagatagcgctgatatgtctgccaccgctccatctattcacatctgggacgccatgaacaagcagaccctgtccatactgaggtgctaccattcgaaaggggtttgcagcgtctctttcagcgcaacaggaaagctgctgctaagtgtgggattggatcccgagcacacaatcaccatatggcggtggcaggaaggagcaaaaatcgcatctagggctggacacaatcagcggatctttgtagcagagttccgaccagatagtgatacacagttcgtgtctgtgggcgtgaaacacgtgaaattctggacgttggccggccgggctttactgagtaaaaagggtctgctctccactctggaggacgccagaatgcaaacgatgctggccattgcttttggagccaacaacctcacgttcaccggtacaatcagcggggacgtttgtgtttggaaggatcatattctgtgtaggatcgtcgccagagctcacaatggcccagtgtttgcaatgtataccactctaagagacggcttaatcgtcaccggcggcaaagagcggccatccaaggagggaggcgccgttaagttatgggaccaggaacttcggaggtgtcgcgcatttcgtttagaaaccggtcaggccaccgactgcgtgagaagcgtgtgtagggggaagggtaaaattctcgttggcacccgtaacgctgagatcatcgaagttggggaaaaaaatgccgcctgtaacattcttgtgaatggccacgtcgacggaccgatttggggccttgctacccatccatcaagagatttctttctgtccgcggctgaggatgggaccgtgagattgtgggatattgctgacaagaaaatgctgaacaaagtgaacttgggacacgctgcccgcaccgtgtgttacagccccgagggtgatatggtcgcaatcggtatgaagaacggcgaatttatcatcctcctggtgagcagtctgaaaatatggggcaaaaagcgtgataggcgctgcgccattcacgatatacgcttcagccccgactccagatacctggccgttggctcctccgaaaactcagtggatttttatgatcttacgctcggccccacattaaatcgtattagctactgcaaggatatcccgtccttcgtgatccagatggatttctccgctgactctagctacctccaagtttcctcaggctgctataagaggcatgtgtatgaagtcccttccgggaaacacctcatggaccatgcagctattgatcgaattacatgggcgacctggacatccatcctcggagatgaggtgcttggtatttggagtagacatgctgagaaggcggatgtgaactgcgcatgcgtgagccactctggaatctccctggtaaccggcgatgacttcgggatggttaagctgttcgattttccctgccccgagaagtttgcaaaacacaaaaggttccttggtcattcaccacacgttactaacatccggtttacttccggggacagacatgtggtgtcagctgggggtgacgactgctcgcttttcgtgtggaaatgcgtacacacgccgcactag

SEQ ID NO: 24702 - DNA, 1146 bp, synthetic construct
  source 1..1146: mol_type = other DNA; note = Synthetic coding sequence
atgcccctgcaggtgagcgactacagctggcagcagaccaagaccgcggttttcctatccctgccactcaagggggtttgcgtcagggacaccgatgtgttctgcaccgagaattacttgaaagtgaacttcccccctttcttgttcgaagctttcctgtacgcgcctatcgatgatgagagcagtaaggccaagatcggaaatgataccattgtttttacactttataaaaaggaggctgcgatgtgggagacactctctgtgactggagttgataaggagatgatgcagcgcatccgggagaaaagcattctgcaggcacaagaacgtgcaaaagaggcaaccgaggcaaaagctgcagctaagcgtgaagaccagaagtatgctttgagcgtgatgatgaagatcgaggaggaggagcgtaagaagattgaggacatgaaggaaaatgagaggatcaaggccaccaaggcgttagaggcctggaaggaatatcagcgcaaagcggaagagcagaaaaaaatccaacgtgaggaaaagctgtgtcagaaagagaaacagattaaagaagaacgtaagaagattaagtacaaatcacttacgcgcaacctcgcaagtagaaacctcgccccaaagggacgcaacagtgaaaacattttcactgagaagctgaaagaagattcgatcccagccccaagatcagttggctccatcaaaatcaactttacgccccgtgtattccccactgcacttagagaatcccaggtcgccgaggaggaggaatggctgcacaagcaggctgaggctcgcagggcgatgaacaccgacatcgcggagctgtgtgaccttaaagaagaggagaagaatcctgaatggttgaaggataagggcaataaactgttcgccacagagaattacttggccgccataaacgcctacaacttggccattcgtttgaacaacaaaatgcccttgttgtacctgaaccgagctgcctgccacctgaaacttaagaatctccataaggccattgaggatagcagcaaggaattctgttccctagagggaatagagtgccaggcctctgaacccaagctcagccaccacataccttctgatctgcacgtgtacattcaaatggcgtag

SEQ ID NO: 24703 - DNA, 1344 bp, synthetic construct
  source 1..1344: mol_type = other DNA; note = Synthetic coding sequence
atggccggcgccggcggcggcaacgacatccagtggtgcttcagccaggtgaaaggggccgtggatgacgacgtcgccgaagccgatatcatctctacagtggagtttaaccatagcggtgagctactcgccacaggagataagggtgggcgagtggttattttccagcaggagcaggaaaacaagattcagtcacactcccgcggagaatataatgtctactctacattccagagtcacgaaccagagttcgattacttgaaatctttggagatagaagaaaagatcaacaagattcgatggcttccacaaaagaatgctgcccaatttctgctaagcacaaatgacaagaccattaagctgtggaaaatcagcgagcgcgataagagaccggagggatataatctgaaggaggaagacgggcgctatcgcgatcccaccacggtaacgaccctccgcgtgcccgtgttccgtcccatggaccttatggtggaagcctcacccagacgaatttttgccaacgcccatacctaccacatcaatagtatatcaatcaactctgactacgaaacctacctctcggcagacgacttgagaataaacctgtggcacttggaaatcaccgatcgctctttcaacatcgtcgacatcaaacccgcaaatatggaagagctgacagaagtgattaccgctgcggagttccatcccaactcttgtaacactttcgtatattcttctagcaagggtacgataagactgtgcgatatgcgagcttctgccctctgcgataggcattctaagctgtttgaggaacccgaggacccctccaatcggtcttttttctcagagattatttcttcaatcagcgacgtcaagttcagccactcaggtcgttatatgatgaccagagactacctctcagttaaaatctgggatctcaacatggaaaatcgacccgtggaaacctatcaggtacatgaatacttacgctctaagctctgctctctgtacgagaatgattgcatattcgataagttcgagtgctgttggaatggttcagactccgtggtgatgaccggatcttacaacaatttttttcgaatgtttgatcgaaacaccaaacgagacattacactcgaagcttctcgagaaaataataaaccccgcaccgtcctgaagccccgaaaagtctgcgctagcggtaaacgcaaaaaggacgagatcagcgtggatagtctggatttcaacaaaaaaattctgcataccgcatggcaccccaaggagaacatcatcgctgttgcgaccacaaacaatttgtatatctttcaagataaagtcaattag

SEQ ID NO: 24704 - DNA, 1413 bp, synthetic construct
  source 1..1413: mol_type = other DNA; note = Synthetic coding sequence
atggacctgcgggaccaggagctggtgaagatcgtgggcatccggtacgaggtggggccacccactttatgctgcctcaaattggcattcatcgaccccgcgaccgggaagctcatggacaagagtttcagtattagatatcacgacatgcctgacgtcatagacttcctagtgttgcggcaattttatgatgaagctcgccagaggaactggcagtcttgtgatcggtttcggagcattatcgatgacgcctggtggtttggtaccgtgctctcacaagaaccctaccaacctcagtaccctgatagccacttccaatgctacattgtccggtgggacaatacggagatagagaagctttcgccttgggacatggagccgatacccgataatgtggatccgccggaagagctgggagcctcaatcagtgtcacaaccgacgagttagagaaattgctgtataagccgcaggccggggaatgggggcagaagtcgagagatgaggaatgtgatcggatcatcagtggtattgatcagctcctcaatcttgatatagcagccgcatttgcagggcccgtggacctgtgcacttacccaaagtattgtacggtcgtcgcatatcccacagatttgtatacaatcaggatgcgacttgtcaatagattttacaggaggctaagtgcactggtatgggaagttcggtacattgagcataacgcccggacattcaatgaacctgaatccgtgattgcccggtccgccaagaaaattacagatcagttattaaaatttatcaaaaatcaacactgtacaaatatctctgagctctccaacacctcagagaatgatgagcagaacgccgaggacctcgatgacagcgacctgccgaaaacgtcgagcggtcgacgtagggattatcgtgatataatcgatacacctatggactttggcaccgttcgggagacacttgatgctggcaactatgacagccccctggagttctgtaaggacatccgactcatattctccaacgccaaagcatacacccctaataaacgctcaaaaatctactccatgacgctgcggctatctgctctgttcgaggaaaagatgaaaaaaatcagctcagacttcaagattgggcagaaatttaacgaaaagctccggagatcccagcgattcaagcaaaggcagaactgcaaaggcgattcacagcctaacaagtccattagaaaccttaaacccaaaagactgaagtctcaaaccaagatcatacctgaattagtcggaagccctacccagtccacctctagccgtaccgcatatctggggacacacaaaacttcggctggcatttcctctggagtgacctccggtttatttagattctcccgaattattaggaaggaatag

SEQ ID NO: 24705 - DNA, 516 bp, synthetic construct
  source 1..516: mol_type = other DNA; note = Synthetic coding sequence
atgtgcggccgggcccccccccccgagatcaccggccgggagcccgggtaccacttggtggagcaaagctgctggctgaagccactgcccagaaatttgggccactcactcttctggactgtttggaaaccgcgccccgtttcccaattggtggcccagcaggtgacccagcagtttgtgccaccaacccagagtaagaaggaaaaaaaggataaggtcgaaaaggagaagtctgagaaggaaacaacctcaaaaaaaaacagtcataagaagacccgccctaggctgaaaaatgtagaccgttccagcgcacagcatctcgaagttaccgtcggggacctcacagtgatcatcactgatttcaaagaaaagaccaaaagcccacctgcatccagcgccgcaagtgcggatcagcattcacagtcaggctccagctctgacaacaccgagaggggtatgtctagatcttctagccctcgcggcgaagcatccagcttgaatggcgaaagccattag

SEQ ID NO: 24706 - DNA, 417 bp, synthetic construct
  source 1..417: mol_type = other DNA; note = Synthetic coding sequence
atgggcgacaagaagagccccacccggaagccccggcccgtgagccagctagttgcccaacaggttacgcagcagtttgtcccacccactcagtctaagaaggagaagaaggataaggtggagaaggagaaatccgaaaaggagactacctccaagaaaaactcccataaaaaaacgcggcctcgactgaaaaacgtggacaggagctcagctcagcatttagaggtcaccgtgggtgacttaactgtcatcatcaccgacttcaaggaaaaaactaagtcgccccctgcctcttctgcggcctctgctgaccagcactcccagagtggcagctcctctgataatactgaacggggtatgagtaggagctcatcccccagaggcgaggcctcatctctgaatggcgaaagtcactag

SEQ ID NO: 24707 - DNA, 1047 bp, synthetic construct
  source 1..1047: mol_type = other DNA; note = Synthetic coding sequence
atgggccactgctgctgcaagccctacaactgcctgcagtgcctggataagaccaacgaatccgccctcgtgaaagagaaggagctgtcgatagagctcgccaatattagagatgaggtcgcatttcatacggcaaagtgcgagaaacttcaaaaagaaaaagaagagctcgaacgccgtttcgaggacgaggttaagaggctggggtggcagcagcaggctgaactgcaggagctcgaggagcggctgcagctccagttcgaagctgagatggcccgtcttcaggaggagcacggtgaccagttattaagcattcgttgtcagcatcaggaacaagtggaggatctcactgcaagccacgacgccgcgttgctcgagatggaaaacaaccataccgtggcaataaccatcctacaagacgaccatgaccacaaggtgcaggagttgatgtccactcacgaactggagaaaaaagaacttgaagaaaattttgaaaagttaaggctgagcctgcaggatcaggtcgacaccttaacatttcagagccagtctctgcgggatagggcacgccgtttcgaggaggcgttgcgcaagaataccgaggaacagttggagattgctcttgcaccataccagcacttggaggaagacatgaagtccctcaagcaggtgttagaaatgaaaaatcagcagatacatgaacaggagaaaaaaattcttgaacttgaaaaactggcagagaaaaatatcatcctggaggaaaagatccaggttctacaacagcaaaacgaagatctcaaggcgaggattgatcagaacactgttgtcaccaggcaactctctgaggagaacgcaaacctgcaggaatacgtagagaaggagacacaggagaagaagcgcctttcacggactaatgaggagcttctctggaagctgcagacaggcgacccaacttcaccaatcaaactctcacctacctccccggtttacagaggctccagctccgggcccagttccccagccagggtgagcacaactccgcggtag

SEQ ID NO: 24708 - DNA, 2664 bp, synthetic construct
  source 1..2664: mol_type = other DNA; note = Synthetic coding sequence
atgaacagcggcggcggcctgcccccccccagcgccgccgccagcccttcatcttccagcctggccgccgcagtggctgtcgtggcaccccctggtgtaggaggcgttcctggaggcgcagcggttggagtcaagctcaaatactgccggtactatgctaaggataaaacgtgcttttacggagaggagtgtcaattcctgcacgaagacccagccgcaggtgccgctcctgggttaggcttgcacagcaactctgtaccgttagccctggctggtgctcccgtggccggctttccccccggggccgtagcgggaggaggtgctggaccaccacccggacctaaaaaacctgaccttggcgatccaggaacaggcgccgccgcaggtgggggcggaagttcaggcgggctcgatggccctcgcctcgccatccctggtatggatggcggcgcgcttaccgatacatctttaaccgacagctacttcagcacctcatttatcggcgtcaacggctttggtagccccgtcgaaacaaaatatcccctgatgcagaggatgacaaacagctcatcctctcctagcctgctcaacgactctgcaaagccctatagtgctcatgaccccttaacctcgccagcttcgtctctattcaatgacttcggcgctctgaacatcagccagagaaggaagcctcggaagtatagacttggcatgttggaagaaaggctggtgcctatgggctctaaggcaaggaaagcaaaaaacccgatcggttgtttagcggatcgatgtaaatcaggggtgcccataaacatggtgtggtggaatcgcgtgactgagaacaatttgcaaaccccgaatcccaccgccagcgagtttattccgaaaggcgggagcacatctcgcctgtctaatgtttcacagagcaacatgtcagcattcagccaagtcttctctcaccccagcatgggttctcctgctacagctggcttagccccaggtatgtccctgtcggcaggtagcagcccgctgcacagtccaaaaattacacctcacactagtccagccccgagacggcgatcacacacccccaatccagcttcctatatggtcccctctagcgcatcaacttccgtcaacaatccggtgagccagactcctagttcggggcaggttatacaaaaagagactgtgggcggcaccacttatttctataccgatacgacccccgctcctttgaccgggatggtgttcccgaactatcatatataccctccaaccgcgcctcatgtcgcctatatgcagcctaaggctaatgccccaagcttcttcatggccgacgagcttaggcaggaattgattaatcggcacctgattactatggcacagatcgaccaggcagatatgccagctgtccccactgaggtggactcatatcatagcctgtttccgttggagcccctcccacctccaaatcgtatccagaagagttcgaattttgggtatatcacatcttgctataaggccgtcaattcaaaggatgacctgccttactgtttacgaagaatccacggattccgcctggtgaacactaaatgcatggtcctagtcgacatgtggaaaaagatccagcacagtaatatagtgacactgagagaggtctttacaaccaaggcctttgctgaaccaagcctggtgttcgcctatgactttcatgctggcggggaaacaatgatgagccggcacttcaacgaccccaacgcagacgcctatttcaccaagcggaagtggggtcaacacgagggaccgctccctcgccagcacgcgggactcctgcccgagagcttaatttgggcctacattgtccagctcagctccgctctgaggaccatccacacggcaggtctggcatgccgtgtgatggatcctaccaagatcctgataacaggcaaaactcgtctaagagtcaattgcgttggcgtgtttgacgtgctgacgtttgacaattcccagaataacaacccattggctctcatggcccagtaccagcaagccgacctgatcagtctcggcaaggtcgttttggctctggcctgcaactcacttgccggtatccaacgggagaacttacagaaggccatggaactcgtaacaatcaattacagctctgacctgaaaaacttaattctgtatctgctcaccgatcaaaatcgaatgcggagtgtcaacgatatcatgcccatgatcggagcaagattttatactcagctcgacgcagctcaaatgcgaaatgacgtcatcgaagaagacctagcaaaagaggtacagaatggccgtctattccggctgctggccaagttgggcaccattaatgaaagacccgaatttcagaaggaccctacatggagcgaaaccggggataggtatttgttgaagctctttcgtgaccatctgtttcaccaggttactgaggcaggagccccatggatagacttaagccacatcatatcatgtcttaacaaattggatgctggagttccggagaagatttcgctcatctcacgggacgagaagagcgtgcttgttgtgacgtattctgacctgaaaagatgcttcgaaaatacttttcaggagttgatcgccgctgccaacggccagttgtag

SEQ ID NO: 24709 - DNA, 1710 bp, synthetic construct
  source 1..1710: mol_type = other DNA; note = Synthetic coding sequence
atggccaccctggtggtgaacaagctgggcgccggcgtggacagcgggcgccagggctcaagaggcacagctgtcgtgaaagtacttgagtgcggggtgtgtgaagacgtcttttcactccaaggcgataaagtgcccaggttactactctgtggccatacggtctgccatgattgcctcacgcggctgcccctgcacggtcgcgcaatcaggtgtccatttgatagacaggtcaccgacctgggcgattcgggggtatggggcctaaagaagaattttgcactgttagagctactggaaaggctgcaaaacgggcccatcggccagtatggtgccgcggaagagtccatcgggatatccggcgaaagcatcatccggtgtgacgaagacgaagctcacttggcctccgtgtactgtactgtctgtgccacgcacctatgtagcgagtgttcccaggtgacgcactctacaaaaactctcgccaagcataggagggtacctctggccgacaaaccccacgagaaaactatgtgctcccagcaccaggtgcacgctatagagtttgtttgtctggaggaggggtgtcagacatcacccttaatgtgttgtgtctgtaaagagtatgggaagcatcagggccacaagcacagtgtcctcgagcctgaggccaaccagatccgcgcttcaatcttagatatggcacattgcatacggactttcacagaagagatatctgattactctagaaaattagtgggaatcgtgcagcacatcgaaggcggagaacagatagtcgaagacggcataggcatggcccacaccgaacacgttcctggcactgccgaaaacgctaggtcttgtatccgtgcatatttctacgatctgcatgaaactctttgcagacaagaggagatggccctgtcagtggtagacgcgcacgtgagagaaaagctgatctggcttcggcagcaacaggaggacatgaccattttgttgtcggaggtgtccgccgcatgcctgcactgtgagaagactctgcagcaggacgactgtcgtgtggtcctggcaaagcaggaaataactcgtctgttagaaacattgcagaagcagcagcaacagtttaccgaggtggcagaccatatccagttggacgcctctatccccgtcaccttcactaaggacaacagagtgcatataggcccaaaaatggagatcagggttgtgacattaggactcgacggagccggcaagacaaccatcttgttcaaattgaagcaagacgaatttatgcagcctatacccacgatcggcttcaacgtcgaaacagtagaatacaagaacctgaagttcaccatctgggatgtgggcgggaagcacaaactaaggccgctgtggaagcattactaccttaatacacaggcagttgtgtttgtggtggattccagccaccgggataggatctcagaggctcattcagagttggctaagctgctcacagaaaaggagctcagggacgcgctcctgctcattttcgcaaataaacaagacgtagccggcgcattatcggtggaggagattacagagctgctgagcctacataaactttgttgtggaagaagctggtacatccagggctgcgacgccaggtcggtgttccaaattatttgtgatcagtacaccggcaaggaagtggtcacagagaaaggatag

SEQ ID NO: 24710 - DNA, 2061 bp, synthetic construct
  source 1..2061: mol_type = other DNA; note = Synthetic coding sequence
atgggccggatccaccaggccatggtgaccagcctgaacgaggacaatgagtctgtaaccgtggaatggatagaaaatggcgacacgaagggcaaggaaatcgatcttgagtccatatttagcctaaatcctgacttagtgccagatgaggagattgaacccagccccgaaacacctccaccccccgccagctcagccaaggtaaataaaatcgttaagaaccgcagaaccgtagctagtatcaagaacgatccccccagccgtgataatagggtggttggtagcgctcgggcacggccctcacagttcccagagcagtcttccagcgcccagcaaaacggctccgtgtcagatataagccctgtgcaggctgcgaaaaaggagttcggccctccaagtcgtagaaaatcgaactgtgtgaaggaggtcgagaaactgcaggagaagagggaaaaacgcaggctacaacagcaagaactgcgcgagaaacgcgcacaggatgtggacgccacaaacccaaattatgaaatcatgtgcatgatcagagactttaggggatctctcgactaccgcccgctgactactgctgaccccattgatgagcatcgaatatgtgtttgcgtaaggaagcggcctctgaacaaaaaagaaacccagatgaaggacctcgatgtgataaccatcccatcaaaggacgtggtcatggttcatgagcctaagcaaaaggtggatttgacacgctacctagagaaccaaacttttaggttcgattacgcctttgacgatagtgcccctaacgagatggtgtaccgctttactgcgcggccacttgtggaaacaatcttcgagcgggggatggccacatgttttgcctatggacagaccggctcgggcaagacacatactatgggcggcgatttttcaggaaaaaatcaagactgttcaaaaggcatatacgctctggccgcccgcgacgtctttctgatgttgaagaagcctaattacaagaagttagagttgcaggtctatgcgacatttttcgaaatatatagcggaaaagtgttcgacctcctgaatcgtaaaacgaagctcagggtgctcgaagatggaaagcaacaggtacaggtggtggggctgcaagagcgcgaggtgaagtgtgtggaggacgtgcttaagctgatcgacatcgggaactcctgtaggacctcaggccagaccagcgcaaatgcccatagttcacgtagccacgcagtcttccaaatcatcttacgcaggaaaggaaagctgcacggtaagttctcccttatcgatctggcaggcaatgaaaggggcgcggacaccagtagcgcagatagacaaactcggctggaaggagccgagattaacaagagtctgctggccttgaaagaatgtatcagggccctgggtcgcaataaacctcacacaccttttagggccagtaagttaacccaggtgcttcgcgactcttttatcggagaaaactctaggacatgcatgattgccaccatttccccagggatggcttcatgcgaaaataccctaaatacgcttcgctacgctaatagggtgaaggaactcacggtggatcccacagccgccggtgatgttagacccattatgcatcacccccccaatcaaattgatgacctggaaacccagtggggcgtcggatcttcgccccagagggacgacttgaagctcttatgcgaacaaaacgaggaagaggtgagtccccagctgttcacctttcacgaggctgtgagtcagatggtggagatggaagaacaagtagtagaggaccacagagctgtttttcaggaaagcatcagatggctggaagacgagaaggcacttttagaaatgactgaggaggtggactatgacgtcgatagctatgctacacagctcgaggccatcctggaacaaaaaatagatatccttacagaactgcgcgacaaagtgaagtctttccgtgccgccctccaggaggaggagcaggccagtaagcaaattaatcctaaacgcccaagggccctttag

SEQ ID NO: 24711 - DNA, 618 bp, synthetic construct
  source 1..618: mol_type = other DNA; note = Synthetic coding sequence
atgagcgtggaccccatgacctacgaggcccagttcttcggcttcacaccacaaacctgtatgcttagaatctatatcgcattccaggactacctatttgaagtcatgcaggccgtggagcaggtaatattaaagaagttagacggcattccagattgtgacatcagtccagttcagatccgcaagtgtacagagaagttcttatgcttcatgaaaggtcattttgataatcttttctcaaagatggaacagctatttctgcagctcattctccggattcccagtaatatccttcttcctgaagataagtgcaaggaaaccccttacagcgaggaagatttccaacacctgcagaaggagattgagcagcttcaggaaaaatacaagaccgagctgtgcacaaagcaggcactccttgcagagctggaggaacagaagatcgtgcaggcgaagctgaagcagaccctcaccttctttgacgagctgcacaatgtgggcagagaccatgggacctcagactttagggagtctttggttagtttggtgcagaactccaggaaactacagaacatccgggacaacgtggaaaaggagtcgaaaaggctgaaaatcagttag

SEQ ID NO: 24712 - DNA, 1866 bp, synthetic construct
  source 1..1866: mol_type = other DNA; note = Synthetic coding sequence
atggtgctgtgccccgtgatcggcaagctgctgcacaagcgggtggtcctcgcatccgccagccccaggagacaggagattctgtctaacgctggcctgaggttcgaagtggttccatccaaattcaaagaaaagttagacaaggcaagctttgctacaccttatggatacgccatggagaccgcaaagcaaaaggcgctggaagtcgctaaccggctctaccagaaggacctgcgggcacccgacgtggtcatcggtgcggacaccatagtcactgtgggcggattgatcctggaaaagccagtagacaaacaagatgcttacagaatgctttcacgactgagcggccgagagcattctgtgtttaccggcgtcgctatcgtgcattgcagctccaaggatcaccagttggacacccgggtgtccgagttctatgaggaaaccaaggtgaagttctcagaactgtctgaggagctgctttgggaatacgtacactcaggtgaacccatggacaaagctggcggctacggaatccaggccctcgggggaatgctagtcgaatcagttcatggtgacttcttaaacgtcgtgggctttcccctcaaccatttttgtaaacagctggtgaagctgtactaccctccaaggcccgaggatctacggcggtctgtaaagcacgattccatccctgcggccgatacattcgaagatctgtcagatgtggaaggaggcgggtctgaacccacgcagagagacgctggttctagggacgagaaagcggaagccggggaggcaggccaagccaccgccgaggcggaatgccaccgcacgcgagagaccctgcctccttttccaacccggctcttggaattgattgagggttttatgctgtctaagggactgttgacagcttgtaagttaaaggtgttcgatctgctgaaggacgaggctccacagaaagctgccgacattgcatctaaggtggacgcttccgcttgtgggatggagcgcctactggacatctgtgccgccatgggattgctggaaaaaacggagcagggctactctaacacggaaacggctaatgtctacctcgcaagcgatggcgaatattccctgcacggtttcatcatgcataataatgacctcacctggaatctgtttacttaccttgaattcgccatccgcgaaggcactaatcagcatcaccgagctctggggaagaaagctgaggacctattccaggatgcctattatcagagcccagaaactagactgcgatttatgagggctatgcatggaatgactaagttaactgcatgccaagtggccactgcttttaacctatcccgattctccagtgcctgtgatgtgggcggctgtacaggggccctggccagagagctagctcgtgaatatccaaggatgcaagtaaccgtgtttgacctgccggatataattgagctcgctgcacattttcaaccgccaggacctcaagcggtgcagatccacttcgcggcaggtgattttttcagggaccccctgccatcagccgagctgtacgtgctgtgtcgaattcttcatgattggcccgacgacaaggtgcacaagcttcttagtcgtgtggccgaatcatgcaagcccggggctggtctcctgctcgttgagacacttctggatgaggaaaaacgggtggctcagagagcacttatgcagtctttaaatatgctggttcagacagagggaaaggagagatcacttggcgaataccaatgtcttctggaactccacggcttccatcaagtccaggtggttcatctgggcggtgttctggatgcgatcttagccacgaaggtggctccatag

SEQ ID NO: 24713 - DNA, 2541 bp, synthetic construct
  source 1..2541: mol_type = other DNA; note = Synthetic coding sequence
atgctgttcaccgtgagctgcagcaagatgagcagcatcgtggacagggacgatagttctatatttgacggccttgtggaggaggacgacaaggataaggcgaaacgggtctccagaaacaaaagcgagaaaaaacgccgcgatcaatttaacgtcttgatcaaggaactgggttcaatgctccccggaaacgccagaaaaatggacaaaagcactgtccttcagaagtcaatcgacttcttacgaaagcacaaagaaatcacagcccagagcgacgcttccgagattagacaagattggaaacctacattcttaagtaatgaggagttcacacagttaatgcttgaggcactggatggtttctttctggccatcatgacggatggctctattatctatgtcagtgagagtgtgacaagcctgctagaacacttgccttccgatctcgtcgatcagagcatattcaattttatcccagagggggagcacagtgaggtgtacaaaatattgtcaacacatcttcttgagtcagattccctaacacccgagtacctcaagagcaagaaccagctggagttttgttgtcacatgctgagaggcactattgaccctaaggagccttcaacctacgaatacgtaaagttcatcggcaatttcaagagtctgaactcagtgtcttcctcagctcacaatggcttcgaggggactattcaaaggacacatcgacccagctacgaagatcgtgtgtgcttcgtcgccacagttcggctcgccaccccacagtttattaaggagatgtgtactgtcgaagagcccaacgaagaattcacgtctagacacagtcttgagtggaaatttctgttccttgatcacagagcacctcccattataggatatctgcctttcgaagtgctgggcacctctggatacgattattatcatgtggatgatttggagaacctcgctaaatgtcatgagcatttgatgcaatacggtaagggaaagagctgctactaccgattccttaccaagggccagcagtggatctggctacagacacactactatataacctaccaccaatggaacagtcgccccgagtttatagtctgtacccacactgtggtttcttacgcagaggtgagagcagaacggcggagagagttgggaattgaggagagcctgccggaaaccgctgcagataaaagtcaggacagcggttccgataacaggattaacactgtcagtctcaaggaagctttagagcgctttgatcactctcctaccccttcagctagctcccggtcctccagaaagtcctcacacaccgccgtatcagacccgagcagtacccctacaaaaattccgaccgacacatccacccccccccgtcagcacttacccgcacatgagaaaatggtgcagcgaagatctagtttctcctctcagtccataaactcacaaagtgtgggaagttctctcactcagcctgtgatgtcccaggctacaaatctgcctatcccccagggaatgtcccagttccagttctcggcccagctgggagcaatgcagcacctgaaggaccagctcgagcaacgaaccagaatgattgaagctaatatacacagacagcaagaggaacttaggaagatacaggaacagctgcagatggttcatgggcaaggattgcagatgtttctgcagcagagcaatccaggtcttaatttcggcagcgtgcaactgtctagcggaaatagttcgaacatccagcagctcgcacccataaatatgcagggacaggtggtccctactaaccagatacaaagtggaatgaataccggccacatcggcacgacacagcatatgattcagcagcaaactctgcagtcaactagcactcagagccagcagaatgtgctatccggccacagtcaacagactagcttgccgtcccagacacagagcacccttactgccccattgtacaatacgatggtgatctcacagccagctgccggctccatggtgcagattccatcttcgatgccgcagaacagcacccagagcgccgcagtgacaactttcacccaggataggcagatacggttttcccaggggcaacagttggtgactaaactggttaccgcaccagtggcatgtggggccgttatggtccctagcacaatgcttatggggcaagtggtgaccgcgtacccaaccttcgcaacacagcagcagcagagccagacgcttagcgtgacccagcagcaacagcagcagtcatctcaagaacagcagttgactagtgtacagcaaccctctcaggcgcagctgacccagcctccacagcagtttctacagacgtcccggctgctgcacgggaatcccagtactcagttgatactcagcgctgctttcccactgcaacagtcaacctttccccagagccaccaccagcagcatcaatcacagcagcagcagcagctctcaaggcatagaaccgacagcctccccgacccatccaaggtgcagcctcaatag

SEQ ID NO: 24714 - DNA, 1818 bp, synthetic construct
  source 1..1818: mol_type = other DNA; note = Synthetic coding sequence
atggtgctgtgccccgtgatcggcaagctgctgcacaagcgggtggtgttggccagtgcctctcccagacgccaagagatccttagtaacgctggtttgcgattcgaggtggtgcctagcaagtttaaggagaagctggacaaggcaagttttgccacaccttatggttacgctatggagaccgcaaaacagaaggcgctggaggtggctaacagactgtaccagacggtagggggccttatcttggagaagcctgttgacaaacaagatgcatacaggatgctctccaggcttagcggcagggaacacagcgtctttacgggcgtagccatagttcactgctcttccaaagatcaccagctcgatacccgggtttctgagttttacgaagagacaaaggtcaagttctccgaactgtctgaggagctcctgtgggaatatgttcactccggtgagcccatggataaagccggggggtacggtattcaagcccttggtggcatgctcgtggagtctgtccacggcgattttctgaacgtcgtgggctttccacttaaccatttttgtaagcagctggtgaagctgtattatcctccacggccagaggaccttagaagatcagtcaaacatgattcgattcctgccgctgataccttcgaggatcttagtgacgtggaaggcgggggcagtgagcccacccagcgcgacgcaggcagccgagatgaaaaggccgaggctggtgaagccggacaggctactgcggaagccgaatgtcacaggacccgtgagacgctccccccttttccaacccgcctcctagagttgatcgaggggttcatgttgtctaaagggctgctcactgcttgtaagcttaaggtattcgacctgctgaaagacgaagccccacagaaggctgcggatatcgctagtaaagtggacgcctctgcttgtggcatggaaaggctcctggacatctgcgcagcgatgggcctgctagagaaaactgaacaggggtactccaacaccgagacagccaatgtctacctggcatcagatggcgagtactccctgcacggattcattatgcacaacaatgatctgacgtggaatttatttacatatctcgagttcgcaatcagggaagggaccaaccagcaccaccgagcactgggcaagaaggcggaggacctgtttcaggacgcttactatcagagcccagagactaggttgagattcatgcgggccatgcacgggatgaccaagctgaccgcttgccaggtggcaaccgcttttaacctctcccgttttagtagcgcatgtgacgtcggaggttgtaccggtgcccttgccagggagctggcaagggagtacccccggatgcaggtgacagtctttgatctgcccgacatcatcgagctcgccgcacacttccagcccccaggacctcaggccgtgcagatccatttcgctgctggtgatttttttcgagaccccttgccttcggccgaactgtacgttctgtgtcggatcctgcacgactggcctgatgacaaggtgcacaagttactgtcgagagtcgccgaaagttgtaagccgggcgctggtctccttttagtggaaaccctgctggacgaggaaaagagggtcgcccaacgcgctctgatgcagtccctcaatatgctagtccagaccgaggggaaagaaagatctctgggagagtatcaatgcctgctggagctccatggctttcatcaggtccaggtggtccacttggggggcgttctggacgcaatcttagcaaccaaggtagcaccttag

SEQ ID NO: 24715 - DNA, 696 bp, synthetic construct
  source 1..696: mol_type = other DNA; note = Synthetic coding sequence
atgaccgtgggcaagagcagcaagatgctgcagcacatcgactaccgcatgaggtgcatcttgcaggatggtagaattttcatcgggaccttcaaggcatttgacaagcatatgaatttgatcctgtgcgactgcgatgagttccgcaaaatcaaaccgaagaactcaaaacaggccgagcgagaggagaaaagggtcttggggctggtgttattaaggggagaaaatctcgtttcgatgaccgttgaggggccacctcccaaggacacaggcatagcgcgcgtccccctggctggagcagccggaggccctggcattgggcgggctgctggaagggggattccagcaggggtgcccatgcctcaggcaccagctggattagccggccctgtgcgcggggttggtggcccctctcagcaagtgatgacccctcagggcagaggcactgtggccgccgccgccgcagccgcaaccgccagtattgctggcgcccccacacagtacccaccaggtcggggcggcccaccaccaccaatgggtagaggagcacccccacccgggatgatggggccccctcccgggatgcgacctccaatgggcccccccatgggaattcccccaggacggggaaccccaatggggatgccgccacctgggatgcgccctcccccacccggaatgaggggtttgctgtag

SEQ ID NO: 24716 - DNA, 855 bp, synthetic construct
  source 1..855: mol_type = other DNA; note = Synthetic coding sequence
atgtggcggggcctggccctggcccgggccatcggctgcgccgcccggggccgggggcagtgggcggtgcgcgccgctgactgcgcccaatccggacgccatccggggcccgccgtcgtgtgcggccggcggctcatttccgtgctcgagcagataaggcacttcgtgatgatgccggaaatcaatacaaaccatctggataaacagcaggtgcagctgctcgctgagatgtgcatattaatcgacgagaacgataataagataggagccgagactaagaagaattgtcacctgaacgagaatatcgagaagggattgctccatcgagccttttcagtattcctgtttaatactgagaacaaactgttactacagcaacgatcagacgctaagatcacatttccgggctgctttactaatacctgttgctcacatccgcttagcaatccggcagaattggaggagagcgatgctttgggcgtaaggagagctgctcagaggaggctcaaggcagagctcggaatacctctggaggaagtgccccccgaagagatcaactacctgacaaggatccactataaagcccagagcgatggaatatggggggagcacgagattgactacatcctgctggtgaggaaaaatgtcacactgaaccctgacccaaatgagattaaatcttactgctacgtctccaaggaggagctaaaagaactcctcaaaaaagcggccagtggagaaataaaaatcacaccctggtttaagataatcgctgccacattcctctttaagtggtgggataacctgaaccacctcaatcagttcgtggatcacgaaaaaatttacagaatgtag

SEQ ID NO: 24717 - DNA, 180 bp, synthetic construct
  source 1..180: mol_type = other DNA; note = Synthetic coding sequence
atgacccggggcaaccagcgggagctggcccggcagaagaacatgaaaaagcagtcagactccgtgaaggggaagcggcgggatgatggccttagtgccgccgcccgtaaacagagggatagcgaaatcatgcaacagaaacagaagaaggcaaatgagaagaaagaggaacctaagtag

SEQ ID NO: 24718 - DNA, 3039 bp, synthetic construct
  source 1..3039: mol_type = other DNA; note = Synthetic coding sequence
atggaggagtacgagaagttctgcgagaagagcctggcccggatccaggaagcttcgctgtcaacagagtcgtttttgccagctcagtccgaaagcatttctttgattcgctttcacggcgtggccattctgtccccactactaaatatcgagaaacggaaggagatgcagcaagaaaagcagaaagccttagacgttgaggcaagaaaacaggttaaccggaagaaggcactgctaactcgcgtgcaggaaattctggacaacgttcaggtgagaaaggccccaaatgccagcgactttgatcagtgggagatggaaacagtgtattccaactccgaggttcgtaatttgaatgtccctgccacctttccaaatagtttcccttcccacactgagcatagcaccgccgccaagctggacaagattgcgggaattctaccactggataatgaagaccagtgtaagaccgacggcatagatctggcgcgagactctgagggtttcaactctcccaagcagtgtgattcttccaacatcagtcacgtggaaaacgaagccttccctaagacaagcagtgctactccacaagagaccctgatttcagacggtccttttagtgtgaatgaacagcaagaccttccattacttgctgaagttattcccgatccctatgtgatgtctctccagaacctgatgaagaaaagtaaagaatacatagaacgcgaacagtcccgtaggtccctccggggttccattaatcgcattgtcaacgaaagtcacctggacaaggagcacgatgccgtggaggttgcagattgcgtgaaggagaaaggtcagctgaccgggaaacattgcgttagcgttattcctgacaagccgtccctgaacaaaagtaacgtccttttgcagggtgcttctacacaggcctcctccatgagtatgcccgtgctcgcctcttttagtaaagtcgatatccccattaggacagggcaccccaccgtgcttgagtcgaattccgacttcaaagtaattccaaccttcgtgaccgaaaacaacgtgattaagtccttaactggtagctatgcaaagctcccttctcccgaaccatccatgtcgccgaagatgcaccgcaggagatctcgaacctccagcgcgtgtcacatactgataaacaacccgatcaacgcctgcgaattgagcccaaaaggcaaggaacaagctatggatttgatcattcaggacactgacgagaataccaacgtgcctgaaattatgcctaagttgcctactgacctggccggtgtttgctccagcaaggtatacgtgggtaagaacaccagtgaggtaaaggaggatgtggtgcttggaaaaagcaaccaggtgtgtcagtcctccggcaaccatttggagaataaagtgacccacgggctcgttacagtggaaggccagctgacaagtgatgagcggggagctcacataatgaactctacgtgcgcggccatgccgaagttacacgagccgtatgcctcatcccagtgtattgctagccccaacttcggtaccgtgagtgggctaaagcctgcctctatgctggagaaaaattgtagtcttcagacggagctgaataaatcgtatgatgtcaagaatcccagccctcttctgatgcagaatcagaatactcgtcagcagatggacaccccaatggtctcgtgcgggaacgagcagttcctagacaacagttttgagaaggtcaagagacgactggacttagacattgacgggctgcagaaagagaactgtccctatgtaataacctccgggattaccgagcaggagaggcaacacctccccgagaagagatatccaaaaggctccggatttgtcaacaaaaataagatgctggggacttcttctaaggagtcagaagagctacttaaatctaagatgctcgctttcgaggagatgcgtaagagactggaggaacaacacgcccagcagctgtcccttcttatcgcggaacaggagagggagcaggaaagactccagaaagagattgaagagcaggaaaaaatgctgaaggagaaaaaggcaatgacagctgaggccagtgagctagatattaataacgccgtcgagctggagtggcggaaaattagcgattcatctttgctggagactatgctgtcgcaggccgatagtctccacacctctaattcaaactcatcaggcttcacaaacagtgccatgcagtactcctttgtatccgcaaacgaggctcccttttacctgtggggatctagcacatctggactgacaaaactctctgtgactcggccttttggcagggctaaaactcggtggtcacaggtgtttagcttggaaatacaggcaaaatttaataagatcacagccgtagccaaaggatttctaaccagacggctcatgcagacggataagctgaagcagctgcggcagaccgtaaaagacactatggagttcatcagaagtttccaaagcgaagctccactgaaaagaggtatcgtttccgcgcaggacgcaagcctgcaggagagagtactagcccaactgagagccgctctctatggaattcacgacattttttttgtcatggacgcggccgagcgaatgtcgattttacatcacgaccgggaagttagaaaagaaaaaatgctgagacaaatggataagatgaaaagccctcgggtagccctgtccgctgcgacccagaaaagccttgaccgtaaaaagtatatgaaagcagctgagatgggaatgcccaacaaaaaattcctggtgaaacagaaccccagcgagacaagggtactccagcctaaccaaggacagaacgcacctgtacatagacttctgagcaggcaggggaccccaaagacctccgtgaagggcgtagtacagaatagacagaagccttcccaaagccgagtacccaacagggttccagtttctggcgtgtatgcagggaaaattcaacgcaagagacccaatgtcgccactatctag

SEQ ID NO: 24719 - DNA, 267 bp, synthetic construct
  source 1..267: mol_type = other DNA; note = Synthetic coding sequence
atggccagcgccagcgcccggggcaaccaggacaaggacgcccactttccccccccttcaaagcaatcactcctgttctgtccaaagagtaagctccatattcatcgcgcggagatctccaagataatgcgggagtgccaggaggagagcttctggaaaagggctctgcccttttccttggtgtcaatgctcgtgactcagggtttggtataccaggggtacctggcagccaattctagatttgggagtctgccaaaagtggcatag

SEQ ID NO: 24720 - DNA, 738 bp, synthetic construct
  source 1..738: mol_type = other DNA; note = Synthetic coding sequence
atgaacggccgggccgacttccgggagcccaacgccgaggtgccccgaccaataccccatatagggccagactacattcccacggaagaggagaggcgagtttttgccgagtgcaacgacgaatccttctggttcaggtccgtgcccttggcagcaactagcatgctcataacccagggtctgattagcaaagggatactgagctcccacccgaagtacggatcaatccctaaactgatactagcctgtattatggggtacttcgccggtaaattgagttatgtgaaaacctgtcaggagaaattcaaaaagctcgaaaatagtcctctgggcgaggctttaaggagtggtcaggccagacggagctctccccctggccactactatcagaaaagcaagtacgattctagcgtaagcgggcaaagttcctttgttacctcccccgctgccgacaatatcgaaatgctcccccattatgaaccaattccattctctagctcgatgaatgagtcagcacctaccggcattaccgaccacattgtgcaaggtcccgatccgaacttggaagaaagccccaagcgcaagaatatcacatacgaggagctgaggaacaagaatcgggagagctatgaagtgagccttacccagaagactgatcctagcgtccgcccaatgcacgagagggtccctaagaaggaagtgaaagtgaacaaatatggggacacttgggacgaatag

SEQ ID NO: 24721 - DNA, 1551 bp, synthetic construct
  source 1..1551: mol_type = other DNA; note = Synthetic coding sequence
atgagctaccccgccgacgactacgagagcgaggccgcctacgacccctacgcctacccctcggactacgatatgcacacaggcgatcctaaacaggacctggcctatgagcggcaatatgagcagcagacataccaggtgattcccgaggtgatcaaaaatttcattcagtactttcataagaccgtaagtgatctcattgaccagaaagtctatgagctccaggccagtcgggtgtctagcgacgtcatcgatcagaaggtttacgaaatccaggacatttacgaaaacagctggacaaagctgacagaaagattcttcaaaaatacaccctggccagaggccgaggctatagcgccccaggttggtaacgacgcagtcttcctgattctgtacaaggagctgtactatcgtcacatctatgcaaaggtgtcctttcagagcttttctcaataccggtgtaagacagcaaaaaaaagcgaagaggagatagactttcttcggagtaatcccaaaatctggaacgtgcactcggtactgaacgtgttgcattccttagttgacaagagcaatataaaccgacagcttgaggtgtatacaagtgggggcgacccagaaagtgtggccggagaatatggtagacacagtctttataaaatgctcggctatttcagccttgtcgggttattgcgcctccactccctgctgggtgattattatcaagcaataaaagtgctcgaaaatatcgagctcaacaagaagtctatgtatagccgcgtgcctgagtgtcaggtgaccacatactactatgtcggctttgcttacttgatgatgagaaggtatcaggacgctattcgggtgttcgcgaacatcctgctgtatattcaacgaacaaaaagcatgtttcagagaaccacttataagtatgagatgattaacaagcaaaacgaacagatgcacgctctcctggcgatcgcgctgacgatgtaccccatgagaattgatgaatctatacatctccaactacgggagaagtatggcgataaaatgttaagaatgcagaagggggacccgcaggtatatgaggaactgttcagctactcttgtccaaaatttctatccccagtggtgccgaattacgataacgtgcaccccaattaccataaagagcccttcctacagcagctcaaggttttctcggacgaagtgcagcagcaggctcagctcagcacaatccgtagctttctcaagctgtacaccacaatgccggtggcaaagcttgcgggtttcctggaccttaccgaacaggaatttcggatacaactgctggtattcaaacataagatgaaaaaccttgtatggacctctggcatctctgctttagacggtgaatttcagtccgccagcgaggtcgacttttacatagacaaggatatgattcatattgccgacactaaggtggcaaggcgatatggggactttttcattcgccagatacacaagtttgaagaacttaatcggactctgaaaaagatgggacaacgcccctag

SEQ ID NO: 24722 - DNA, 2502 bp, synthetic construct
  source 1..2502: mol_type = other DNA; note = Synthetic coding sequence
ctgagccggcgggtgccctgcgtgcggcggggctgccggccccccctacctcctctaccaggtagtcagtcccgcgcctggtccagggacagggaagcaccccttgatcctggccggccggctcaatccggaaggcggcctaccagtaggtctgtaagccacgcttgcagctggaacggtggctcattggatcccctggaggggacacctgcgctgttgaggagcgctgagcgcctcatgcggaaagtgaagaaactccgccttgacaaggaaaatactgggtcctggcggagcttcagccttaactctgagggtgcagaacgtatcacctcctacgactttcattctgagtcggggttgtttctttttcaagccagtaatagtttgtttcattgccgcgacgggggcaagaacggatttatggttagtccgatgaagccattggagattaaaacccagtgttctggtcctaggatggatcctaaaatttgtccagccgaccctgccttcttcagtttcattaataactccgacctatgggtggccaatattgagaccggtgaagaacgacgcctgactttttgtcaccaggggctcagcaatgtgctggatgatccaaaatcagcaggcgtcgcaacattcgtcatccaggaggagttcgataggtttacaggatattggtggtgccctacggcttcctgggagggcagcgaaggattaaagacactgcggattttgtatgaggaggtcgatgagagtgaggtcgaggtcattcatgttccaagtcccgctctggaggagcggaagacggattcttatcgctatcccaggacagggtccaaaaaccctaagatagcactgaagctggcagagttccagaccgactcccagggaaagattgtctccacccaggagaaggaacttgtgcagccttttagctccctgtttcctaaagtggaatacatcgcacgggcgggttggactcgggacggaaaatatgcctgggcaatgttcctcgacaggcctcagcagtggctgcaattggttctgctgcccccagccttattcataccctctaccgaaaacgaagagcaaaggttggcttcagctagagccgttccaaggaacgttcagccatacgtagtttatgaagaagtgacaaatgtgtggataaacgtgcatgatatattttacccttttcctcagtccgagggagaggacgaactctgttttctgagggctaatgaatgtaagaccggcttctgtcatctatacaaagtcacagctgtgctcaagtcacaaggttatgattggagcgagcctttttccccgggagaagacgaatttaaatgcccaatcaaggaggaaatcgccctgacatcaggagaatgggaggtgctagctcgccatggaagcaagatctgggtgaatgaggaaacaaagctcgtctattttcagggcacaaaagacactccactggaacaccatctgtacgtggtgagctacgaagccgccggggaaatcgtgcggttgaccacacccggtttttcccatagttgctctatgagccagaattttgatatgttcgttagtcactacagtagcgtgagtacacctccctgtgttcatgtctacaaactgtctggcccggacgatgatcctctgcacaagcagccccgattctgggcctccatgatggaggcagcttcatgcccccccgactatgtcccccctgaaatcttccactttcacacacgcagtgatgtcaggctgtacggcatgatttataaacctcacgcactccagccagggaagaagcatcccacagtgttgtttgtttacggcggtccacaggtgcagttagtgaacaatagtttcaaaggtataaaatatctccggcttaataccctggcttcactgggctatgctgtggtcgtcatagatgggagaggaagctgccagcgaggcctgaggtttgagggcgccctcaaaaatcagatgggtcaggtcgagatcgaggaccaggttgagggcctacagtttgtggcggaaaagtacggtttcattgacctgtctcgagtggccattcacgggtggagctatggcgggttcctgtctctgatgggcctaattcacaagccacaagtttttaaagtagccatcgcgggagctcctgttactgtgtggatggcatacgatactggatacacagaaaggtacatggatgtccccgaaaacaaccaacacggctacgaagctggtagcgtggccttgcacgtagagaaactgcctaatgagccgaacagattattgattctgcacgggttcctggacgaaaatgtgcattttttccatactaatttcctcgtttcacagctgatccgtgcaggcaagccataccagcttcagatttatcccaatgagcgacattccattcgatgtccggaatctggcgagcattacgaagtgaccctcctccacttcctgcaggagtatttgtag

SEQ ID NO: 24723 - DNA, 5073 bp, synthetic construct
  source 1..5073: mol_type = other DNA; note = Synthetic coding sequence
atggactgcctgctggagctgagcgccaccgacaccaagatcgaggagtctagcagtcaatctttcgtcgcctcagaaaatcaagtgggtgcggcagagtctaagatcatggaaaagcggccagaagaagaatccgaagattcaaaaatggactcattcctggacatgcagcttacagaagatttagattccctaatacagaacgccttcgagaaacttaattcatcacccgacgatcaagtgtactctttcctgcccagccaggacgttaacagctttaacgattccagtgagtttattaatcccgacagtagcaacatgacgcccatcttttcgacacagaacatgaacctgaacggggagaacctcgagaactccgggagcactctgtctttgaaccctctgccatcccactcggtactcaacgagagcaaatgctttatcaaagacaatacacttgctttggagagcaactatccagaagactcactgttgagcagctctctgaatgtggcctctgattccatcgctggatgctcttccctgaaccagaagcaaaaggaacttcttgagtccgagtgcgtggaggcccagttttccgaagcccccgtggatcttgacgcatccgagccgcaggcgtgcctcaacctgcccggcctggacttaccgggtacgggcggggatcagaagagtacaagagtgagtgacgtgttcctgccttccgaggggtttaactttaaacctcacaagcaccccgaactgcctactaaaggcaaagatgttagctactgtcctgtcttagccccgcttcccctgctgctgccccctcccccaccgccccctatgtggaatccgatgatcccagccttcgatctgtttcaaggtaatcatggtttcgttgcccctgtagtcaccaccgcggcccattggcggagcgtcaactatacctttccgcccagtgtgatttcgcacacctcgccaacaaaggtctggcgtaataaagatgggaccagcgcatatcaagttcaggagactccagtctcccaggtggtgcgaaaaaaaaccagttatgtcgggctggtccttgttttactcagagggttacccggctcaggcaaatcattccttgcacggactctccaggaggataatcctagcggcgtgatcctgagcaccgacgattatttctatataaatggccaatatcagttcgacgtgaagtatctgggcgaagcccacgaatggaatcagaaccgggccaaagaggcttttgaaaaaaagatttcccctatcataatagataacaccaacctgcaggcctgggagatgaaaccttacgttgccctgtctcagaaacataagtataaagttctgtttcgcgaaccggatacctggtggaaatttaaaccaaaggagctggccaggcggaacattcacggtgtaagtaaggagaagattaccaggatgctggaacactaccagagattcgtgtcagtaccaataataatgagttcgagtgtgccagagaaaattgagaggattgaactttgcgcatacagctgcgaggaccgatccacgtcaccccgtgacgacgaggatatcattagtgagaaggaagagaatatcctaagcctaagcctaaagcatctcgagttcacggaggaaaagaaccttgacgtaacaaaggagaccatgttgcctgagaacgttgcttacctaagtaacgctgatttgaacaagcgccggaaggagataagcgacatgaaccccagcatccagtcagcactcatactcgaaacaccccatatgtacttttctgatagtgaaagcaagttacaagccacagataagtcagaaaatgagcaaatcgaaatggttgcggtcaaaggatattctaaaaccgatacagactccagtatggagagagtgtcccctagcacctgctgttccgaaaacaatcaggaggattgtgacctcgccaatagcgggcctctgcagaatgaaaaatcttccccaggcgagattgtagaggaacgagccacagttacgaagaaggcttttggtaaacaaaaaagcaaatctaccctcgaaaagttcccgaggcacgaactgtctaacttcgtgggggattggccggttgataaaacgattggacagcggacaaaacggaaccgcaaaaccgagaaaaccagtagtgtccagtccgacaagaagtataattacccacagagccacaaattagttaatagtgtctccgtgaacacagactgcgtgcagcaaaggggttcaccccatgaatctgtggaggatggtcgtaagtcacaatgtgacgatgcaagcgagccactgaactcatataaatacgacgcttacaaaaacatcgataaaaattcttttaatataatgggagactggcctagcagcgattctctcgcccagcgagaacatcgctcacggatgccgaagactggactttccgaaccgaacctcgagattggcaccaacgataaaatgaatgagatcagtctctccacagcacatgaggcgtgttgggggacctcaagccagaaattgaaaaccctgggttcatccaatctagggagctcagaaatgcttctttcagaaatgacatgcgagtctcagacttgtctgtcaaagaagtcccatgggcagcacacatctctgcctcttacattcaccaacagcgcacctaccgtgtccggcgtggttgagccacagacgctggccgagtgccaagagcagatgccaaaacgggatcccggcaaagaggtggggatgtgtacccagaccgagccacaagattttgcactgctttggaagatagagaaaaataagatctccatatccgactctatcaaagtactcaccggaaggttggatggattcaagccaaaggtattcaatatcaatacgaagagtgacgttcaggaagctataccctatcgggtcatgtatgataagagcacgtttgtcgaagaaagcgaactcacatcagcagatgagtcagagaatcttaatatcctgtgtaaactgtttggatcattctctctggaagctctgaaagatttgtacgagagatgtaataaggacattatctgggcgacctccctgctgcttgactcagagacaaaactgtgtgaggatacggaatttgaaaatttccagaagtcatgcgacgggagtcagatcggtcctttctctcttggtctcaacctaaaggaaatcatcagccaacgtggcacattggagaactctaactcaccagtgcccgaattctcccacggcatcgggatcagtaatgctgactcacagagcacatgcgatgctgagagggggaattccgagcaggccgagatgcgagcggtgacacctgagaaccatgaatccatgacctccatttttccatccgccgccgttggtcttaagaataataatgatattctgccaaactctcaggaagaattgctctacagctctaagcagagctttccaggcatcttgaaggccacaactcccaaagacatgtccgaaacagaaaaaaacttggtggtgaccgaaacaggcgacaatatacactctccaagtcacttctccgacatcttcaattttgtgtcatctaccagcaacctggaactcaacgaagagatttacttcaccgacagtctggaaattaaaagaaatgagaattttccaaaagactatgttaaattctctgacgaggaggagttcatgaacgaagatgagaaggagatgaaagagatcttaatggcggggtcctcactcagcgctggggtttccggcgaggacaaaacggaaatcctgaaccccacacccgcaatggctaaatcattgactatagactgcctggagctcgcgctgccccctgagctggccttccagctcaacgagctgtttggcccagtaggcatcgatagtggatcgctcaccgtggaggactgtgtagtgcacattgatctgaacttggccaaagtcatacatgagaagtggaaagagtccgtgatggaacgccaacgccaagaagaagtgtcttgtggtaaatttatgcaagatcccagcctggtggggcatacgggcttggacaatcccgaacaaaagagttcccagagaaccggaaaaaagttgctgaaaaccctgaccgcctcagaaatgttgccccttctcgaccattggaatacacaaacgaaaaaggtttcactgcgggagatcatgtctgaagaaatcgcgctgcaggaaaagcacaatctgaagcgggaaacactgatgtttgagaaggattgcgccacaaagctaaaggaaaaacagctttttaaaattttccctgctattaaccagaatttcctcgtggacatttttaaagatcataactactctctagaacatactgtacagttcctaaattgcgtgctggaaggcgaccccgttaagacggtggtcgcccaagaattcgtgcaccagaacgaaaacgtcacttcacatacaggccaaaaaagcaaggagaaaaaacccaaaaagctaaaggagacagaggaaactccctcggaacttagcttccaggacttcgaatatcccgactacgacgactacagggccgaggccttccttcatcagcaaaagagaatggaatgttactccaaagcaaaagaagcctacaggatcggcaagaaaaacgtggcaactttctacgctcaacagggtaccctgcacgaacagaaaatgaaagaggccaatcacttggccgccattgagatcttcgagaaggtgaatgcttcactcctgccacagaatgtgctggacctgcacggccttcacgtcgacgaagccctggagcacctgatgcgggtgttagaaaagaaaaccgaggagttcaagcagaacggcggaaagccgtacctgtccgtcatcaccggtcgcggcaaccatagtcagggcggtgtggccaggataaagcctgccgttataaagtatctcatctcacatagttttaggttctccgagataaaaccgggatgccttaaggtgatgcttaaatag

SEQ ID NO: 24724 - DNA, 477 bp, synthetic construct
  source 1..477: mol_type = other DNA; note = Synthetic coding sequence
atgggcagcggcagcagccggagcagccggaccctgcggcggcggaggagcccggagagcttgcctgccggaccaggcgctgcagcccttgaggggggtactcggagaagagtgcctgtcgctgccgctgaggtgcccggggctgcggctgaagaagctccagggcgagatcccagtccagtggccccccctgacggcagggatgaaacgcttagattactcgacgagctactggccgaatccgccgcctggggtccgcccgaaccagccccccgcaggcccgccagattgaggccaaccgctgtggcaggctctgccgtctgtgctgaacagagcactgagggtcaccctggatccgggaatgtgagcgaagctccggggtcgggcaggaagaagcctgaacgacccgccgcaataagctatgatcactctgaagaaggactcatggcaagcattgagagagagtactgccggtag

SEQ ID NO: 24725 - DNA, 738 bp, synthetic construct
  source 1..738: mol_type = other DNA; note = Synthetic coding sequence
atggagaagaccgagctgatccagaaggccaagctggccgagcaggcggagagatacgacgatatggcaacttgcatgaaagcggttacagagcagggagctgagctaagcaatgaagagagaaacctgctgtctgttgcttataagaatgtcgtgggaggtcgccgcagcgcctggcgtgtgatttctagcatcgaacaaaagaccgatacctccgacaagaaattacagctaataaaagactaccgcgagaaggtcgaatcagaactgcgctccatctgtaccaccgttctagaacttctggataagtatcttatcgccaatgcaacgaacccggaatctaaggtgttctatcttaagatgaaaggggactacttccggtatttagcagaggtggcctgcggcgatgacagaaaacagaccattgataactctcaaggcgcctaccaggaggctttcgacatcagtaagaaggagatgcaaccgacacaccccattagattgggacttgcgctcaatttctcagtgttttactatgagatcctgaacaacccggagctcgcctgcactctggccaaaaccgcttttgatgaagccattgccgagctggacacgctaaacgaagacagttataaggatagcacattaatcatgcagctgctgagggataacttgactctgtggactagcgatagtgccggggaagaatgcgatgcagcggaaggcgctgagaactag

SEQ ID NO: 24726 - DNA, 1014 bp, synthetic construct
  source 1..1014: mol_type = other DNA; note = Synthetic coding sequence
atggagcagccctggcccccccccggcccctggagcctgccccgggcggagggcgaggcagaagaggaatctgattttgacgtcttcccaagtagccctcggtgcccacagctccctgggggaggtgcacagatgtattctcacggaatagaattagcttgccagaagcagaaggaattcgtaaaatccagtgtggcttgtaaatggaacttggcggaagcacagcaaaaacttggctccttagcgctgcataactccgaatctctcgatcaggagcatgctaaagcgcagactgctgtgagcgagcttcgccaacgggaggaggaatggcgccagaaggaagaggcactcgtccaaagagaaaaaatgtgcctatggtctaccgatgccatttccaaggatgtctttaacaaatctttcataaatcaagataaaaggaaagataccgaggacgaagataaatcggagagcttcatgcagaaatatgagcagaagatcaggcatttcggcatgctgtcaagatgggatgactcgcagaggtttctgtcagatcacccttatctggtctgtgaagaaacagctaaatacttgatcttatggtgtttccacctggaggcagagaagaaaggggccctgatggaacagattgctcaccaagccgtagtgatgcagttcataatggaaatggcgaagaattgcaacgtcgaccctcgggggtgctttaggttgttcttccagaaggcaaaggcagaagaggaggggtactttgaagcatttaagaatgaactggaagcgttcaagtcccgggtgcggctctacagtcagagccagtctttccagcccatgacggtgcagaaccacgtgccccatagcggagtgggctctatcggcctgctggaatccctgccacagaacccagattacctgcaatacagtataagtacagcgctgtgcagcctgaactccgtagtgcacaaggaagatgacgagcccaaaatgatggacaccgtgtag

SEQ ID NO: 24727 - DNA, 927 bp, synthetic construct
  source 1..927: mol_type = other DNA; note = Synthetic coding sequence
atggagcagccctggcccccccccggcccctggagcctgccccgggcagagggcgaggcagaggaggaatccgacttcgacgtcttccctagttcccctcgctgtccgcagttaccggggggaggcgcacagatgtacagccacgggatagaattggcctgtcaaaaacagaaagagttcgtgaaatcttcagtcgcctgtaaatggaatctggccgaagcccagcaaaaattaggctcactggctctgcacaactccgaatcgttagatcaggagcacgccaaggcccagacagctgtcagcgaactgcggcagcgtgaagaggagtggaggcagaaagaggaagccctggtgcagcgcgagaagatgtgtctttggagcactgatgctatctcgaaggatgtcttcaataaatccttcatcaatcaggacaaaaggaaagacactgaagatgaggataagtcagagtcgttcatgcagaagtatgaacagaagatccgccatttcggaatgctttctaggtgggatgattcccaacgattcctgtccgaccacccatacctcgtgtgcgaagagaccgccaagtacctgatactgtggtgtttccatcttgaggcagaaaaaaaaggtgctcttatggaacaaattgcccatcaagctgtggtgatgcagtttatcatggagatggctaagaactgtaacgtggatcccaggggctgctttcggctattcttccaaaaggccaaagcagaagaagagggatactttgaggcatttaagaacgagctggaagcctttaaatccagagtgcggctctattctcagagccaatccttccagcccatgacagtgcagaaccatgtacctcacagcggtgtgggcagcatcggcctgctagagagcctcccacaagccccaagattctag

SEQ ID NO: 24728 - DNA, 4227 bp, synthetic construct
  source 1..4227: mol_type = other DNA; note = Synthetic coding sequence
atgtggagcctgaccgccagcgagggcgagagcaccaccgcccacttttttcttggtgccggcgacgaaggtttaggtacgcgaggtatcggtatgcggccggaggagagcgacagcgagctgttggaagatgaagaggatgaggtgcctccagagcctcagataattgttggaatttgtgcaatgacaaagaagtctaagtccaagccaatgactcagatccttgagaggctgtgtagattcgattaccttaccgtggttatcctgggtgaggatgtaattctgaacgagcccgtcgaaaattggcccagttgccactgccttatttcgtttcacagcaaaggcttcccactggacaaagccgtggcgtacagtaagctgagaaacccatttctgatcaacgacctggccatgcagtactatatccaagatagacgcgaagtttacagaattctgcaggaggagggtatcgatctgccaaggtatgccgtgttaaatcgggatccggcacggcccgaggaatgtaatctgattgagggggaggatcaagtggaagtgaatggcgccgtatttcctaagccctttgtggaaaaacccgtgtccgccgaagatcacaatgtttatatctattacccatcctccgctggtggcggcagccagcgtctgtttcgcaagatcggcagtcgttcctctgtttattctccggagagttctgttcgcaaaacaggctcttacatttacgaagagtttatgccgaccgacgggactgacgttaaggtctacacagtcggccctgactacgcacacgccgaggcccgtaaatccccagccttagatgggaaggtcgagcgcgattcagaagggaaagagatcaggtacccagtgatgctgaccgccatggagaagctcgttgcccggaaggtgtgtgtcgcctttaagcaaactgtctgcgggttcgatcttctacgcgcaaatggacattcttttgtgtgtgatgtgaatggcttcagcttcgtgaagaattctatgaaatactatgacgactgcgcaaagatcctgggcaacacaatcatgagggaactcgctccccagtttcagattccttggtctatccccaccgaggccgaagatatccccattgtgcccacaacttcaggcacgatgatggagctccggtgcgtgatcgccattatcagacacggagaccgcacaccaaagcagaagatgaagatggaagtcaagcacccaagatttttcgcactatttgagaaacatggtggatataagaccggcaaactgaaactgaagcgtcctgaacaactacaggaggtgctggacatcacacgcctgctcttagctgagctcgagaaagagccaggtggcgagattgaagagaagacagggaagctggaacagcttaaatccgtgttggaaatgtacgggcatttcagcggtattaacagaaaggtgcagctcacctattatccacatggggttaaagcaagcaatgaggggcaagacccgcaaagggagaccctcgcacccagtctcctgttagtcctcaagtgggggggtgagcttacaccggcaggtagggtgcaggcggaagagctaggaagggcattcagatgtatgtatcccggaggccagggggactatgccggattccccgggtgcggcttgctgcgcttacacagcacttttcggcatgatcttaagatctatgcttccgatgaagggcgggttcaaatgaccgctgccgcattcgcaaaagggctgttagcactggagggtgagctaacgcctatccttgtccagatggtgaagtctgcaaacatgaacgggctccttgattcagacggcgattcactgtcctcctgccagcacagagtgaaggcccgtctgcatcatatcctccagcaggacgcaccttttggccccgaagactacgaccaactcgctccaacacggtccactagcctgttaaacagcatgaccattattcagaacccggtaaaggtttgtgaccaggttttcgccctaatcgagaacctcacgcaccagataagagagcggatgcaagatcctcggtccgtggatctgcagctgtaccacagcgaaacactggagttgatgttgcagagatggtcaaagctggagcgagactttagacagaaatcaggtagatacgacatcagcaagatacccgacatttacgactgtgtgaagtacgacgtccagcacaacggctccctggggttgcaaggaaccgccgagctgctgcggttgtctaaagccttggcagatgtagtaattccacaggagtacgggattagccgcgaggagaaactcgagatagcggtgggcttttgtctgccactgctcaggaaaatcttgctcgacctgcagcgtacacacgaggacgagtctgtgaataagctccaccctctgtattcccgcggggtcctgagtcccgggaggcacgtgcggaccagactttacttcacttccgagtcacatgtgcattccctgctcagcgtatttcgttatggggggttacttgatgaaacacaggatgcacagtggcagcgagctctggactatctttccgctatctctgagctgaattatatgactcaaattgtgattatgctgtacgaggacaacacccaggatcccttgtcagaggagagatttcacgttgagctgcacttttcacccggggtaaagggcgtcgaagaagagggtagtgccccagctggttgcggctttcgacccgcctccagcgaaaacgaagaaatgaaaaccaaccaaggctctatggagaatttgtgccccgggaaggcctcggacgaacccgatcgggctctgcagactagtccacagcccccagagggacccggactgcctcgaaggtccccacttattcggaatcgcaaggcgggcagcatggaggtactgtccgagacatcatccagccggcctggcggttacagactgttttcgtcctcacgccctccgaccgaaatgaaacagtccggtctcggtagtcagtgtaccggccttttctctactaccgtcctgggaggcagtagcagtgcccctaatcttcaagactatgccagaagccatggtaagaaactgcctcccgcttctttgaagcatcgggatgggtttgaaggctgctcaatggtgcccaccatttatccactggagacgctgcataacgctttaagtctgcggcaggtgagtgaatttctgtctcgggtctgccaaaggcacactgacgcacaggcacaggccagtgcggcccttttcgacagtatgcattcaagtcaagcatctgataatccctttagtccaccccgtacgctgcatagcccacccctccagctccaacagaggagtgagaagcctccctggtattcgtcgggcccgtcatccacggtgagctctgccggccctagtagtccaacaaccgttgatggcaatagccaattcggcttcagcgatcagccgagtttgaattctcatgtcgccgaagaacaccaagggctgggcttgctccaggagactcccggctctggagctcaggagctgtccattgagggggagcaagaactcttcgaacccaaccagtcaccccaggtccccccaatggagactagccagccctatgaagaagtctcccagccctgtcaggaagtcccagacatatctcaaccttgtcaggacatttccgaggcattaagccagccttgccagaaggttcccgacatctctcaacaatgtcaggagaaccatgataacgggaaccacacctgccaagaggtacctcatatatcccagccttgccagaaatcgagtcagctgtgtcagaaggtcagtgaagaggtctgccagctgtgccttgagaactctgaagaagtgtcccaaccatgtcagggtgtgtccgtcgaagttggcaagttagtgcacaagtttcacgtcggcgtagggagcctggtccaggaaacgttagtggaggttggttcacccgcagaagaaattcctgaagaagttattcaaccctatcaggagttcagtgtcgaggttggcagactagcgcaggagacctcagcgatcaatctccttagccaaggcatcccggagattgataaaccaagtcaggaatttcccgaagaaattgatcttcaggcccaggaagttcctgaggaaatcaactag

SEQ ID NO: 24729 - DNA, 528 bp, synthetic construct
  source 1..528: mol_type = other DNA; note = Synthetic coding sequence
atgatcctgaacgtgctggagtacggcagccagcaggtggccgaccttacgctgaacttagacgactacatcgatgctgagcacctgggagacttccaccgcacctataagaacagcgaagagcttcgctcccggattgtgagcgggatcatcacaccaatccacgaacaatgggaaaaagccaatgtatcaagtccccaccgagaattcccccctgcaacggctcgcgaagtcgaccccctacgaatcccaccccaccacccccataccagtcggcagccaccctggtgtgatccactcggacccttcgttgtgggaggcgaagacctcgatcctttcggaccaagacggggaggcatgatcgtcgatccactccggtcaggctttccacgtgctctgattgacccaagttctggcctgcctaaccggttacccccaggcgcagtccccccaggtgcccgcttcgacccatttggcccaatagggacatccccccctgggccccgccccgacaggcgcggtcagtag

SEQ ID NO: 24730 - DNA, 552 bp, synthetic construct
  source 1..552: mol_type = other DNA; note = Synthetic coding sequence
atggccggcctggaggtgctgttcgccagcgccgcccccgccatcacttgcagacaggatgcgttggtgtgtttcttgcactgggaggtcgtcactcatggatacttcggcctgggtgtgggtgaccaacccggacccaatgataaaaagagtgagctgctgcctgcaggctggaataacaataaagacctttatgttctgcgatacgagtacaaggatggatccagaaaattgctggtcaaagccattaccgttgaaagtagcatgattttaaatgtgctcgagtacgggagccaacaggtcgctgaccttacactcaacttagatgattacatagatgctgagcatctcggcgattttcacaggacctataagaattctgaagaactgcgatcacggattgtgtccggcatcattactccaatccacgagcagtgggaaaaggccaacgtgagctctccccacagagaattcccacccgccactgcacgcgaagttgaccccctaaggatcccccctcaccacccacacacgtcgcgacagcccccttag

SEQ ID NO: 24731 - DNA, 888 bp, synthetic construct
  source 1..888: mol_type = other DNA; note = Synthetic coding sequence
atgcccgtgcacaccctgagccccggcgcccccagcgcccccgccctgccatgtaggctcaggacacgcgtacccggctacctgttaaggggccccgccgatgggggcgcgaggaagccatcagccgtcgaacgtttagaagccgataaggccaaatacgtaaagtcgcttcacgttgccaatactcgccaggaacccgtgcaacctctgttgagtaaacagcccctcttcagccccgagaccagaagaactgttctgacaccctcacggagagcgctcccaggaccgtgccgaaggcctcagcttgatctcgatattctgagtagtctgatagacctctgtgactcaccagtctctcccgccgaagcatccaggacccccggaagagctgagggtgctggtaggcctcccccagccactcctcccaggcctcctcccagcacctcagctgtgcgtcgggtggatgtaaggcctttgcctgcttccccggcccggccatgtcccagccccggccctgccgccgcaagcagccccgctaggccgccggggctccagcgatccaagtcagacctgagtgagcgatttagtagagcggctgccgatctggagcgttttttcaacttctgtggcttggaccctgaggaggcaaggggtcttggagtggcgcatctggccagagcttcttctgatattgtgtccctggcagggccaagcgcaggccccgggtcatctgaaggcgggtgtagcagacgttcctctgtgacagtggaggagcgcgcacgcgagcgggttccatatggcgtgagcgttgtcgagcgtaacgcaagggtaatcaaatggctttacgggctccggcaggcccgtgaatccccagcagctgagggctag

SEQ ID NO: 24732 - DNA, 888 bp, synthetic construct
  source 1..888: mol_type = other DNA; note = Synthetic coding sequence
atgcccgtgcacaccctgagccccggcgcccccagcgcccccgccctcccatgccggctgcgtactcgggtgccaggatacctcttaagggggcccgctgatgggggggcccgcaaaccttctgccgtcgaaaggttagaagctgacaaggcaaagtatgtaaaatctctgcacgtagccaacactagacaggagccagtgcagcctttactctctaaacagcctctgttctccccagagacaaggaggaccgtgttgactccctccaggagggccttacctggcccttgtcggagaccccagcttgacctggacattctgagttctctcatcgacctatgcgattctcctgtctcacccgctgaagcatcaagaacacccggaagagcagagggtgcaggtagaccgccgcccgctactccgccaaggccacccccttccacttccgcagtgagaagggtcgatgtcagacctcttcccgcttcacctgcaaggccttgccccagtccaggccctgcagccgcctcctcccccgctaggccacctggcctccaaagaagtaaaagcgaccttagcgaaagattttccagggccgctgctgatctggagcggttctttaatttttgcggcctcgatcccgaagaggctcgggggcttggagtggcccatctggcccgagcttctagcgatattgtgagcttggcaggacccagtgccggacctggctcttcagaaggcggatgcagccgccggagcagcgttaccgtggaagagcgcgctcgagaacgcgtgccctatggcgtgtcagttgtggagcggaacgcacgcgttataaaatggttgtacgggttacgtcaagctcgggagtcacccgctgccgagggttag

SEQ ID NO: 24733 - DNA, 414 bp, synthetic construct
  source 1..414: mol_type = other DNA; note = Synthetic coding sequence
atgggcctgcgggccggcggcaccctgggccgggccggcgccggcagaggcgccccggaggggcctggaccctccggcggagcccaggggggatcaatccactccgggcgtatcgcagccgtacataatgtgcccttatctgttttgatacggcccttaccttccgtgttagatcccgctaaagtgcagagtctggtggatactatacgcgaggatcccgacagtgtgcctccaatcgacgtactttggattaagggcgctcagggaggcgattatttttattctttcggtggctgccacagatatgctgcatatcagcaactccagcgcgagaccattcccgctaaactggtgcagagtacactttctgatttacgtgtatacctcggggcttcaactcccgacttgcagtag

SEQ ID NO: 24734 - DNA, 1731 bp, synthetic construct
  source 1..1731: mol_type = other DNA; note = Synthetic coding sequence
atgaagtgccactacgaggccctgggcgtgcggcgggacgccagcgaggaggaactcaagaaggcctataggaaactggctttaaagtggcatcctgataagaatctagataacgctgcggaggccgcagagcagttcaagcttatccaggctgcatatgacgtgctatccgacccgcaggagagagcatggtacgataatcatagagaagcgctcctcaaaggcggatttgacggcgagtaccaggacgattccctggatctcctccgctatttcactgtcacctgctattcagggtatggggacgacgagaagggcttttatacagtctacagaaatgtctttgaaatgatcgcgaaagaagaattggagagcgtcctggaggaagaggtagatgatttccctacatttggggactcccagtctgactacgataccgtggtccaccccttctacgcctattggcagagtttctgcacccaaaaaaacttcgcctggaaggaggagtacgacactcgccaggccagtaacagatgggaaaagagggcgatggaaaaggaaaacaaaaaaattagagacaaggcaaggaaagagaagaacgaacttgtacgtcagctcgtagccttcatcagaaagcgagacaagcgagttcaagcacacagaaagctggtggaggagcagaatgcggagaaagccagaaaggccgaagaaatgaggaggcaacaaaaactgaaacaggcaaagcttgttgaacagtatagagaacagtcatggatgaccatggcaaatctggagaaagagctgcaggaaatggaggcccgttacgagaaggagtttggagatgggtccgatgaaaacgaaatggaggagcacgagttgaaagacgaagaggatggaaaagacagcgacgaagctgaggatgctgaactgtacgacgatctctactgcccggcatgcgacaagagctttaaaacggaaaaggctatgaaaaatcacgagaaaagtaagaagcaccgcgaaatggttgctctgctgaaacagcagctcgaggaagaagaggagaacttctcccgtcctcaaatcgatgagaatccattggacgataactccgaagaagaaatggaggatgctccaaagcaaaaattgtctaagaagcaaaaaaaaaaaaagcagaagcctgcccaggatgttccagggaaggattcttatctgcctgcagcacatttccagatggcttgggggaagaagtgcgtcctgggcgaacggcgggacggcgagtccgagcataagtgcgcaaagatgctgctggagaatcgacagaactacgacgacaattttaacgttaatgggccaggcgagggtgtgaaggtggacccagaggatacgaatctaaaccaggacagcgccaaagagctggaggactctccccaggaaaacgtgagtgttacagagatcatcaagccttgcgacgaccccaagagcgaggcgaaatccgtccctaagccgaagggaaagaaaaccaaggacatgaaaaaacccgtcagggtcccagcagaaccacaaacaatgagcgtcctcatctcttgtacaacttgtcacagtgagtttcccagtagaaacaaattattcgatcacctgaaagcaactggacacgctagagcgcccagtagtagctctctgaattcagccacatcgagccagagcaaaaaggagaaacgaaaaaatcgatag

SEQ ID NO: 24735 - DNA, 798 bp, synthetic construct
  source 1..798: mol_type = other DNA; note = Synthetic coding sequence
atgctggccctgaccgtgctggagacctgcgtgaagaactgcggccaccgctttcacgtgctggtggcatcacaggatttcgtcgagagtgtactcgtgcgaaccatccttcccaaaaataacccaccaacgatcgtgcacgacaaggtgttaaatctcatacaaagctgggccgatgcttttcggtcctctcccgacctgaccggcgtggttactatctatgaagatctgagaagaaaggggctggaatttcccatgaccgatctggatatgctgagtcccatccacacaccccagcgcactgtgtttaatagcgagactcagtccggccaagattcagtcggaactgactcttctcagcaagaagattccgggcaacatgccgctccccttcccgctcctcccatattaagcggtgacactcctattgcccctacgccggagcagatcgggaagcttagatcagagctggagatggtttccggaaatgtgcgcgtgatgtctgagatgcttacggagcttgtgccgacccaagctgagccagcagacctggagcttctccaagagctgaaccggacctgtcgggctatgcaacaacgggtgcttgaactgatcccccaaatcgctaatgagcagctaaccgaggagctgctgatcgtgaacgacaacctcaacaatgtgtttctccgtcatgaacgagacaggggactcaccgtgttacccaggcttgtatcaaactcctggcctcaggcagtgctgccaccatggcctccgaaggccctggtgctacaggcctag

SEQ ID NO: 24736 - DNA, 6273 bp, synthetic construct
  source 1..6273: mol_type = other DNA; note = Synthetic coding sequence
atggacgaggtggagcaggaccagcacgaggcccggctgaaggagttgttcgattcctttgataccaccgggaccggtagcctgggacaggaggagctcacggacctgtgtcatatgctctcactggaggaagtagcccctgtgctccaacagactctgctgcaggacaatttacttgggcgagtgcatttcgatcaattcaaagaggccctcatcttaatcctgtccagaactctctcgaacgaagaacacttccaggagccagattgtagccttgaagctcagccaaaatatgttagggggggtaagcgctacggaagacgcagcctgcctgaatttcaggagtcggtagaggaatttccggaagtgactgtcattgaaccattggacgaagaagctaggccatcccacattccagccggagactgttccgagcactggaagacacaacgcagtgaggagtatgaggccgaagggcaattacggttttggaaccccgacgacctgaatgcgagtcagtctggatcgtccccacctcaggactggattgaggagaagcttcaggaggtctgcgaagaccttggcataacaagggacgggcatctcaacaggaagaaactagtgtctatctgtgagcagtatggcctccagaatgtggatggggaaatgttggaagaggttttccacaatctcgaccccgacggtaccatgtccgtggaggacttcttttatggactcttcaagaatggaaagtccctaaccccttccgctagcaccccttaccgacaacttaagaggcacttgagcatgcagtcctttgatgagtctgggcgcaggacaacaaccagctctgctatgacatcgactatcggttttagagtgttcagctgcctggacgacggaatgggtcacgccagtgtggaaagaattctggatacctggcaggaggaggggattgagaattctcaggaaattctgaaagctctggacttttccctcgacggaaatataaacctgactgagctgactctggccctcgagaacgagcttctggtcactaaaaatagtatacatcaagccgccttggcatcctttaaggctgaaatacgacacctcctcgagagagttgaccaggtggtcagggagaaggaaaagctgaggtccgatctggacaaagccgagaagctcaagagtctgatggcatccgaggtagatgaccatcacgctgcaatcgagcgaagaaatgaatacaatttgaggaagctggacgaagagtacaaggaacgaatcgccgcactgaaaaatgaactgcgaaaggaaagggaacagatcttgcagcaggcgggcaagcagagactggagttggagcaggagattgaaaaggcgaagacagaagagaattacatccgggaccggcttgccctaagtctcaaagaaaattcgagattggagaacgagctcctggaaaatgctgaaaaactggccgaatatgaaaaccttaccaataagctgcagagaaatctagagaacgtccttgccgagaagttcggtgatttggatccctcttcagccgagtttttcttgcaggaggagcggttaacccagatgcgcaatgagtacgagcggcagtgtagggtcttgcaggaccaggtggacgaactgcaatccgagttagaggagtacagggcacagggtagagtgcttaggctcccgctgaagaattcgcccagtgaggaggtggaagccaattcggggggaattgagccagagcacgggctcgggtcagaagaatgcaatcctcttaacatgagcattgaggctgaattggtgattgaacagatgaaagagcagcaccacagagatatctgttgtctgagactcgagctcgaagataaagtgcgccactatgagaagcagttggacgagaccgtagtcagctgtaaaaaggcgcaggagaacatgaagcagcgccatgagaatgagacacatactttagaaaaacagattagtgatctgaaaaacgagattgctgagcttcagggacaggcggctgtgttgaaggaagctcaccacgaagcaacgtgcagacatgaggaggagaaaaagcagctacaagtgaagctggaagaggagaagactcatctccaagagaagctgcggctacaacacgagatggagctgaaggccagattaacccaggctcaggcaagttttgagagggagcgtgagggactgcagtccagtgcatggactgaggagaaggtacgaggtcttacccaggaactggagcagttccaccaggagcaactgacatcgttagtcgagaagcacaccttagagaaagaggagctcaggaaagaattactcgaaaagcatcagagggagctccaagagggacgggagaaaatggagactgagtgtaaccgccgtaccagccaaatcgaagcccagtttcagtctgactgtcagaaggtgactgaacggtgcgagtccgcactgcagtctctagaaggcagatacaggcaggagcttaaagatctccaggaacagcagcgagaggagaaaagtcagtgggagtttgagaaagatgaattaacgcaggaatgcgccgaggcccaggagctgctcaaggaaaccctcaagagagaaaagacgacatcactggtgctgacacaggagcgggagatgttggagaaaacctataaggagcatctcaactcaatggtagtagagcgtcaacagctgctccaggacttggaagatcttcgcaacgtctctgagacccagcagtccctgctgtccgaccagatcctagagttgaagagctcccacaagagggagctgagagaaagggaagaggtgctatgccaagccggcgcctcggaacaacttgcatcccagaggctagaacggcttgagatggagcacgaccaagagaggcaggaaatgatgagcaagcttcttgccatggaaaacatccataaggccacgtgtgagaccgccgaccgcgagcgggctgaaatgagcacagaaatatcccgcctgcagagtaagattaaggagatgcagcaggcgaccagtcctctttcaatgctccagtctggatgccaggtaattggggaggaagaagttgaaggtgatggagcccttagcctgctccagcagggcgaacagttgctggaggaaaacggcgatgtgttgttaagcctgcagagggcccatgagcaggccgttaaagagaacgtgaaaatggcgactgaaattagtcgactgcaacagcgcctgcagaaactcgaaccgggattggtcatgtcatcctgccttgatgagcctgcaactgagtttttcgggaacactgcggagcagacagaacagttcctgcagcagaataggaccaagcaggtcgagggagtcacacgccggcacgtgttaagtgatctagaagatgacgaagtgagggatctcggctccaccggtactagttctgttcagcgccaggaggtcaaaatcgaggagtcagaggcctccgttgaagggttctctgagctcgagaactctgaggagacgcgaacagagtcctgggagttgaagaaccagatctctcagctccaggaacagctgatgatgctgtgcgctgactgcgacagagcctccgagaagaagcaggatttgctattcgatgtgagtgtgctgaagaagaagctgaaaatgctcgagcgcatacctgaggcaagccctaagtataaactcctgtacgaggacgtttcacgtgagaatgactgcctgcaggaggaactacggatgatggaaactaggtacgatgaggctttggagaataataaagaactgaccgctgaggtttttcggttgcaggacgagctcaagaagatggaagaggtcaccgagacttttctttccctcgaaaaatcttacgatgaagtaaaaattgaaaatgaaggtctcaatgtgcttgtgctaagattgcaaggcaagatcgaaaagctgcaagagtccgttgtacagcgctgtgactgctgcctgtgggaagcttcactcgaaaatcttgaaatagagccagatggaaacatcctccagctgaatcagacactggaggagtgcgtaccgcgagtgaggtcggtgcaccacgtcatcgaggagtgcaagcaggagaaccagtacctagagggtaatacccaactgctcgagaaagtcaaggcgcatgaaattgcttggttacatggcactatccagacccatcaggaaaggcctcgagtgcaaaatcaagtcatcctcgaagaaaacaccacacttctcggctttcaggacaagcattttcagcaccaagctacaatcgctgagctggagctggagaagaccaagttgcaggagctaaccagaaaattgaaagagcgagtgactatcctggtgaagcagaaagatgtactgtcacacggggaaaaggaggaagagctgaaggccatgatgcatgatctgcaaatcacctgctccgaaatgcaacagaaagtcgagttgctccgatacgagagcgaaaagctccaacaggagaattccattctgaggaacgagatcactaccttgaacgaagaggactcaatctctaacctgaagctgggcactttaaacggaagtcaggaggagatgtggcagaaaacggaaactgtgaagcaggagaacgccgctgtgcaaaagatggtggaaaaccttaagaaacagatttctgagctcaaaatcaagaatcaacagcttgaccttgaaaacacagaactatcgcagaagaatagccagaaccaggagaaattacaggaactgaaccagcgcctgactgaaatgctgtgtcagaaggaaaaggagccgggtaattcggcacttgaggagagagaacaggaaaagtttaacctaaaagaggagctcgagcgttgtaaggtccaatcatcaactctcgtgagtagtctggaagcagagctgtctgaggtgaagatacaaactcacatcgtgcagcaggaaaatcacttactgaaggacgaactggaaaagatgaagcaactgcataggtgtccagacctcagcgattttcaacagaagattagtagtgtcctatcttataatgagaaattgctcaaagagaaggaggccctgagcgaggaactgaattcgtgcgtcgataagcttgccaagtccagcctgcttgaacacaggattgcaacaatgaagcaggaacagaaaagctgggagcatcaaagcgcttccctcaaatcacaactggtcgcgtcccaagagaaggtgcagaacttagaggataccgtgcagaacgttaacctacagatgtctcgcatgaaaagcgatctccgggtgacccagcaggagaaggaggccctgaagcaagaggtcatgtccttacataaacagctgcagaacgctggggggaagtcttgggcaccagagatagcaacccacccttccggcttgcataaccagcaaaagcgtctgtcttgggacaaacttgatcatctaatgaatgaggagcagcaattactctggcaagagaacgaaaggctgcagactatggtacagaataccaaagccgagctaacccattcacgagaaaaggtccgccagcttgaatccaatctgctgcctaaacatcagaagcacctaaacccctccggtaccatgaatccgacggagcaggaaaagctgagcctgaagcgcgagtgtgatcaatttcagaaggagcagtcccccgccaacagaaaggtgtctcagatgaacagccttgagcaggagcttgagacgattcacctagagaatgaaggacttaagaaaaagcaggtgaaactggacgaacagcttatggagatgcaacacttaagatcgactgcaacacctagccctagtcctcatgcttgggacctccaactactccaacagcaggcctgtcccatggtgcccagggagcaattcctgcaactccaacgacagcttctgcaggctgagagaatcaatcagcatctgcaggaggagttggagaaccggactagtgagaccaacactcctcaggggaatcaggagcaactcgtgaccgtgatggaagagcgcatgatagaggtagaacagaaactgaaacttgtcaagaggctgttgcaggagaaggtgaaccagctgaaagagcaggtgtcattgccaggacacctttgttcacctacctcacactcttccttcaattcctcatttacctctctttactgccactag

SEQ ID NO: 24737 - DNA, 4134 bp, synthetic construct
  source 1..4134: mol_type = other DNA; note = Synthetic coding sequence
atggacgaggtggagcaggaccagcacgaggcccggctgaaggagttgttcgatagttttgataccacaggaacgggcagtttagggcaggaagaactgactgatctctgtcatatgctgagtctagaggaagttgcgcccgtgttacagcagactctgcttcaggataacttgttgggccgcgttcacttcgaccaatttaaagaggcgttgattctgatcctgagtcgtacactgtcaaacgaggaacacttccaggagcccgactgttcactggaggcacagcccaaatatgtgaggggcgggaaaaggtatggaaggcgaagtctgccagaatttcaggaaagcgtagaggaatttcctgaggtgaccgtgattgaacctctggacgaggaggcccggcccagtcacatccccgccggcgactgttccgagcactggaaaactcaaaggtcggaggagtacgaggccgaggggcagctgcgcttctggaatccagatgatctgaatgctagccagagcggctcctccccacctcaggattggatagaagagaagttacaggaggtctgcgaagacttggggatcacacgcgatggccatttaaacagaaaaaaactggtgtctatttgtgagcagtacggtctgcagaatgtcgatggtgagatgctcgaggaggtgtttcacaatttagatcctgacggcaccatgtcagttgaggatttcttttacggactctttaagaacggtaagtcactcaccccgtcagcgtccacaccataccgacaactcaagagacatctttcaatgcagtcattcgacgagtcgggtcgacggacgacaacctcctcagccatgacctccaccattggatttagggtgtttagttgcctagatgatggcatgggccacgcctccgttgagcgcattctggatacatggcaggaggagggcatagaaaattctcaggagatattgaaagctctggacttttccttagacgggaacatcaatcttactgaactcacattggctctggagaacgagctgctcgtgaccaagaactccattcaccaagctgcgctcgccagcttcaaggctgaaatcaggcatctgctggaaagagtggaccaggttgttcgagaaaaggagaagcttaggtcggacctggataaagccgaaaaactgaaaagtctgatggcttctgaagtggatgatcatcacgccgccatcgagaggcgtaacgaatacaacctgcgaaagctcgacgaggagtacaaggaaaggatcgccgcattgaagaatgagctccggaaggagagggagcagatacttcaacaagccggcaagcagcgcctcgagctggagcaggaaatcgagaaggccaagacggaggaaaactacatacgcgataggctggctctgtcactgaaggagaactccaggctggaaaatgagctgcttgagaatgccgagaagctcgcagagtacgagaaccttaccaataagctccagcggaatctggaaaatgtgttagccgaaaagtttggggatcttgatccatcctcagcagagtttttcctccaagaggaacggctgacacagatgaggaacgaatacgagcgccagtgcagagtcctgcaggaccaggtcgatgagcttcaaagcgagttggaagagtaccgtgctcaaggcagggtgctccgattgccactaaagaacagcccatctgaagaagttgaggctaactctgggggcatcgagccagaacacggtttaggctccgaagaatgtaatcctctgaacatgagcattgaggccgagcttgtcatagaacagatgaaggaacaacatcaccgcgacatctgttgcttaaggttagaactggaggataaagtgcgccattatgagaagcaactagatgaaactgttgtctcttgtaaaaaagctcaagaaaatatgaaacagagacacgagaacgagacacacacactggagaagcaaataagcgatctgaagaatgaaatcgctgagctgcaaggtcaggcagccgtgcttaaggaggcccatcacgaggcgacatgccgccatgaggaggagaagaagcagctgcaggttaagctggaagaagagaaaacacacctgcaggagaagctgaggctgcaacatgaaatggagctgaaggccaggttgacccaggcccaagcatcttttgagcgagaaagagaagggctccagtcaagcgcgtggaccgaagagaaggtgcgcggcctgacccaggagctggagcaattccatcaggaacagctgactagtcttgtcgagaagcataccctggagaaggaggaattacgcaaggagctcctagaaaagcaccagcgagaattgcaggagggacggtacgagtccgagaagcttcagcaagaaaactctattcttcggaatgagatcacgactttaaatgaggaagattccatttctaacctgaagctcggcaccctgaacgggtctcaggaggagatgtggcagaagactgaaaccgtcaaacaggagaatgcggcggttcagaagatggtggagaatctcaaaaaacagatatctgagctgaagattaagaaccaacagctcgaccttgaaaacacagaattgagtcagaaaaactcgcagaatcaagagaagctgcaggagcttaatcaacgccttacagaaatgctgtgccagaaggagaaagagcccgggaacagcgccctggaggaaagggagcaggagaaattcaatctgaaagaggagctggagaggtgcaaagtgcagtcatcaacactggtgtcttcactcgaagccgaactgtcagaggtgaagatccagacccacatcgttcagcaggagaaccacctcctgaaggatgagcttgagaagatgaaacagctccaccgttgccctgatctttctgattttcagcagaagatatccagcgtcctgtcatacaacgagaaattgctgaaagagaaagaagcactgtcagaagaactcaattcttgtgtggacaagctggcaaagtcctcactgctggagcatcgcatcgcaactatgaagcaggaacagaaaagttgggaacaccaaagcgcgagtctcaaatctcaactggttgcatctcaggagaaagtccagaacttggaggatactgtgcagaatgttaaccttcagatgagtaggatgaagtcagacctgcgggtaacccaacaggaaaaagaagcactgaagcaggaggtcatgtctttacataagcaactccagaatgcaggtgggaagtcatgggcccctgaaatcgctacccaccctagtgggctgcacaaccagcagaagcgccttagctgggataaactcgatcatctgatgaatgaagagcagcagctgctgtggcaagagaacgagcgattgcagacaatggtacagaataccaaggccgaactcacccattcccgcgaaaaggttcgccagcttgagagcaacctgctgcccaagcaccagaaacacctgaaccctagcggaaccatgaaccctaccgaacaggagaagttgtctcttaaaagggaatgtgatcagttccagaaggagcagtccccggccaatcggaaagtgtcccagatgaacagtctcgagcaggagttagagactatccacttggagaatgagggtttgaagaagaaacaggtgaaacttgacgaacagctcatggagatgcagcacctgcgttccacagctactcccagcccctctccccacgcctgggacctccagttacttcagcagcaagcctgccccatggtgcccagggaacagtttttacagttgcagcgccaactgctgcaagccgagaggatcaaccaacatctccaggaagaactcgaaaatcgcacatccgaaactaacacgcctcaggggaatcaggaacagctcgtcaccgtcatggaggagcggatgatcgaagtcgagcagaaactcaaattggttaaacggctgctgcaggagaaagtgaaccagctgaaagaacaggtgtccctgccggggcacttgtgttcccctaccagccactcctcgttcaattccagcttcacttcactttactgtcactag

SEQ ID NO: 24738 - DNA, 3171 bp, synthetic construct
  source 1..3171: mol_type = other DNA; note = Synthetic coding sequence
atggccaccggcaactacttcggcttcacccacagcggcgccgccgctgctgctgctgcagctcagtatagccagcagccagcaagtggggtggcctactctcaccccactacagtggctagctacactgttcatcaggctcctgtggccgcccacaccgtgaccgccgcgtatgctcccgctgccgccaccgtagcggtcgccaggccagcccctgtggctgtggctgctgctgctaccgcagccgcctatggtgggtaccctacagcccacacggctaccgactacggctatacgcagaggcaacaggaggccccccctccgcctccacccgccacaacccagaattatcaggattcctacagttacgtgagatcaacagcacccgccgtagcttacgactccaaacagtattaccagcagccaaccgccaccgcagccgccgtagcagccgccgcgcagccacagcctagtgtggcagagacgtactatcagactgcgcccaaagccggatattctcagggggcaactcaatacacccaagctcagcagacgcggcaggtgacagctattaaacccgccacaccatccccagcaactactaccttctctatctaccctgtgagttctacagtccagcccgtggccgcggctgcgacagtcgtgcccagctatacccagtcagcgacctatagcactaccgcagtgacctactctggcacctcttacagtggctatgaggcagccgtatatagcgccgcatcctcctactatcaacagcaacagcagcagcaaaagcaggcagctgctgccgcagccgctgccgcggcaactgccgcctggacaggcaccacatttacaaagaaggcgccattccagaacaagcaactgaagcctaaacaaccccccaaaccaccccaaatccactattgtgatgtgtgcaaaataagctgtgcaggccctcaaacatacaaagagcacctggagggccagaagcacaaaaagaaagaggcagctctgaaagcatcccagaatactagctcaagcaacagcagcaccagggggacccagaatcagcttaggtgcgaactatgcgacgtgagttgtactggcgccgatgcgtacgccgcacacattcgaggcgccaagcaccaaaaagtggtgaaactccacactaaattaggcaaacccattcccagtacggagcccaacgttgtttctcaagctaccagctccactgccgtcagcgcctctaagcccaccgcttcgcccagctccattgcagccaataactgtacggttaatacgagctctgtggctacaagcagcatgaaagggctgaccaccacagggaactccagccttaactccacttcaaatactaaagtgtctgctgtacctacaaatatggctgccaagaagacatctaccccgaagataaatttcgtcggggggaacaaattgcaatccaccgggaataaggccgaagacatcaaaggaaccgaatgcgtgaaatctaccccagtaactagcgctgtgcagattccggaagtcaaacaggacacagtttcggaaccagtgactcccgcatcgctcgctgctctccaatccgatgttcagcctgtgggccacgattatgtcgaagaagtgcggaatgatgagggtaaggtgatccgctttcactgcaagctctgtgaatgtagttttaacgaccctaatgccaaggagatgcacctgaagggccggaggcataggttgcagtacaaaaaaaaggttaaccctgatctgcaggtggaggtaaaaccatcgattagggcccgcaagatccaggaggaaaagatgcggaagcagatgcagaaagaggagtattggagaaggcgggaggaggaggaaaggtggagaatggagatgcggagatatgaggaggatatgtattggcgaagaatggaagaggaacagcaccactgggatgacagaagaagaatgcctgatggcggctatccccatggcccccccggcccccttggacttcttggcgtgaggccaggaatgcctccacagcctcagggtccagccccgctgcgacggcctgactccagtgatgaccggtacgtgatgactaaacacgccactatctaccctactgaagaagaactacaggccgtgcagaagatcgtctcaattaccgaacgtgccctgaaactggtaagtgacagcttgtccgagcacgagaagaataaaaataaggaaggggatgataagaaagaagggggtaaggacagggccctgaagggtgtgcttagggtgggagtgctcgctaaggggttacttctcaggggagaccgaaatgtgaatctagtgttactctgctccgagaaacccagcaagacacttctctctagaatcgccgaaaacttgccaaagcaactcgcggttatctctccggagaaatacgacattaaatgcgctgtgagtgaagcagccattatcttaaacagttgtgttgagcccaagatgcaggtaacgatcaccttgacgagtcccattatcagagaagagaatatgagggaaggggacgtcacatctgggatggtgaaggatccgcccgacgtgttggacagacaaaaatgtcttgatgcattagcagcccttaggcacgccaagtggttccagcaggcccgcgccaacggcctccaatcctgcgtcataataatccggatcttgcgggatctatgtcagagggtccctacttggtcggattttccatcttgggcaatggagctgttggtcgaaaaggcgatttcgtccgcctcaagccctcagtcaccgggggacgccctacggagggtttttgagtgtatttcctcaggtatcattctaaaaggcagcccgggcctcctggacccctgcgagaaagacccgtttgataccctcgcaactatgactgatcagcagcgcgaagatatcacaagcagcgcccagtttgctttgaggctactggcattccgccagatccataaagtgttgggcatggacccactgccacagatgtcccagcggttcaatattcacaataacagaaaaagacgcagggatagcgacggaatggacctgaagcttcgggggaaaaagacgaagaagatcatgattaccttcaaaaaatgtctttag

SEQ ID NO: 24739 - DNA, 390 bp, synthetic construct
  source 1..390: mol_type = other DNA; note = Synthetic coding sequence
atgggctgctgcggctgcagcggcggctgcggcagcggctgcggcggctgtgggtccggttgtgggggatgtggcagttcctgttgcgtgccaatctgctgctgtaagcccgtctgctgttgcgtgcctgcatgtagctgcacctcttgtggatcatgcggaggttccaaaggatgttgtggatcctgcggcggttctaaggggggatgtggaagttgcggaggatcaaagggcggctgcggtagttgtggatgctctcaatgcagttgctgcaagccgtgttattgctcttccggatgtggatcctcatgctgtcaaagtagctgttgcaagccttgttgttctcaggctagctgttgtgtgccaatctgttgtcagtgcaagatttag

SEQ ID NO: 24740 - DNA, 1344 bp, synthetic construct
  source 1..1344: mol_type = other DNA; note = Synthetic coding sequence
atgcccatgcccaccgagggcacccccccccccctgagcggcacccccatccccgttcctgcatacttcaggcacgcggagccaggttttagccttaagcgcccaagagggctctcgcgtagcctgccccctccaccccctgccaagggatctataccaatatctcgattgtttcccccccgaactcctgggtggcaccagctgcagcctcggcgcgtttcttttcgtggggaggcctcagaaacactgcaaagcccaggctacgacccttcccgtcctgagagctttttccagcagagtttccaaaggctaagcaggctgggacacggctcttacggggaggtcttcaaagtgcggtctaaggaggacggccggttatatgctgtaaaacgatctatgtctccattccgcggaccaaaagatcgtgcgcgcaagttggcagaagtgggttctcacgagaaggtggggcagcatccttgctgcgtcagactggaacaggcctgggaggaaggcgggatactgtacctgcaaacagaactgtgcggccctagtctgcagcagcattgcgaggcttggggcgctagtctgccggaagctcaggtgtggggctacctgcgtgatactctcctggcgctggcgcatctgcactctcaaggattggttcatctggacgtgaagccagctaatatctttctgggacctaggggcagatgcaaacttggggatttcggcctcctggtggagctgggaaccgccggcgcaggggaggttcaggagggcgatccgcgatacatggcccccgaactcttgcaaggctcctatggcactgctgcagatgtgttcagcctaggactgactattctagaggtggcatgcaatatggaattgccacatggtggagaaggttggcaacaactgaggcagggctatttgccccctgagttcacagctgggctgtcatccgagctcagatctgttttagttatgatgttagaacccgatcccaagcttcgtgcgacggccgaggcacttctagctctgcctgtactccggcaaccccgggcctggggggtgctctggtgcatggcagccgaagcactctcaagaggatgggccttgtggcaggccctgctggcactgttgtgttggctctggcacggcctggctcaccccgcaagttggctccagcccttggggcctccggcgacccccccaggatctccaccatgtagcctgttgctcgattccagtcttagttccaattgggacgacgattccctcgggccttgtgtgctgaaacgtactgaaggtgctctcgaatgcagtcaaatggaggggctgtag

SEQ ID NO: 24741 - DNA, 1005 bp, synthetic construct
  source 1..1005: mol_type = other DNA; note = Synthetic coding sequence
atgagcgccgccaaccccgagacccccaacagcaccatcagccgggaggcttcgacccagagtagctctgccgcggctagccaggggtgggtcctgcccgagggtaaaatagttcccaatactgtgttcgtaggcggtattgatgcccgaatggacgaaactgagatcgggtcttgctttggaagatacggctctgtaaaagaggtaaaaataattaccaaccgcaccggggtttcgaagggatacgggttcgtcagtttcgtaaatgacgtggacgtgcagaagatcgtggggtctcaaatccactttcatggaaagaaactgaaactggggcctgctattcgaaaacagaaactgtgcgcgcggcatgtgcagccaaggcctctcgtggtgaacccgcctcctcctccacagttccagaacgtgtggcggaatccgaatacagagacatatctccaaccccagatcactcccaaccctgtcactcaacatgtccaggcctatagtgcctatccccactcccctggccaggtaattactgggtgccagcttctggtgtataactatcaggagtatcctacatatcctgattcggccttccaagtgaccactggctaccagctcccagtgtacaattaccagcccttccccgcatatccccggagccccttccaggtgactgctggctatcagctgcccgtgtacaactaccaggcattccctgcttacccaaacagcccgtttcaggtggctacgggctaccagtttcccgtttacaattatcagccgtttcctgcatatccctcctccccatttcaggtcaccgccggctaccaactcccggtctacaattaccaggcttttccggcgtacccgaacagtcctttccaggtagccactggctaccagttccctgtctataattaccaggccttccccgcatacccaaattcccccgtgcaggtgaccacgggttaccagctaccagtgtacaactatcagtag

SEQ ID NO: 24742 - DNA, 1173 bp, synthetic construct
  source 1..1173: mol_type = other DNA; note = Synthetic coding sequence
atgagcgccgccaaccccgagacccccaacagcaccatcagccgggaggcttcaacccaatcatcatctgccgctgccagccaggggtgggttttgccggagggtaagattgttcccaatacagttttcgtgggaggtatagacgccaggatggacgaaacagagattggttcctgctttggccggtacggttccgtgaaggaggttaaaatcatcaccaatcggacgggcgttagtaagggctacgggtttgttagtttcgtgaacgatgtggatgtgcaaaaaattgtagggtctcagatccattttcatggcaagaagctcaagctcggccccgctatcagaaaacaaaaattatgtgcccggcatgtgcagcctagacccttggtcgtaaaccccccaccaccaccacagttccagaatgtgtggaggaatcctaatactgagacataccttcagccacaaatcacaccaaaccctgtaactcagcatgtgcaagcctatagtgcctatccgcattctcccggccaggtcataaccggttgtcagctgcttgtctacaactatcaagagtatcccacttacccagatagtgcttttcaggtgaccactggttaccaattacccgtttacaattaccagccattccctgcttatcccaggagcccgttccaggtgactgccggctaccagcttccagtgtacaattatcaggcatttccggcttaccctaattccccctttcaggtagccaccggataccaatttccggtgtataattaccaaccatttcctgcatatccttcctctccttttcaggtgacagccggataccaattgccggtttacaattaccaagcctttcctgcctacccaaatagtcctgtccaggtcactaccgggtatcagcttcccgtatataactaccaggccttcccagcttatccaagcagtccatttcaggtgaccacgggctaccaactacctgtttacaactatcaggcctttcccgcataccccaactccgccgttcaggtgacgacagggtaccaatttcacgtctacaattaccaaatgccgccacagtgtcccgtgggcgagcaacggcggaacctgtggaccgaggcctataaatggtggtatctcgtctgtctgattcagcgaagggactag

SEQ ID NO: 24743 - DNA, 1173 bp, synthetic construct
  source 1..1173: mol_type = other DNA; note = Synthetic coding sequence
atgagcgccgccaaccccgagacccccaacagcaccatcagccgggaggcctccacccaatcatcctcagccgcagcttctcaggggtgggtgctccccgagggcaaaatcgttcctaatacagtttttgtaggaggcatagacgcgaggatggatgaaaccgaaattggatcttgttttgggcgatatggcagtgttaaggaggtaaagatcatcacaaacaggacgggcgtgagtaaggggtatggttttgtttcattcgtgaacgacgtggacgtgcagaaaattgtcggtagtcagatccactttcatgggaaaaagcttaagttggggccggccatccgaaagcagaagctgtgtgccagacacgttcagccgagaccattggtggtcaatccccctcctcctccccagttccaaaacgtgtggagaaaccccaataccgagacatacctacaaccacaaattacccctaaccctgtaacacagcatgtgcaggcttactcggcatacccacactcccctggtcaggtgataactggctgccagctcctggtttataattaccaagagtaccccacttatccagactcagcttttcaggtcacgaccggataccagctgccagtttacaactaccagccatttcccgcttacccacggtccccattccaggtgacagccggataccagttgcccgtgtacaattatcaagctttccccgcctatcctaatagtccttttcaggtggctacagggtaccaattccccgtgtacaactaccaaccattccccgcctaccccagctctcccttccaggtaactgcaggctatcagctgcccgtgtacaactaccaggccttcccggcctacccgaattcacctgtccaggttacaactggttatcagttgccagtgtacaactaccaagctttccctgcctatcccagcagtccgttccaagtcactacagggtaccaattgcctgtatacaactaccaggcgtttccagcatacccgaatagcgctgttcaggttacaaccggatatcagtttcacgtgtataattaccaaatgccccctcagtgccctgtgggggaacagcgacggaacctgtggacagaagcgtataagtggtggtacctcgtgtgtctgatacagcggcgcgactag

SEQ ID NO: 24744 - DNA, 1101 bp, synthetic construct
  source 1..1101: mol_type = other DNA; note = Synthetic coding sequence
atgagcgccgccaaccccgagacccccaacagcaccatcagccgggaggctagcactcaaagtagctcagccgctgcgagtcagggctgggtgctgccagaaggtaagatcgttccaaacaccgtctttgtgggagggattgatgctagaatggatgagacagaaatcggtagctgttttgggcggtatggctctgtgaaagaagtgaaaatcatcacaaatagaaccggtgtgagtaaggggtatggcttcgtgagcttcgttaacgacgtggatgtgcagaaaatagtgggctcccagatccactttcatggcaaaaagcttaaactggggcccgccatcaggaaacaaaagctatgcgcaaggcacgtgcagccgcgtccactggtcgtgaacccccctccacctcctcagttccagaacgtctggcgcaacccaaataccgagacatacctgcaaccccagattactcccaatccagtcacccaacacgtgcaggcatattccgcgtacccccactcccccggacaggtgatcaccggctgccagcttttggtctacaactaccaagagtatcccacttatcctgatagcgcattccaggtcacaacagggtatcagcttccagtctacaactaccagccgttccccgcatatccccgatctcctttccaggttacggcgggctaccagctgccagtctataattaccaagcttttcctgcttacccaaactctccctttcaagttgctaccgggtaccagttccccgtatacaactaccaaccctttccagcatatccctcctctccattccaggttacagcaggctaccaacttccagtgtacaactaccaggccttcccagcatatcccaattctccagtccaggtaacaactggttaccagctacccgtttataattaccaggccttcccagcttaccccaattctgcagtccaagtgacgacaggctaccaattccacgtgtataactaccaaatgcccccgcagtgtcctgttggcgagcagcgccgaaacctctggaccgaagcatacaagtggtggtatctggtgtgtctgatacagagaagagactag

SEQ ID NO: 24745 - DNA, 1149 bp, synthetic construct
  source 1..1149: mol_type = other DNA; note = Synthetic coding sequence
atgagcgccgccaaccccgagacccccaacagcaccatcagccgggaggcgagtactcagagtagcagtgccgccgccagccagggctgggttttacctgaaggaaaaattgtaccaaacaccgtgttcgtcggcggtatcgacgcgaggatggatgagacggaaatcggcagctgttttgggagatatggaagtgttaaggaagtgaagatcataaccaacaggactggcgtgagcaagggctacggcttcgtgagtttcgtaaacgacgtggatgtgcaaaagatagtgggcagccagattcacttccatggcaagaagctcaagctgggtccagctatccgcaaacagaagctgtgcgcaagacacgtgcaaccacggccactcgtggtgaatccacctcctccaccccagttccaaaatgtttggagaaatcctaatacagaaacatacctccagccacaaatcaccccaaatcccgtgacgcagcacgtgcaggcctactccgcttacccccactcccctggccaggtcatcacaggttgccaattgttggtttacaattaccaagagtacccaacctaccccgattccgccttccaggttactactggataccagctgccggtctataattatcagccattccccgcatatccaagatcaccttttcaggtgacagccgggtatcagcttccagtgtacaattaccaggcctttcccgcttaccccaactcaccattccaggtggccaccggttatcagtttcccgtctacaattaccaaccatttcctgcatatccttccagcccctttcaggtcacagccggctatcagctgccagtgtataactaccaggcctttccagcctatccaaattcccctttccaggtcgccacgggctaccagttccccgtgtacaactaccaggcatttccagcgtatcccaacagccccgttcaggttaccacaggctaccagttgcccgtctacaactaccaggccttcccagcctaccccaactctccgttccaggtggccacaggatatcagttccctgtctataattaccaagctttcccagcatatcctaacagcccagtgcaggtgacaactggctatcagttgccagtctataattaccagtag

SEQ ID NO: 24746 - DNA, 1842 bp, synthetic construct
  source 1..1842: mol_type = other DNA; note = Synthetic coding sequence
atgagcgccgccaaccccgagacccccaacagcaccatcagccgggaagctagcacacagagttcatcagcagctgcgagccagggctgggtgctgcccgagggtaagatagtacctaataccgtcttcgtgggagggatcgacgccaggatggacgaaaccgagataggaagttgtttcggcagatacggaagcgttaaggaggttaagatcattactaacaggacaggggtgagcaagggctatggcttcgtgtctttcgtcaatgacgtggacgtgcagaagatcgtgggcagtcagatccacttccatgggaaaaaactcaaactggggcctgctatcaggaaacagaaattatgtgccaggcacgtgcaacctcggcctctggtcgtgaatccccctccacctccccagtttcagaacgtgtggcgaaaccccaacaccgaaacctacctgcagccgcaaataacccccaatccggtcactcagcacgtgcagtccgccgcgaaccctgagactcctaatagtactattagccgcgaggcgagcacgcaatcaagcagtgctgctgcaagtcaggggtgggttctccccgagggtaagatcgtgccgaacacagtcttcgtcgggggaatcgatgcacgtatggacgagacagagataggatcctgtttcggaaggtacgggagtgtgaaggaagttaagatcatcactaatcggactggtgtgtctaagggctatggtttcgtgtcctttgtcaacgacgtagacgtacagaagatcgtgggctcccagatacatttccatggtaagaaactgaagttaggccctgcaatccggaaacagaagctgtgtgcaagacatgtgcagcctcgccccttagtagtgaacccgcccccgcccccacagttccagaatgtttggcgaaaccccaacactgagacttatctgcagcctcagatcacccccaacccagtgacccaacatgtgcaatccgctgccaaccccgaaacacctaatagcacgataagcagagaagccagcactcagagcagctccgcggccgcaagccaggggtgggtgctccccgaaggtaagatagtcccgaacactgtgttcgtgggcggcatcgatgcccgaatggatgaaacagaaatcgggtcatgctttggccgctacggaagtgtgaaagaggtgaagatcattacaaacagaactggggtcagcaagggttatggatttgtaagctttgtgaacgacgtagacgtgcagaaaattgtgggcagtcaaatccactttcatgggaaaaaactcaagcttggacctgctattagaaagcagaagctctgtgcccgccacgtgcaacctcgtcccctggtggtcaatcccccccccccaccccaatttcagaatgtctggaggaatccaaatacggaaacctacctccagcctcagataacacctaaccccgtcacccaacatgtccaggcttatagtgcctacccgcactctcctgggcaggtgatcactggatgccaactgctggtctacaactaccaggagtatcctacctatccggacagtgcattccaggttacaactggatatcagctccccgtgtacaattaccagcctttccctgcctacccccgcagcccatttcaggtgactgctgggtaccagctgccagtgtacaactaccaagctttcccggcctacccaaactcccctttccaagttgcgacaggctaccagtttccagtgtgtgagatttgcaaaatcctcgtgttgaagaatgcggccgcattcctgtgccattctaaggtcaaccgaagcatatag

SEQ ID NO: 24747 - DNA, 384 bp, synthetic construct
  source 1..384: mol_type = other DNA; note = Synthetic coding sequence
atgcggcccctggacatcgtggagctggccgagcccgaggaggtggaagtcttggagccagaagaagattttgaacagttcctgttaccagtcattaacgagatgagggaagacatcgcctcactgactagagaacatggcagagcctaccttcgaaatcgaagcaagctgtgggaaatggataacatgctgatacaaattaaaacacaggttgaagcatctgaagagtcagcattgaatcacttgcagaatcctggcgatgcagctgagggcagggccgccaaaagatgcgaaaaagccgaagagaaggcaaaagaaatcgccaagatggctgagatgctggtggaattggtgagacggattgaaaaatcagagtcctcctag

SEQ ID NO: 24748 - DNA, 537 bp, synthetic construct
  source 1..537: mol_type = other DNA; note = Synthetic coding sequence
atgatgcgggccatgaagccccccggcggcgagagcagcaacctgtttgggtcccccgaggaggccaccccttcctctagaccaaaccgcatggccagcaacatcttcggtccaaccgaggaaccccagaatattcctaaaaggaccaatccccccggagggaaggggtctggcatcttcgacgaatcaactcccgtacagacccgccagcacctcaatcctcctggagggaaaactagtgatatttttggttccccagtcactgccacttcccgcctcgcccacccaaacaaacctaaggatcatgtgttcctgtgtgaaggtgaggagccaaaaagcgaccttaaggccgctcgttcaataccggccggggccgagccaggtgagaaggggagcgccagaaaagccggacccgctaaggaacaagagcccatgcccaccgtcgactctcacgaaccacggcttgggccgagaccacgctcacacaacaaagtgcttaatcctccaggggggaagtctagtataagcttttactag

SEQ ID NO: 24749 - DNA, 657 bp, synthetic construct
  source 1..657: mol_type = other DNA; note = Synthetic coding sequence
atgttccaggtgcccgacagcgagggcggccgggccggcagccggaagtggcaactgctgactggtagtttggcttcgacgtctccctccctcctgtctgggcaagggccatgggctccgcttcagagggctatgaagccacctgggggcgagtcgtccaatcttttcggctcccctgaagaagcgactccaagctcccggccaaatcgcatggcatctaacatttttgggccgacggaagagccacaaaacattccgaagaggaccaacccacccggcggaaaaggatcaggcatctttgacgaaagtacaccggttcagacgaggcagcatcttaatccccccggtggcaaaacttctgatatatttggtagtcccgtgactgcaacatccaggttagcccacccaaacaagccgaaggatcacgtatttttgtgtgaaggggaggaacccaagtccgacctgaaagcggcgcgcagcatccctgcgggcgccgagccaggcgaaaagggcagtgctaggaaggccggacctgcaaaagagcaggaacccatgccaacagtggactcccatgagccgcgcttggggcccagaccacgatcacacaacaaggtgctcaacccacctgggggcaaatcctccatttccttctactag

SEQ ID NO: 24750 - DNA, 4866 bp, synthetic construct
  source 1..4866: mol_type = other DNA; note = Synthetic coding sequence
atggccggcggccggggcgcccccggccggggccgggacgagccccccgagagctaccctcagagacaggaccatgagctccaggccttagaagccatatatggcgccgattttcaggatctgcgccccgacgcatgcgggcctgtgaaggagcccccagaaattaacctggtgctctaccctcaagggctcacaggcgaggaggtctacgtgaaagtagacctgcgtgtaaaatgccctcctacgtaccccgacgtggtgcctgagatcgagttaaagaatgccaaggggctgagtaatgagtccgtgaatttgttgaagtctaggctggaggagctggccaagaagcattgcggtgaggttatgatcttcgaactcgcctatcacgtgcaaagcttcctctctgaacataacaaaccacccccaaagagctttcatgaagagatgttagagagaagagcacaggaggaacagcaaaggttactggaagctaagcggaaggaggagcaggagcagcgcgagattcttcacgaaattcagcgtcgaaaggaggagatcaaggaggagaaaaagcgaaaagagatggctaagcaggagcgtctagaaatagcaagtctttcgaatcaggaccacacttcaaagaaggaccccggtggccatagaactgcagcaatattgcacgggggatctcccgacttcgtcggcaacgggaaacacagggccaactcatcaggccggtcccgtcgagaaagacagtattccgtctgcaatagcgaggattctcccggatcctgtgaaattctgtactttaacatgggctccccagaccagttaatggttcacaaaggaaaatgcataggatctgacgaacagctggggaagctagtgtataatgcccttgaaaccgcaaccgggggatttgtgctgctgtacgaatgggtgctccagtggcaaaagaagatggggccgttcttaacctcccaggaaaaagaaaagatcgacaagtgcaagaaacagattcaaggtaccgaaactgagtttaatagtctcgttaaactgagccacccaaacgtcgtgcggtatcttgcaatgaatttaaaagaacaggacgatagcatcgttgtggacatcttagtcgaacacatcagcggcgtgtctttggcagcccacctgtctcactcaggtcctattcctgtgcaccagctcagacgctataccgcccagttgttaagtggccttgactacctgcactctaattccgtcgtgcataaagttctgtccgcgagcaacgttctggtcgatgcggaggggactgttaaaattacagattacagcattagtaagagactggctgacatctgtaaagaggacgtgtttgaacagacacgggttaggttctctgataatgctctgccttacaaaactgggaaaaagggtgacgtgtggcgtctgggtctcttactgctgtccctctcacagggccaagaatgcggcgagtacccagtgactatcccgagcgatttgcccgcggatttccaagacttcctcaagaaatgtgtttgcttagatgacaaggagcgctggtcccctcagcaactgctgaaacatagcttcattaatccccagccgaaaatgccactcgtggagcagtctccggaagatagcgaggggcaggactacgtggagactgttattccatctaacagactcccatccgccgctttcttctctgagacacagagacagttctctcgctattttatagagttcgaggagcttcagctgctcggcaagggcgcctttggggcagtgatcaaggtgcagaataagcttgatggttgttgttatgccgtgaagcgtattccaataaaccctgcttcacgccagtttagacgtatcaagggtgaagtgaccctgctttctcgactgcatcatgagaatattgtgcggtattataacgcctggatagaaagacacgagagaccagccggtccaggtacacccccgcccgactcaggtcctcttgcaaaggacgacagagctgcccggggccagcctgcctccgacacggacggtctagactccgtggaggctgccgcacctcctccgatactgagctctagcgtagagtggtccacctcaggcgagcggagcgcgagtgcccggttccctgcgacagggcccggtagctcggatgatgaagacgacgatgaggatgagcacggcggcgtcttctctcagagcttcctgcccgcgtcagactctgagagcgatatcatattcgataacgaagatgagaatagtaagagccagaatcagatggagtattgcgagaaatctacgctcagagacactatcgatcagggcctctaccgtgacaccgtgcggttgtggaggcttttcagggagatactagatggcctggcttatattcacgaaaaaggaatgatacaccgcgatctgaaaccagtcaatatatttctggattcagatgaccatgtgaaaattggcgattttggcttggcaaccgatcatttggccttcagcgctgactctaaacaggacgaccagaccggcgatctgatcaagtccgatccgtctggccacttgacgggaatggtaggcaccgccctgtacgtgtcccctgaagttcaggggagcacaaaatcggcctacaatcaaaaggtcgacttgtttagcttgggcattatcttctttgagatgtcttaccaccctatggttactgcctctgagcggatctttgtccttaatcaactgcgagaccctacaagtcctaagttccctgaagacttcgacgatggtgagcatgctaagcaaaagtcagttatatcttggctgttgaaccatgatcccgcaaaaaggccaaccgccacggaactcctgaagtccgaactattgcctccacctcaaatggaggaaagtgagctgcacgaagtgctccaccacaccttgacaaatgtagatggcaaggcctatcggacaatgatggcacagatcttttcccagaggatttctcccgctattgactacacgtatgactcagatatcttgaaagggaacttctccattaggactgcaaagatgcagcagcacgtgtgcgagacaattatcaggatattcaagcgacacggggcggtgcagctttgtacacccctgttgctgccacggaacaggcagatttatgagcacaacgaagctgccctgttcatggaccactctggaatgctggttatgctgccttttgacttaagaattcctttcgcacgatacgtcgcaagaaataatatattgaacttaaaacgatactgtatcgaaagagtcttccggccccgcaagttggacaggtttcaccctaaagagctgctcgaatgcgcctttgacattgtcacctcaactactaattcctttctgcctaccgctgagattatatacacaatctacgagataatacaggaatttccagccctccaggaaaggaactacagcatttaccttaatcacacaatgttactcaaggctattctactgcactgcggcatccctgaggacaaattgtcacaggtttatatcattctttacgacgccgtgacagagaaactgactcgcagggaagtggaggcaaagttttgcaacctatccctatcctccaacagcctctgccggctgtacaagtttatagaacagaagggagatctgcaggacctgatgcccaccattaattccctaatcaaacagaagacgggaatagcccagcttgttaaatatggtctgaaggaccttgaggaagtggtgggactgttgaagaagctgggaataaaactccaggtgcttattaatctcggtcttgtgtacaaggtccagcagcacaatggtattattttccaattcgtagccttcatcaaacgacgccaaagagcggtcccggaaattctcgccgctggggggcggtatgatctcttgatcccccagtttcgaggtccccaggcacttggaccggttcctaccgctataggcgtgtcaatagcaatcgataagatttccgccgcagtgctgaacatggaggagtcggtgaccatctcgagctgcgatctccttgtggtgtctgtgggtcaaatgtcaatgagccgcgctatcaatctgactcagaaactatggaccgccggcataacagccgagataatgtacgactggtcccagagccaggaggagttgcaggaatactgtcggcaccacgaaattacatacgtcgcattagtttccgataaagagggcagccacgttaaagtgaagagctttgagaaggagaggcagacagagaagagagtcttggagaccgaattagtggaccatgtgctccaaaagctgagaaccaaggttaccgatgagaggaatggacgcgaggccagcgataatcttgctgtgcagaatttgaagggcagtttctctaacgcttcagggctgtttgagatccacggggctaccgtggttccaatcgtctcagtcctagctcccgaaaagttatcagcaagtacccgcaggcgatacgaaacgcaggtccagacgagactccagacaagcctggcaaatttgcatcagaaatctagcgagatagaaatcctggccgttgatctcccaaaggagaccatcctccagttcctgagcctagaatgggatgccgacgagcaggctttcaacacaacggtgaaacagctcttgtctcgactgcctaaacagcggtatctcaagctggtatgtgacgaaatctacaatatcaaagtggaaaaaaaggtgtcagtgttatttctatactcttacagagacgactattaccggatactgttttag

SEQ ID NO: 24751 - DNA, 2388 bp, synthetic construct
  source 1..2388: mol_type = other DNA; note = Synthetic coding sequence
atgaagttcaccaacaccaaggtgcagatgatgcagaacgtgcacctggcgcctgagactgatgaggatgacctgtactcaggctacaacgattacaaccctatatatgatatagaggagcttgagaatgacgctgcctttcagcaggcggtaaggacatcccatggtagaagaccccccatcacagctaagatcagctccaccgctgtgacccggcctatcgctaccggctacgggagcaaaacttccttggcatccagcatcggtaggccaatgactggcgcgatccaggacggcgttacacgtcctatgaccgccgtgagggcagctggttttacaaaagccgccctcagaggatcagccttcgatcccttatcgcagagccggggcccagcttcccctttagaagccaaaaaaaaagactctcccgaggagaagatcaagcagttggaaaaggaggtcaacgaactggttgaggagtcttgcatcgcaaactcctgtggtgatctgaagctggcgctggaaaaagccaaagacgctggtagaaaagagagggtcctggtgaggcagagagaacaggtcaccacaccagaaaatatcaacctagacctgacatactccgtgctcttcaacctggcctctcaatacagcgtgaacgagatgtacgctgaggccttgaacacctaccaggtgatcgttaagaacaagatgtttagtaacgcgggcatattgaaaatgaacatgggtaacatttacctgaagcagagaaactacagtaaagccattaaattttatagaatggcgcttgatcaagtcccttctgttaacaagcaaatgcggatcaaaatcatgcaaaatatcggtgtaactttcatccaagccggtcagtattcggacgcaataaattcatacgaacacattatgtccatggcaccaaacttaaaagctggttataacctaaccatctgctacttcgcgataggcgatcgcgagaagatgaagaaggcgttccagaaacttatcaccgtccctttagagatagatgaggacaaatatatatcccccagcgatgatccgcacacgaatctggttacagaggccatcaagaacgatcatcttcggcagatggagcgagaacgtaaggccatggcagagaaatatatcatgacttctgctaaactgattgcacctgtgattgagacatccttcgcggctggctacgactggtgtgtggaggtcgtcaaggctagccaatacgtagagctggctaacgaccttgagatcaataaggcagttacatacctgcggcaaaaagactacaatcaggctgtcgaaattctcaaggtgctagagaagaaagattcccgtgttaaatctgccgccgcaaccaatctgtctgcgttatactatatgggcaaagatttcgcgcaggcatcctcctatgctgacatcgccgtgaactctgaccgctataatccagctgccctgaccaacaaggggaataccgtgtttgccaatggcgactacgaaaaagccgccgagttttacaaagaggctctgaggaacgacagtagctgcaccgaagccctgtataacattggcctgacgtatgaaaaactgaatagactcgacgaagcacttgactgttttttgaaactgcatgccatcctgcgtaattctgccgaagttctctaccaaatcgcaaatatctacgaacttatggaaaatccatcccaagccattgagtggctgatgcaggtagtgtctgtaatcccaactgatcctcaggttttatctaagctcggggagttatacgaccgcgagggcgacaagagtcaagccttccaatattactatgagtcctacagatacttcccatgcaacatcgaggtcattgagtggctgggcgcgtactacattgacacccagttttgggagaaggctattcagtactttgagagggcctccttgatacagcctacacaggtcaagtggcagctgatggtagcctcgtgcttcaggaggtctggcaattatcagaaggcactggacacctataaggatactcaccgaaagttccccgaaaatgttgagtgcagcgggagcgtccgcactgggcatatggagcgcgacccactgaacctcttgccaaggaaatcggttcttccagggcccgagatcgccaagtgtaactacttctctggtgagaaatactacctcagcgcatttctcagtagttctctgcaccgttcgtggattaaacggtgttcccgaatctgccaaaagaccgaagaagtgggcaagaatgagcgcaataagggcaccgcccacaaggtgcggcagaggtggcagtggggcctgccctggcagaagagaaggaagtgttag

SEQ ID NO: 24752 - DNA, 192 bp, synthetic construct
  source 1..192: mol_type = other DNA; note = Synthetic coding sequence
atgagctactaccggagctactacggcggcctgggctacggctacggaggcttcgggggctggggctacggatatgggtgcggctacggcagtttcaggcgactagggtatgggtgtggatacggaggctatggtttcagttgctgccgtcctttatattacggaggatatggattctcagccttttattag

SEQ ID NO: 24753 - DNA, 135 bp, synthetic construct
  source 1..135: mol_type = other DNA; note = Synthetic coding sequence
atgagctactacggcaactactacggcggcctgggctacggctacgactgtaaatattcatacaccagcgggttcggggcctttcggattctggactgtggctaccgatgtggctgtgggggcgtgtggatctag

SEQ ID NO: 24754 - DNA, 135 bp, synthetic construct
  source 1..135: mol_type = other DNA; note = Synthetic coding sequence
atgagctactacagccacctgagcggcggcctgggctgcggcctggcagtggccgtgaccatgggcaggaccgtggccgtggctgagtatggtcgctgtcgacatggatgccatagcagttattcagcaaggtag

SEQ ID NO: 24755 - DNA, 138 bp, synthetic construct
  source 1..138: mol_type = other DNA; note = Synthetic coding sequence
atgtgctactaccacaactactacggcagcctggactacggctgctcctacggcagcgaatatggcaattctggatacgcttgcaacttcccatgttcctatggcagattcctcctggcccccaggaaaaagttctag

SEQ ID NO: 24756 - DNA, 624 bp, synthetic construct
  source 1..624: mol_type = other DNA; note = Synthetic coding sequence
atgccccacagccactgccacagcctgcggagcttccacaacgccccccccctgtcggcaatcacccacggtacgaacccaatcaccttcgaggatagactttgtctgcctagctcatttcatagtcggacttgcttcctagacaatttccaggaaacatgtaacgagacaacaagttgccagatgacaaattgtgagcaggatcttttcacagacgactcatgtgtccaatcgaattgcttccccggcgttgtgcagacaacatatagcaatagccgtccatgtgaacggactgcctgtcagtccgagtcctcgtcagctgggctggcctgcgtgtcccagccttgccagtctgagtctacacagcagatgggctttgtcgcccagtcctgtcagccagcatctctcaaaggtaattcatgcccgcctaaaaccagtaagtctaaaaattttgagaccttagaaagagcctcctcacaatgtcagtgccagagccagaaccccgagtcatcgagctgccggcccctcgtcaatgtggccccagaaccacagctcttagagtcgtccccaggggttgagcccacatgctgtgtcaccggcggctcgcaactcccatctaaatag

SEQ ID NO: 24757 - DNA, 645 bp, synthetic construct
  source 1..645: mol_type = other DNA; note = Synthetic coding sequence
atggcccacgtgagcagcgagacccaggacgtgagccccaaggacgaacttactgcgagcgaagcttccacaaggagccccctctgcgagcatacctttcctggagattctgatctccgcagcatgattgaagagcacgccttccaggtactgtctcaaggctcccttctggaaagcccgtcttacacggtttgcgtgtcagaaccagacaaagacgatgattttctgagcctcaactttcccagaaagctgtggaaaatcgttgagagcgatcaattcaagagtatcagctgggacgagaacggcacctgtattgtgataaatgaagagctgtttaagaaggagattctcgaaaccaaggccccatataggatctttcagactgacgcgatcaagagctttgttaggcaactcaacctctacggtttcagcaagattcagcagaattttcagcgttcagctttcctggccacgttcttgtccgaagaaaaggaaagctctgtgttgagcaagttgcacgtcttcgtgtttcaccactctctgtttggcgcaaccttcggagaacatcactttcagccctgccccctgccttctggaaataaagctccaatctctacttggagtggcgattcttggctcctgtag

SEQ ID NO: 24758 - DNA, 645 bp, synthetic construct
  source 1..645: mol_type = other DNA; note = Synthetic coding sequence
atggcccacgtgagcagcgagacccaggacgtgagccccaaggacgaacttaccgcttcagaggcctccacccgaagccctctatgtgagcacacatttccaggagactcagatcttcgttccatgatagaagagcacgcctttcaggtgttatcacagggatcacttttagagtcaccttcctacactgtttgtgtcagcgagccagataaggatgatgacttcctctctctgaacttcccccggaaactatggaagatagtggagagcgaccagtttaaaagcataagctgggacgaaaacgggacgtgcatcgttatcaatgaagagctgttcaagaaagagatcctggagactaaggccccgtaccgaatcttccagacggatgccatcaagtcgttcgtgaggcagcttaacctgtacgggttcagtaagattcagcagaactttcagcgcagcgcgttccttgctaccttcctcagcgaggaaaaggagtcaagcgtgctgtccaagttacacgtgttcgtctttcatcactccctgttcggcgcaacctttggagagcaccacttccagccgtgtcccctgccgagcggtaataaagcgccgatcagtacttggagcggtgatagctggctgctttag

SEQ ID NO: 24759 - DNA, 1437 bp, synthetic construct
  source 1..1437: mol_type = other DNA; note = Synthetic coding sequence
atggccgccgccctgaagtgcctgctgaccctgggccggtggtgccctggtcttggggtggccccccaggcacgagcactagcggcactggtgcccggcgtcacccaggtcgacaataaatcagggttcctgcagaaacgaccccaccggcagcatccaggtattctgaaacttccccacgtcaggttgcctcaggccctcgcaaacggagcccagctccttctactgggctccgcagggccaacaatggagaatcaggtgcagacacttacctcctacctatggtcccgacacttgccagtggagcctgaggaactgcagcgacgtgcccgccacttggagaagaagtttctggagaatcctgatctctcccagacagaagaaaaactgagaggcgctgtacttcacgcattgcgtaagacaacctaccactggcaggagctatcttatacggagggcctgtctctcgtatacatggctgccaggttagacgggggattcgctgcagtttccagggcgtttcatgagatcagggcccgaaatcctgcatttcaacctcagacacttatggatttcgggagtggcactggtagtgtcacatgggcagctcactctatatgggggcagtctcttcgagaatacatgtgtgtggacagatccgctgctatgcttgtgctcgcggaaaagttgcttaaaggaggatctgagtcgggagaaccatatatccccggggtgttctttcggcagtttcttcccgtcagtcccaaagtgcagttcgacgtggtggtgagcgcttttagcctttcggaactgccctctaaggctgacagaacagaggtcgtgcagactctctggcggaaaacgggccattttttagtgctggtggagaatggaaccaaagctgggcacagcttgctgatggacgcccgagacttagtcctcaagggaaaagagaaatcgccactggatcctcgccccgggtttgtgtttgcaccctgcccccatgagcttccgtgtcctcaacttaccaaccttgcatgttccttctctcaggcctatcatccgatccccttctcctggaacaagaagcctaaagaagagaagtttagcatggtgattctagcgcgaggatccccagaggaggcccaccggtggcccaggataacacagcccgttcttaaacgcccccggcatgtacattgtcatctgtgctgtccggatggccacatgcagcacgccgtgctgaccgccagacgccacggccgctatgggggttgcgatcagaatcagtgggatgttgctgggtcatgcagccccagacagcatctattcccccaagggtttgtctcgctatgcccgtgccagctgctgggtcgatcgtttacatgtgcctactcagtctgtgtctcaagcatttatggctccgggtcactgtag

SEQ ID NO: 24760 - DNA, 774 bp, synthetic construct
  source 1..774: mol_type = other DNA; note = Synthetic coding sequence
atggaggaggaggccagcagccccggcctgggctgcagcaagccccatctggagaaattgaccttgggtattaccagaatcttggagagttccccgggtgtgactgaggttaccataattgagaagccacctgctgaacgccatatgataagtagctgggaacaaaaaaacaactgtgttatgccagaggacgtcaaaaacttctatctgatgacgaacggctttcacatgacgtggagcgtgaaacttgatgccagtgatgatcagccagagaagccccacttcgattcccgatccgtcatcttcgaactagatagttgtaacgggtcaggcaaggtatgcctggtttataagtctggcaaacccgcattggccgaggatacagagatttggttcttggatcgcgccttgtattggcatttcctgaccgacaccttcacggcatattacaggctcctgatcactcatctcggcttgccccagtggcagtatgcctttactagctatggcatcagtcctcaagccaaacaatggttttcgatgtacaaaccaattacatataacacaaatctgctcaccgaggagacagattccttcgtcaataagctggacccttctaaggttttcaagagtaaaaataagatcgtgatccccaagaaaaaaggtcccgtccaaccagcaggaggacaaaaaggccccagtggcccatctggccctagcacctcgagcacttcgaaatcaagctcaggcagcggtaatcctacccgcaagtag

SEQ ID NO: 24761 - DNA, 792 bp, synthetic construct
  source 1..792: mol_type = other DNA; note = Synthetic coding sequence
atgctgagcagcaagggcctgaccgtggtggacgtgtaccagggctggtgtggtccttgtaaaccggtggtgtcactgtttcagaagatgcggattgaggtggggctggacttattgcactttgccttggctgaggctgatcgactcgacgtcctggaaaagtatcgcggcaagtgtgagcccaccttccttttttacgcaattaaggatgaagcactcagtgacgaggatgaatgtgtgtctcatggcaagaacaacggagaggatgaggacatggtctcttcagagcgtacttgcactctagctattatcaaacccgacgccgtggcacacggcaagacagacgagatcattatgaagatccaggaggctggttttgagatcctgaccaacgaggagagaaccatgacagaagccgaagtccgactgttctatcagcataaagccggcgaggaagcttttgaaaagctggtgcaccacatgtgttccggccccagtcatctgcttatattaactcggaccgaggggttcgaggacgtggtaacaacctggagaacagttatgggtcctagagaccctaacgtggcccgacgagagcagccagagtctttaagagcccaatacgggaccgagatgccgtttaacgcggtgcacgggtcgcgagatcgcgaagatgctgaccgggagctcgcgctactatttccgagtctgaaattctccgacaaagatactgaggcaccccagggcgaatcatctactcaaccaagactgaaaatcaccgatctggactag

SEQ ID NO: 24762 - DNA, 390 bp, synthetic construct
  source 1..390: mol_type = other DNA; note = Synthetic coding sequence
atggccgagctgatccagaagaagctgcagggcgaggtggagaagtatcagcagctgcagaaagacctctccaaaagcatgtcaggccggcaaaagctcgaggctcagctcaccgagaacaacatcgtcaaagaggagctagctctgttggacgggtccaatgtggtgtttaagctgctgggcccagtgctggtcaagcaggaactcggagaggccagggctactgtagggaaaagactggattatattaccgcagagattaagcgatatgagtcgcagttgcgtgaccttgaacgacagtccgaacagcagcgggaaactctcgctcagttgcaacaggagttccaaagggcgcaggctgccaaagccggtgctcccggaaaggcttag

SEQ ID NO: 24763 - DNA, 1626 bp, synthetic construct
  source 1..1626: mol_type = other DNA; note = Synthetic coding sequence
atggaggccctgctggagggcatccagaaccggggccacggcggcggctttctgaccagctgtgaagcagagttacaggagctgatgaagcagatcgatattatggtggctcataaaaaatctgaatgggagggccggacacacgcacttgagacctgccttaagatacgcgagcaggaattgaagtcactgcgaagccagctggatgtcacacataaagaggtgggcatgctccaccagcaggtagaggagcacgagaagatcaagcaggaaatgacaatggagtacaaacaggagctcaagaagctgcatgaagaactctgcattctgaagcggtcatatgaaaagttgcagaagaagcagatgcgtgaattccgcggcaacaccaaaaaccaccgcgaggatcgtagcgaaatagagcgcctgacagctaaaatagaggagtttcgacagaagtctttagattgggaaaagcagaggttgatctaccagcagcaagtatcaagcctcgaagcacaacgtaaggccctggccgaacagagtgagattatccaggcacagctcgtcaatcgaaaacagaagctagagtctgtggagctcagcagtcagagcgagatccaacatctttcatccaaattggagagggccaatgatacaatttgtgccaatgaattggagattgaacgtctgactatgcgcgtcaatgacctcgtgggtacaagcatgactgtactacaggagcagcaacagaaggaagaaaaactaagagagtcagaaaagttgctggaggcgctccaggaggaaaaacgtgagctgaaagccgccctccaatcacaggaaaatctcattcacgaggctcggatccagaaggagaagttgcaagagaaggtgaaggccaccaatacccagcacgccgtggaggctattcgcccgcgcgaagaatccctggcggagaagaagtacacatctcaaggacagggggatctggattctgtgctatcacaactgaatttcacccacacatctgaggacctgctgcaggcggaagtgacttgtttagaagggagtcttgaaagcgtgtcagccacgtgcaaacagctaagccaggagctcatggaaaagtacgaagagttaaaacgtatggaggctcacaataatgagtacaaggcagagattaaaaagttaaaggagcagattctgcagggagagcagtcatattcctccgcattggaaggcatgaagatggagatttcccacttgacacaggagctgcaccagagagacatcaccatcgcttccaccaagggcagttcaagcgatatggagaagcggctgagggccgagatgcagaaggcggaggataaagccgtggagcacaaagagatcttggaccagctggaaagcctcaaattggaaaacagacacctttccgagatggtgatgaaactagaactggggttgcacgaatgctccctgcccgtgtccccactgggtagcattgcaacccggttcctcgaggaagaggaattgaggtcgcaccacatcctcgagagactcgacgctcacattgaggagttgaagagggagtcggagaaaaccgtgcgccagttcactgctctaaagtag

SEQ ID NO: 24764 - DNA, 483 bp, synthetic construct
  source 1..483: mol_type = other DNA; note = Synthetic coding sequence
atggaggccgagcggccccaggaggaggaggacggcgagcagggccctccccaagatgaggaagggtggccccctcccaactctacaaccaggccctggagaagtgcacccccatctcccccacctcccggaacacggcacactgccctgggacctcgaagcgctagtctgttatccctccagactgaactgcttcttgaccttgtggcagaagctcagtcaagaaggctggaagaacaacgcgcaactttctatacaccgcagaacccatcctctctggcccctgcaccgttgcgacctctggaagatagagaacagttgtactcaacaattctctcccaccaatgtcagcgaatggaggctcagagaagcgagcccccattgccgcccggggggcaggaattactcgaacttttactcagggtacagggaggggggcggatggaggagcagcgatctaggccgccgactcacacatgctag

SEQ ID NO: 24765 - DNA, 483 bp, synthetic construct
  source 1..483: mol_type = other DNA; note = Synthetic coding sequence
atggaggccgagcggccccaggaggaggaggacggcgagcagggccccccacaggacgaggagggttggcccccccccaattcgactacacgcccctggcgaagcgccccacctagtcccccaccgccggggacaaggcatacggcactcggcccccgctccgcctctctgctgagcctgcagaccgaacttctgctggacctagttgcagaggcccagtcccggagactggaggaacaaagggctactttttacacccctcagaatccctcatctctcgcgcctgcccccttgcgaccattagaggatagagagcagctatactccacgatcctgtcccaccagtgccaacggatggaggcccaaaggagtgagccccctctgccaccaggaggacaagagctcctcgagttgctattgcgcgtgcagggcggcggccggatggaggagcagaggagtcgacctcccacgcatacgtgttag

SEQ ID NO: 24766 - DNA, 3192 bp, synthetic construct
  source 1..3192: mol_type = other DNA; note = Synthetic coding sequence
atgccccacctgcccctggccagcttccggccccccttctggggcctccgtcactccagaggcctgcccagattccattcagtgtcaactcagtctgaaccccatggctccccaatcagccgacgtaatcgcgaagctaagcagaaaaggcttcgggaaaaacaggcaacacttgaggcggaaattgctggtgagtctaagtccccagcagagagcatcaaggcctggaggcctaaagagctcgtactctacgagataccaacaaaacccggagagaagaaagatgtgtctgggcccttaccgccggcctatagtcccaggtacgtggaggccgcttggtatccctggtgggtgcgagaaggattctttaaaccagagtaccaggcacgtctgccgcaggcaaccggggagacatttagcatgtgtatccctccccccaatgtgacagggtctctgcacattgggcatgccctgaccgtggctatacaggacgccctggtcaggtggcataggatgcggggggaccaggtactgtgggtgccaggtagtgatcacgccggaattgccacgcaagcggtggtcgagaaacagctgtggaaagaacgaggggtccgcagacacgaactgagccgggaagcttttttacgcgaggtgtggcagtggaaagaagcaaagggtggtgagatctgtgagcagctcagagctctgggggcaagccttgattgggaccgcgagtgttttacgatggacgtcggcagctctgtggctgtcaccgaggcattcgtgagactgtacaaagccggtcttctgtaccgaaaccaccagctagtcaattggtcgtgtgcgttgaggtcagctatcagcgacatcgaagtcgaaaaccgacccctgccaggtcatactcaactgcgcctgcctgggtgtcccacgccagtcagtttcggtctgctgttctctgtcgccttccccgttgatggggagcctgatgcagaggtggtcgtgggaaccaccagacctgaaactctacccggagacgtcgctgttgccgtgcatccagacgactctagatacacgcacctgcacggaaggcaactcagacatcccctcatgggccagcccctgcctttaatcactgactacgccgtgcagccccacgtgggtacaggagccgttaaagttacacccgcccactcaccagcagacgccgaaatgggggcaaggcacgggcttagccccctgaatgtgattgctgaagatggcaccatgacctccctctgtggcgattggctgcagggtctgcatagatttgtcgccagggaaaaaattatgagcgttctgtccgaaagaggattatttagaggcctccagaatcaccccatggtactgcctatttgctcgcggtccggcgacgttatcgaatacctgttaaaaaaccagtggtttgtgcgatgtcaagagatgggagcccgggcagccaaggcagtcgagtctggcgcattagaactgagtcccagtttccaccagaaaaactggcagcattggttttcacacattggcgattggtgtgtatcccggcagctttggtgggggcatcagatccctgcctatctggtagtggaggatcatgcacagggtgaagaggactgttgggtggtggggagatcagaggcagaagcgagggaagtggccgcagaactgacagggcgcccaggggctgagctaacgctcgagcgagaccccgacgtgctcgatacctggttttcatccgctttattccccttcagcgctttggggtggccacaggagaccccagacctcgccaggttctaccccctttccctgctggagaccggcagtgatttactgctcttttgggttggccgcatggttatgcttggaacacagttaactggccagctgccttttagcaaggttctccttcatcccatggttagagatcgtcaaggccgtaagatgtccaaaagtttgggcaatgtactggaccccagagatataataagcggcgtcgaaatgcagctgctgcaggaaaaactcagatctggaaatctggacccagctgagcttgccattgtagccgctgcgcagaagaaggactttccacacggcattcctgagtgcggaacggatgcgctgaggtttacgctttgcagtcatggcgttcaggccggcgatctccacctctcagtgtccgaagtgcagtcctgcagacacttttgtaacaaaatctggaacgctctgagatttatcttaaatgctcttggcgaaaagttcgtgccccagccggctgaggagctcagcccatcaagccctatggacgcatggatcctctcccggcttgctctggccgcacaagagtgtgagcgtggattccttacaagggagctgtcattagtgacccatgcactgcatcatttctggctacataatctgtgtgacgtgtatttagaagccgtgaagccagttctctggcattcccctcgacccttgggcccccctcaggtccttttctcctgtgctgacctcggacttaggttgctggctcctctcatgcctttccttgctgaagaattgtggcagaggctgcctcctcggcctggctgtccccctgcaccatccatcagcgtcgccccatacccttccgcctgtagcctggaacattggaggcagccagagctggaacgccgatttagcagggtccaggaagttgtgcaggtgcttagggcattgagagcgacttaccagctcactaaggccagacctcgcgtgctgctacagtcaagtgagcctggggaccaggggttgttcgaagcctttctggagcccctcggcactctcggatactgtggcgctgtcggtttgctcccgcctggcacagccgccccatcagggtgggcccaagcacctttatccgataccgcgcaagtgtacatggagctacaggggctcgtcgacccacaaatccagctgcccttacttgctgccaggcggtataagcttcagaaacagctggacagcctaaccgcacgcacaccatccgagggcgaagcgggtacacagagacagcagaaactgagtagcttacaactggaactgtccaagctggacaaagccgcgagccacctgagacaactcatggatgagccccccgcccccggctccccggaactgtag

SEQ ID NO: 24767 - DNA, 1620 bp, synthetic construct
  source 1..1620: mol_type = other DNA; note = Synthetic coding sequence
atggccaccagcgcccccctgcggagcctggaggaggaggtgacctgtagcatctgcctcgattacctcagggatcccgttaccatagattgcggtcatgtcttttgtaggagttgcacaaccgacgtccgcccgataagcggcagcaggcctgtgtgcccgctctgcaagaagcccttcaaaaaagaaaatatcagaccagtgtggcagcttgcaagcttggtcgaaaatatcgaacggcttaaggtcgataaaggccggcagccaggtgaagtgactcgagagcaacaggatgcgaaactatgtgaaaggcatcgggaaaaactgcactattactgcgaagatgatggcaaactgctgtgtgttatgtgcagagagtcccgagagcatcgccctcatacggctgtgctgatggagaaagccgcccagccccacagagaaaaaattctgaatcacctaagcacattacggcgagaccgcgacaagatccagggcttccaggccaaaggcgaggccgacatcctcgccgccctcaagaagttacaggaccaacgccagtacatcgtggccgagttcgagcagggccatcagtttttgagagaaagagaggaacatctgcttgaacagttagccaagctagaacaggaattgaccgaagggcgcgaaaaattcaagagcaggggagtgggggaactcgcacggctggcactggtgatcagtgaactggaggggaaagcccaacagcctgcagcggaactgatgcaggacacacgagatttcttaaatcgttatccaagaaaaaagttctgggtgggaaaaccgatcgccagagtggtgaagaaaaagactggcgagttctctgacaagcttctgagcctgcagcgcggacttagggagttccagggaaagttgctgcgagatctggagtacaagaccgtctctgtgacgctcgatcctcagagtgccagtggctatttgcagttgtccgaagactggaaatgtgtgacttatacctcactatataagtcggcctatctgcacccccagcagttcgactgtgagcctggagtgctgggtagcaaaggcttcacatggggtaaagtttattgggaggttgaagttgagcgggaaggatggtcagaggatgaggaggaaggggatgaagaggaggaaggcgaggaggaggaagaggaagaggaagctggatatggcgacgggtacgatgattgggagaccgacgaagacgaggagtcactcggtgatgaagaagaagaggaggaggaagaagaggaagaagtactggagtcatgcatggttggtgtggctagggattctgtgaagaggaagggagacctgagtcttaggccagaggatggagtttgggccctacgcttaagtagcagcgggatttgggcaaacacctcccccgaggccgaactgttcccagcgctcaggcctaggagagtggggatcgccttagattacgagggcggaacggtgacctttactaatgccgagtcccaggagctgatatatacgttcacagccacctttacacgccgcctggtcccttttctgtggctcaagtggcccgggaccaggttgctgctccggccttag

SEQ ID NO: 24768 - DNA, 678 bp, synthetic construct
  source 1..678: mol_type = other DNA; note = Synthetic coding sequence
atggccgccggcagcgaggccaccacccccgtgatcgtggccgccggcgcagggggagaagagggagagcatgtcaagcccttcaagcccgagaaagctaaagagattatcatgtccttacagcagccagcaattttttgtaatatggtgtttgattggccggccagacattggaatgccaaatatctttcacaagtgcttcatggaaaacagattcgcttccgaatgggaatgaaaagcatgagtacagtgcctcaattcgagaccacatgcaattatgtcgaggccaccctagaagagtttctgacctggaattgtgatcaaagtagcatctcggggcccttccgggattacgatcacagtaaattttgggcttatgcagactacaagtacttcgtaagtctgttcgaggataagacagacctattccaggacgtgaagtggagcgattttggcttccctggtaggaacggtcaggaaagcactctctggattggaagtcttggagcgcacacaccatgtcacttagattcctatgggtgcaatctggtctttcaggttcagggaagacttgaatgcaacgggatgatcatcgcccccggcccacaggccatcttgctgccccaacccctcaaatacctgggattacaggaaactatggcgagtctaagcagctag

SEQ ID NO: 24769 - DNA, 2571 bp, synthetic construct
  source 1..2571: mol_type = other DNA; note = Synthetic coding sequence
atggacatcagcaagggcctgcccggcatgcagggcggcctgcacatttggatatccgaaaacagaaaaatggtgcctgttccagagggagcctacggcaacttcttcgaagagcactgttacgtgattctacacgtcccacaatcccccaaagctactcagggcgcttctagtgatctgcactattgggtgggcaagcaggctggggctgaagctcagggcgctgcagaagcctttcaacagagactgcaggatgagttggggggacagacagtattgcatagggaggcgcaagggcacgaatctgactgtttctgttcttattttagacctggaataatttatcgcaagggcggcttggcatcagatttgaaacacgtcgagacaaatttgtttaatatccagaggctgctccacatcaaaggtcggaagcacgtaagtgccactgaggtggaactgagctggaattcgtttaacaagggcgacattttcctgctcgacctggggaaaatgatgatccaatggaatggtccgaagacctccatctctgagaaggctagagggctggccctgacatatagcttacgggacagagagaggggggggggtcgggctcagataggcgtggtggacgacgaggctaaagctccagatctgatgcagattatggaggctgtgctgggcagaagagttgggtcgctgcgggctgctaccccttcaaaagatatcaaccagcttcaaaaagcaaacgtgcggttatatcacgtctacgaaaaggggaaggatctggtcgtgttggaattggccaccccaccgctgacgcaggacttgttacaagaggaggacttttacattctggaccagggcggctttaagatttacgtgtggcaaggccgcatgagcagcctacaggagcgtaaggccgcttttagtcgggcagtggggttcattcaggctaagggctaccctacttataccaatgtggaggtggtcaacgacggtgctgagtctgctgctttcaagcagttattcagaacctggtctgagaagcgtcggcgcaaccagaagctggggggacgggacaagagcattcacgttaaattggacgtgggcaagttacacacccagcctaagctcgccgctcagttgagaatggtagacgatggctccggaaaggttgaggtttggtgcatccaggacctacaccggcaacccgtggatccaaagcgtcatgggcaactctgtgctggtaattgctacctagtactttacacctatcagagactgggccgtgtgcagtacatcctctacctgtggcagggccaccaggccacagcagacgagatcgaggccctgaacagcaacgcagaggagctagatgttatgtacggcggcgttcttgtccaggagcacgtcacgatgggctctgagcccccccactttcttgccatttttcaagggcagctcgtgatttttcaggaaagagccggccatcacgggaaaggtcagtccgccagcaccaccagactattccaggtgcaagggacggactcccacaacactcgtactatggaagtgcctgcccgtgcaagctcactgaactcctcagatatcttcttactcgtcacagcttctgtgtgttatttatggtttgggaaagggtgtaacggcgaccaacgcgagatggctcgcgttgttgtgacagtgattagcaggaagaatgaggaaacagtgttagaaggccaggaacccccacatttttgggaagcactgggcggcagagcaccctaccctagcaacaagcgcttacctgaggaggtgccaagttttcagccaagactgtttgagtgtagcagccatatggggtgtctggtgcttgccgaagttgggttctttagccaggaggaccttgataagtacgacattatgctgttggacacatggcaggaaatttttttgtggttgggcgaagcagctagtgagtggaaggaggctgtggcctggggccaggaatatctcaagacccaccccgcaggtcggtctccagccacacccattgtgctggtgaagcaggggcacgagccacccacctttatcggctggttttttacctgggatccttataagtggacgtctcacccctctcacaaagaagtggttgacggatcacctgcagctgccagcaccatttccgaaatcacagccgaggtcaacaatctgagactgagccgttggccagggaacggccgcgcgggcgccgtcgccctgcaagcacttaaaggctcccaggattccagtgaaaacgatctggtgagatccccaaagtctgccggatcaaggacaagtagttcggtttctagtacttccgcaaccattaacggaggcctcagacgggaacaactgatgcaccaggcagtggaggacctgcctgagggagtggatcctgcccgaagggaattttacctgtctgattcggacttccaagacatattcgggaagtctaaagaggagttttacagcatggccacatggcggcagcggcaggaaaagaagcagctgggctttttctag

SEQ ID NO: 24770 - DNA, 2607 bp, synthetic construct
  source 1..2607: mol_type = other DNA; note = Synthetic coding sequence
atggccagcttccccgagaccgacttccagatctgcctgctgtgcaaggagatgtgcggttcacccgcaccgctgtctagtaattctagcgcttcctcatcttcatcccagacctcaacaagctccgggggcggaggtggaggaccaggcgctgctgcccgaagactgcacgtgctcccctgcctccatgccttctgccggccgtgcttggaggcacaccggctccctgccgctggcggaggcgctgccggcgagcccctcaagcttaggtgcccagtatgcgaccaaaaagtggttcttgctgaagctgctggaatggacgccttgccctctagtgctttcctcctgagcaatctgttagacgcggtggtcgcgacagcggatgaacctcccccaaagaacggcagagccggcgcacctgccggggctggcggtcacagcaatcaccgtcatcatgcacaccatgcacaccctagggcgagcgcctcagccccacccctgccccaggctcctcaaccaccggctccctcccgttctgctccgggcggccctgctgcttctccctctgcccttttactacgacggcctcacgggtgtagctcttgcgacgaagggaatgccgcctcctcacgctgtctggactgtcaggagcatctgtgcgacaactgtgtgcgcgcccaccaacgggtgagactcacaaaagatcactatatcgagcgcgggccccctgggccaggggctgctgctgctgctcagcagttaggcctgggtcccccctttccaggccctccattctctatcctgtctgtctttccagagcggctggggttctgccagcaccatgacgatgaggttctgcacctgtattgcgacacatgctccgtgcccatttgcagggaatgtaccatgggacggcacggaggtcactcctttatttaccttcaggaggcgctgcaggactcacgcgccctgactatccagctccttgctgacgcgcagcagggtcggcaggcaatccagctttctatcgagcaggcacaaacagtggcggaacaggtagaaatgaaagcaaaggtggtacaaagcgaggtcaaggcagtgacggctagacataaaaaagcattagaagagagagaatgcgagctgctctggaaggtggaaaagattagacaggtgaaagctaaaagtctgtatttgcaagtggagaagctgagacagaacttaaacaagctcgagagtacaatctctgcggtgcagcaggtgttagaggaggggagagctttggacattcttctggcaagagacaggatgctcgcacaggtgcaggaactgaagaccgtgcgctccctgttgcagcctcaggaggatgaccgggtgatgttcactccccccgaccaggccctgtacctcgccatcaagtcttttggatttgtctctagtggcgcctttgcacctctgactaaggccacaggagatgggctcaagcgtgctcttcagggcaaagtagcttcatttacagtgattgggtacgaccatgatggcgagccccggctttctgggggtgatctgatgagtgccgttgttttaggtccagacggcaatctatttggagctgaggtttcggatcagcagaacggaacgtacgttgtgagttatcggcctcagcttgagggggaacaccttgtgtccgtaacactgtgcaatcaacatatcgagaacagccccttcaaagtggtcgtcaaaagtggtcggtcttacgtggggattggactaccggggcttagtttcggatctgagggagattccgatggcaagctttgcagaccatggggggtctccgttgataaggagggctacatcattgttgctgatcgaagtaacaaccggattcaggtatttaagccgtgcggtgcctttcaccacaaattcggaacactgggcagccggcctggccagttcgataggccagccggagtggcttgcgacgcctccaggagaatcgtcgtggccgataaagataaccatcgcattcaaattttcacatttgaaggccagttcctcctgaagttcggtgaaaaggggactaagaatgggcagttcaattacccttgggacgtcgctgtaaattctgagggtaagattctcgtgagtgacacgcggaatcaccgcatccagctgtttggtccagacggcgtgttcctgaataagtatggcttcgaaggtgcactgtggaagcactttgacagcccaaggggcgttgcattcaaccatgaagggcaccttgtggtgacagattttaataatcaccggctgttggtgatccatcctgattgccagagcgctcgctttttgggttccgaaggaacaggcaacggacagtttctgagacctcaaggagtcgccgtggatcaagaggggcgcatcatcgtggcagactccaggaatcaccgcgtacaaatgttcgagtcaaacggtagctttttatgtaagtttggagctcagggtagtggcttcgggcagatggacagaccgagcgggatagccataacccccgacggaatgatcgtcgtagtagacttcggaaataaccgcattttagtcttctag

SEQ ID NO: 24771 - DNA, 1107 bp, synthetic construct
  source 1..1107: mol_type = other DNA; note = Synthetic coding sequence
atgcgggagcccgtgctgacctggtgcgtgcccctggagctgctgtgcagccaccccctacctttatcggcctttttaaaaagccaggtaaagctttatacttacagagcatgcgctggaaaggatgaaatgggcaagatggtcagtgtgatcaatacagtggatacatctcacgaggacatgatccacgatgctcaaatggactactatggaacccggctagcaacctgctccagcgatcggtcagttaaaattttcgacgtgcgcaatggcggacagattctgatcgcggatttacgcggtcatgaaggacccgtgtggcaggttgcttgggcccacccgatgtatggaaatatactcgccagttgttcttacgatcggaaagtaatcatctggcgggaagagaacgggacatgggaaaagagtcacgaacatgcagggcacgatagcagcgtaaactccgtttgttgggccccacacgactatgggctgatccttgcatgcggctctagtgatggcgcgataagtctgctgacctatacaggggagggacaatgggaggtgaagaagattaacaatgcccataccattggctgtaacgccgtgtcctgggcacccgctgtggtgcctggctctctgatcgaccacccgtcaggacagaagcctaattatatcaagcgctttgcctccggaggctgtgacaacctgataaagctttggaaggaggaggaggatggtcagtggaaagaggagcagaaactggaagcccattccgactgggtgcgggatgttgcttgggcccccagtatagggttgccgacctctaccattgcttcctgttcccaagatggacgcgtttttatttggacgtgcgacgacgcctcctcaaatacctggagtcccaaactcttgcacaagttcaatgatgtcgtctggcatgtctcctggagcattactgctaatattctggcagtgtccggaggagacaataaggtgaccctgtggaaggaatccgtcgatggccagtgggtgtgcatcagtgacgttaataagggccaaggaagcgtgtccgcgtccgtcaccgaagggcagcagaacgaacaatag

SEQ ID NO: 24772 - DNA, 1059 bp, synthetic construct
  source 1..1059: mol_type = other DNA; note = Synthetic coding sequence
atggacatcgacaaggacctggaggcccccctgtacctgacccccgagggctggtcactgttcctacagagatactaccaggttgtgcacgagggggcagagttgcggcacctcgatacacaggttcagaggtgcgaggatatcttacagcagctgcaagctgttgtgccgcagatagatatggagggcgaccggaatatttggatagtaaaacccggcgccaaatccaggggaagaggcatcatgtgcatggatcatttggaggaaatgctcaagttagtaaacggcaacccggtagtgatgaaagacggcaagtgggtggtgcagaagtacatagagcgccctctgcttatatttgggactaaattcgacctacgccagtggttcctggtgaccgattggaatcccttaacagtttggttctacagggatagttacatccgatttagcacccaacctttcagtttgaaaaacttagacaactccgtgcatttgtgcaacaacagcatccagaagcatttggaaaattcctgccacaggcaccctctcttgccccccgataacatgtggtccagccaacggttccaggcccacctccaggagatgggtgcaccaaacgcttggtccacaattatcgtgcctggcatgaaagatgccgtgattcatgcgcttcagacctcccaggacactgttcaatgcaggaaagcctctttcgaactgtacggcgctgacttcgtcttcggagaagactttcagccgtggctgatcgaaatcaatgcgtccccaaccatggccccctctactgccgtgaccgctagactgtgtgcgggcgtgcaagccgatactctgagggtcgtgattgacaggatgctggatcgcaattgcgacactggcgcatttgaattgatatacaaacaacctgtcaccacttcccccgcatccacgcctcgcccgtcttgccttttacctatgtattccgatactagggcccgaagctcagatgattcaacagcttcttggtgggccttgagaccgtgtcgtccccaggctcgaccttag

SEQ ID NO: 24773 - DNA, 579 bp, synthetic construct
  source 1..579: mol_type = other DNA; note = Synthetic coding sequence
atgggcaagggctgcaaggtggtggtgtgcggcctgctgagcgtgggaaagaccgcgattctcgagcagctgctgtacggcaaccatacaatcggtatggaagattgtgaaaccatggaggatgtgtatatggcatccgtcgagacggaccgaggagtgaaggagcagctacatctgtacgacacccgcgggcttcaagagggggtggaactgcccaaacattatttctccttcgccgatggctttgtactcgtgtatagcgtgaataatttggagtcgttccagagagtcgagcttctgaagaaagaaatcgataaattcaaggacaaaaaggaagtggcgatcgttgttttggggaacaagatcgatttgtccgagcagcgccaggtggacgccgaagtggcgcaacaatgggccaaatctgaaaaggtgcgcttatgggaagtgaccgtgacagatagaaaaacattaatcgagccctttacactccttgcttcaaagttgtcgcagccgcagtcaaagtcttctttcccccttcctgggcgcaaaaataaaggcaactctaattctgaaaactag

SEQ ID NO: 24774 - DNA, 1419 bp, synthetic construct
  source 1..1419: mol_type = other DNA; note = Synthetic coding sequence
atgagccggcgggtggtgcggcagagcaagttccggcacgtgttcggccaggcagctaaggccgaccaggcatacgaggacatcagagtcagtaaagtgacctgggactctagcttctgtgccgtcaatccaaagttcctagcaattattgtcgaagcagggggcggcggggccttcatcgttcttcctttggccaaaaccggcagagttgacaaaaactaccctctggtcactggacacacagcccctgtgctcgatattgactggtgtcctcacaatgataacgttatcgcctcggcgtcagatgacaccacaatcatggtgtggcagattccagattacacccctatgcggaacattaccgagccaatcataactctcgaggggcattccaagcgcgtgggcattctgtcttggcaccccactgcgcggaacgtgctcctgagtgctggaggagacaacgtcataattatatggaacgtgggtactggcgaagtgctcttatctctggacgatatgcaccccgatgttatacacagtgtgtgctggaacagcaatggctcgcttttggccaccacttgcaaggacaaaacattgcggataatcgaccctaggaaaggccaggtagtagctgagcgtttcgcagctcacgaaggcatgagaccaatgcgcgcagtgttcacccggcaaggacatatctttaccactggatttacacggatgtcccagagggaacttggactgtgggacccaaataattttgaggaaccggtagcacttcaggaaatggatacctcaaatggcgtgctcctcccattctacgacccagatagtagcatcgtgtacttatgcggaaagggcgatagcagcattagatattttgaaattacggatgaacctcctttcgtgcattatctgaatacgtttagctccaaggagccacagcgggggatgggattcatgcccaaacgcggccttgatgtgtccaaatgcgagattgcaagattctataagctacatgagagaaagtgcgagcccattatcatgaccgttccacggaaaagcgacctgttccaagacgacctgtatccagatactcctggtcccgagcctgcacttgaagctgacgaatggctgtcaggacaggacgccgaacccgtgcttatttcgctgcgagatggatacgtccccccaaagcatcgcgagctcagagttaccaagcgcaacattctggacgtccggcccccatctggtcccaggaggtcgcagtcagcctccgacgcaccactatcccagcagcatacactggaaacgctattagaagagatcaaggctctgagagagagagtgcaggcgcaagaacagaggattacagctctggagaacatgctctgtgagttggtcgacggcacggattag

SEQ ID NO: 24775 - DNA, 2628 bp, synthetic construct
  source 1..2628: mol_type = other DNA; note = Synthetic coding sequence
atgggcgacagcgacgacgagtacgaccggcggcggcgggacaagtttcggcgcgagcgcagtgactacgatcgtagtcgagaacgggacgagagacggcgcggtgacgactggaatgacagggagtgggatcgaggcagagagcgcaggtcaagaggcgaatacagagactatgatcgcaaccgccgggagcgcttctcacccccacgccatgaacttagccccccccagaagcggatgaggcgcgactgggatgagcattcctccgacccataccactctggctacgagatgccctacgcaggaggaggaggagggccaacatacggcccacctcagccttggggtcatcctgatgtacacattatgcagcatcacgtgctgcctatacaggctaggcttggcagtatagcggaaattgacctgggtgtcccaccacccgtgatgaagacttttaaagaattcctgctctcactggacgactccgtagacgagacggaggcagtcaaacgctataatgactacaaattagactttcgccggcagcagatgcaagatttctttcttgcccacaaagacgaggagtggttccggagcaaataccaccctgatgaagtggggaagagacggcaggaggccagaggagcactgcagaacagattacgtgtgtttttatctcttatggagacgggatggtttgataatctcctgcttgatattgacaaagccgacgctattgtcaaaatgttggacgcggccgtgattaagatggaggggggaacagagaatgatctgaggatcctagagcaggaggaggaggaggaacaggccgggaagcctggtgaaccaagcaagaaggaggagggccgcgcaggcgcgggcctcggggatggcgagcgcaagaccaatgacaaggacgagaaaaaggaggatgggaagcaggctgaaaacgatagcagcaacgacgataagacaaaaaaatcagaaggggacggggataaagaggagaagaaggaagatagtgagaaagaggcaaaaaagtcatcaaagaagagaaatagaaaacattccggcgacgactctttcgatgagggatccgtgtccgagtctgagtccgagtcagagtccggccaagctgaagaagaaaaagaggaggccgaggctctgaaggagaaggagaagcccaaggaggaagagtgggagaagcctaaggatgcggcagggctggaatgtaagcctaggcctcttcacaagacatgctccctgtttatgcgcaatatagccccaaacatcagccgcgctgaaatcatcagcctctgcaagaggtaccccggcttcatgcgggttgcccttagcgaaccacagccagagcgcagattctttagaagggggtgggtgacctttgatcggtccgtgaacatcaaagagatctgctggaacttacaaaacatcaggctgcgcgagtgcgagttgagccccggtgtgaaccgcgatctgactaggcgggtccgcaatataaatgggatcacccagcataagcaaattgtgcgcaatgacattaaactggccgcaaaactcatacatacattggatgacaggacccagttgtgggcgagcgagcccgggaccccaccactgccaactagtctccctagccaaaatcccatcctgaagaatattactgactatctgatcgaagaagtctctgccgaggaggaagaactcctgggcagttccggaggcgctcctcctgaggaacctccaaaggagggcaatcccgccgaaatcaatgtcgagagagatgagaagttaattaaggtcctggataaattactcctgtacctgcgaatagttcacagtttggattattacaacacatgtgaatatcctaatgaggacgagatgcccaaccggtgtgggatcatacatgttagaggccctatgccacctaaccggatttcccatggtgaagtacttgagtggcagaaaacgttcgaagaaaaacttacacccttattaagcgtgcgggaatccctgagcgaagaggaggctcagaaaatgggaaggaaagacccggaacaggaggtggagaagttcgtgacgtctaatacgcaggagctaggaaaggacaagtggctgtgcccactctcaggcaagaagtttaagggcccagagttcgtccggaaacatatctttaataagcacgctgaaaagattgaggaagtgaagaaagaggtggccttctttaataactttctgaccgatgcaaaacgtcccgctttgcctgaaatcaaacctgcgcaacctcctggccccgcccagatcctccctccaggattgactccaggtctcccataccctcatcaaaccccccaggggctgatgccttacgggcaacccaggccccctatactaggttacggagcgggagccgttaggcctgctgtccctaccggaggcccaccgtaccctcacgcaccctatggtgccgggcggggaaactacgacgctttcagaggtcagggcggctatcccgggaaacctagaaatagaatggtaaggggcgacccacgcgctattgtagaatacagggacctagacgcgcccgatgacgtggactttttctag

SEQ ID NO: 24776 - DNA, 816 bp, synthetic construct
  source 1..816: mol_type = other DNA; note = Synthetic coding sequence
atggccgccgtggagaagcggcggcaggccgtgcccccccccgccggtttcaccgattctgggagacagtctgtcagcagggcagcgggggccgccgaatcagaagaagatttcctgagacaggtgggagtgactgaaatgctgagagccgcgctcctgaaggtgttggaagctcgcccagaggaacccattgcttttttggcccactatttcgaaaacatgggcctgcggtcaccggtgaacggaggcgccggggagcccccaggacaactgcttctgcagcagcagcggctaggccgcgcgttatggcatctgaggctcgctcaccattcccagagagctgcctttaataataacgtgagtgtcgcctacgagtgtctcagcgctggggggagaaggaagcgacctgggctggacgggaggacttattcagaactgctgagacgcatttgtcgtgatggacaggcgccagaagaagttgtcgccccactcctgaggaaagtccagtgtcgtgaccacgaggccgtcccactatcagtattccgggcgggtaccctgacatgcttcgttctgctggaatttgtcgcacgcgcaggggccctgtttcagctgttggaagatagtgcagcggctgtggccgaccggcgcgtcgggcaggcagtcctggatacgctggaaggcgctctgcaggcgtctgatgctgcagctcccgcacgatttctggaagcaggcagccgtctggcccccatgaccagagaggaatttctggagagagccgctgcactatttattgccaaggttaagccggtgggatag

SEQ ID NO: 24777 - DNA, 1977 bp, synthetic construct
  source 1..1977: mol_type = other DNA; note = Synthetic coding sequence
atgggcggccacctgagcccctggcccacctacaccagcggccagaccatcttgcagaatcgtaaaccttgctcagacgactatcggaagcgagtgggatcttgtcagcagcatccattccgaactgccaagcctcagtatcttgaagagcttgaaaattatctgagaaaggagcttctccttttggacctgggaacggactctacacaggagctccggttgcagccctatcgcgaaattttcgaattttttattgaagatttcaaaacgtacaagcccctgttgtcctcaatcaagaatgcatacgaagggatgctggcccaccagcgggagaaaataagggccctggagcccctcaaggccaaattagtgactgtgaatgaagactgcaacgagcggatcctggctatgcgagctgaggagaaatacgaaatcagcctactcaaaaaggagaaaatgaacctcctgaaactcatcgacaagaaaaacgaggaaaagatttccctgcagtctgaggtcactaaactgcggaaaaacttggccgaagagtacttgcattatctctcagaaagagatgcatgcaagatcctcattgcagacttgaacgaactgcgataccagcgagaagacatgagtctggcacagtcaccagggatctggggcgaagatcccgttaagctgactctcgcactgaagatgactaggcaggacctcacacgcacacaaatggaactcaacaacatgaaggctaattttggagacgtggttccacgccgcgacttcgaaatgcaggagaaaactaacaaagatcttcaggagcagttggatacgcttcgcgcttcatatgaggaggtaaggaaggagcatgagatactcatgcagctgcacatgagtactttaaaagaacgagaccaattttttagcgagcttcaggagattcaaaggaccagtacccctaggcctgactggacaaaatgcaaggatgtggtggctgggggcccagaaagatggcaaatgttggcggaagggaaaaactctgatcaattagtggacgttctcctcgaagagattggatccgggcttctacgtgagaaggatttttttccaggcctcggctatggggaggccattcccgcgttcctcaggttcgacggcttagtggaaaataagaaaccgagcaagaaggatgtcgtgaacctgctaaaggacgcttggaaagagagactggccgaggaacagaaagaaactttcccggatttcttctttaattttctcgagcaccgcttcgggccgtctgacgcgatggcttgggcctacaccatcttcgaaaatatcaagatctttcattcgaacgaggttatgagccaattttatgctgttctcatgggtaagaggagtgaaaatgtttatgtcactcagaaagaaactgtggcccaactattgaaagagatgaccaacgcagatagtcaaaatgaaggactgctaactatggaacaatttaataccgttctgaagtcaactttccccttaaagactgaggaacaaatccaggagttaatggaagctggaggatggcacccttcttcctcgaacgcggacttacttaattatcgcagtctttttatggaagacgaggaaggtcagtccgagccatttgtccagaaactgtgggagcagtacatggacgagaaagacgaatatctccagcaactgaaacaagagttgggcatcgagctacacgaggaggttaccctgccgaagcttcggggtggtctgatgactatcgatccctctttggataaacagacggtcaacacttacatgtcacaggcctttcagctgcccgagagcgaaatgccagaagagggggatgagaaagaagaagctgtggtggagatcctacagactgcgcttgaaaggcttcaggttatcgatattcgtcgcgtggggccacgagagccggaaccagcctcttag

SEQ ID NO: 24778 - DNA, 1287 bp, synthetic construct
  source 1..1287: mol_type = other DNA; note = Synthetic coding sequence
atggagcccctgaaggtggagaagttcgccaccgccaagcggggcaatggcctgcgcgccgttaccccactccggcccggcgaactgctgtttagaagcgaccccctggcttacaccgtgtgcaaggggtcccgcggcgttgtctgcgatcgatgccttttagggaaagaaaaattgatgcgctgtagccagtgccgggtcgccaagtattgctctgcgaagtgtcagaaaaaggcttggccggatcataagcgcgaatgcaagtgcctgaagtcatgcaaacctcgttatccaccagactctgtgcggctgctgggacgcgtggtctttaagctcatggatggggccccgtcagaatctgagaaactatactccttctacgacttagagtccaatattaacaagctaactgaagacaagaaagagggacttagacagctggtaatgactttccagcacttcatgagggaggaaatccaggacgcgtcccagttacccccagccttcgatctgtttgaagcctttgctaaggtgatttgcaactccttcacaatttgtaatgccgagatgcaggaagtgggggtgggtttgtatcccagtattagcttgctgaaccacagctgtgatcccaactgtagcatcgtgttcaatggaccccaccttctcctcagagctgtacgggatatcgaagtcggcgaggagttaaccatctgttatctagatatgctcatgacttccgaggaacgccggaagcagctgagagaccaatactgctttgagtgcgattgtttccgttgtcagacacaggataaagatgccgatatgctcactggggacgagcaggtgtggaaggaagtgcaggagtctctaaagaagatcgaggaactcaaggctcattggaagtgggaacaggtgctggccatgtgccaagcaatcatctcatccaattcagagcgactgcccgatattaatatctatcagttaaaagtactggactgcgctatggatgcctgcattaacctgggactcttggaggaggcgctgttctacggcacccggacaatggaaccgtatagaattttctttccaggttcccatcctgtcagaggcgtccaagtgatgaaagtgggtaaactgcagctgcatcagggcatgttcccacaggctatgaagaatttgaggcttgcattcgatataatgcgggtcactcacggtagagaacactccctgatcgaggatctgattctgctgctggaggagtgtgatgctaatattcgagccagctag

SEQ ID NO: 24779 - DNA, 1122 bp, synthetic construct
  source 1..1122: mol_type = other DNA; note = Synthetic coding sequence
atgagcagcggcaactaccagcagagcgaggccctgagcaagcccacgttctccgaagaacaggccagtgctttggtggagagcgtcttcggtctaaaggtgagtaaggttcgcccccttccttcttatgacgatcagaactttcacgtttatgtgagtaagactaaggatggacctactgagtatgtattgaagatcagtaacactaaagcgagcaaaaacccagatttgattgaggtccaaaaccacataattatgttccttaaggcggccggcttcccgaccgctagcgtttgccatactaagggcgacaatacagcgtccctggtgtcggtcgactcgggaagcgaaattaaaagttaccttgttcggctcctcacttaccttccaggaaggcccattgccgagctccctgtgtcgccacagctgctgtatgagattggcaagttggccgctaagctggataagaccctgcagcgctttcaccacccaaaactatcaagtctgcaccgagaaaacttcatctggaaccttaaaaacgtgcccctattagagaagtatctctacgctttgggccagaaccggaacagagagattgtggaacacgtgattcacctattcaaggaggaggtgatgacgaaactgtcccatttccgggaatgtatcaatcatggcgacctaaacgatcataacattcttatcgagtcttccaaatctgctagcgggaatgctgaatatcaagtcagcggaattctggactttggagatatgtcctatggttactacgtttttgaggtcgcaattactatcatgtacatgatgatcgaatccaaatcccccatccaggtcggaggccacgtcctggctggattcgaaagtatcacaccgttgaccgccgtggagaaaggcgctctgtttcttcttgtgtgtagtcgcttttgccagtctctggtaatggcagcttacagctgtcagttgtatcctgagaacaaagactatctaatggtgaccgctaaaaccggatggaagcaccttcagcagatgttcgacatgggtcagaaagccgtggaggagatctggttcgagaccgccaagtcttatgaatccgggattagtatgtag

SEQ ID NO: 24780 - DNA, 2766 bp, synthetic construct
  source 1..2766: mol_type = other DNA; note = Synthetic coding sequence
atggccctgctgtgcggcctgggccaggtgaccctgcggatctgggtgtcactcccatctcagagcgaaaatggcatcggctccggcggcatggaagccctaacaactcagttggggccgggccgggagggcagttccagtccaaatagtaaacaggagctgcagccatattccggatccagcgcgctcaagcccaaccaggtgggagaaacttccctgtatggcgtgcccatcgtatcacttgtgatcgatggacaggagcgactgtgcctggcccagatttccaatacgttattgaagaactatagttacaatgagatacacaacaggcgggttgccctaggcattacatgcgttcagtgtaccccagtgcagctggagattctgagaagggccggcgctatgcctatttcttccagaagatgtggtatgatcactaaacgggaggcggagcgcctgtgcaagtccttccttggcgaacacaagccccctaaactgcccgagaacttcgctttcgatgtagtccacgaatgtgcctggggatcaagagggtctttcatcccagctagatacaatagttcaagggccaagtgtataaaatgtgggtattgcagcatgtactttagccctaataagttcattttccactcccatagaactcccgatgctaaatatactcagcccgacgctgctaacttcaatagctggcgcagacacctcaagctgtctgacaagtctgccacggacgaacttagccacgcttgggaggatgtcaaggccatgtttaacggcggcactagatgcggagcagagatggcacctggcccaccacctcacaagagcctcaggtgtggcgaagacgaggcagctgggccacccggacctcccccaccgcatccacaacgaggcctcggcttggcaacaggcgccagcggccccgctggccctggcggccctgggggcggggccggcgtgcgatcctaccctgtgattccggtgccctccaaaggtttcggccttctacagaaactccctcccccattgttcccccatccatatggtttcccaactgccttcgggctgtgccccaagaaggacgaccctgtgctaggtgcgggagaacccaaagggggcccagggacagggtctggaggcggtggtgccgggactggcggaggagcgggcggaccaggagcttcccatttgccacccggtgcaggagcgggcccgggtggtggcgctatgttctggggtcaccagcctagcggagccgccaaagacgctgccgctgtggcagccgcagcagccgcagctactgtctacccgacatttcccatgttctggcctgccgccggtagcctgcccgtgccttcttatccagctgcgcagtcccaggcaaaagctgtggccgccgctgtggcagccgccgccgcggcggctgccgcagcagccgggtccggcgccccagaaccacttgacggggccgagccagccaaagaatccggtttgggagcagaagaacgatgcccctccgccctgagccggggccctttagacgaggatggcaccgacgaggccctgccaccccccctagctcccttgcctccaccgccacccccaccagccaggaagggatcttacgtctctgcttttagacccgtggtgaaggacacagaaagcatagccaagctgtacggttcagcacgggaggcgtacggggctggtcctgctcgggggccgggacctggcgctggttctggaggatacgtttcccccgacttcctgtccgaaggtagttcttcgtacaattcagcaagcccagacgtcgatacggcagatgagcccgaagtcgacgtagagagcaaccgcttcccagatgatgaagacgcccaagaagaaacagagcctagcgccccttccgctggcggaggccccgacggcgagcagcctactgggccccccagcgcgacctcctcaggggccgacggcccggccaattcaccagatggcgggtcccctcggccgaggagacggctcggccctcctcctgcgggaaggcctgctttcggtgatctagccgctgaggatctggtgagacggccagagaggtcgcctccaagcggagggggcggctatgaactgagggagccttgtggccctcttggtggcccagctcccgcaaaggtgttcgctcccgagcgagatgaacacgtgaaatcagccgctgtggcgttagggcctgccgcctcctacgtgtgcacccctgaagcccatgaacctgacaaggaagataatcactctccagcggacgatctggagacacgcaagtcttatcctgaccagcgcagtatctcccagccatctcctgcaaacactgatagaggcgaagatgggttaacactcgacgttaccggcacacaccttgtggaaaaggatattgagaatttggcaagggaggagctccaaaaattactgctcgagcagatggaactgcgtaagaaattagagcgcgagtttcagtcgctgaaagataacttccaggatcagatgaagcgagagctagcctacagggaggaaatggtccagcaacttcagatcgttagggacaccctatgcaacgagcttgatcaggagcgcaaggctcgctacgctatccagcaaaaattgaaagaggctcatgatgccctacatcacttctcatgcaaaatgctaacgcctcggcattgcacaggaaactgctccttcaaacccccactgctcccttag

SEQ ID NO: 24781 - DNA, 1395 bp, synthetic construct
  source 1..1395: mol_type = other DNA; note = Synthetic coding sequence
atggccatgaccgccggcaccaccaccaccttccccatgagcaaccacactagagagcgcgtgaccgtagctaagctgacacttgagaatttctactcaaacctgattctgcagcacgaggaaagggagacacgccagaagaaactggaggttgctatggaggaggaggggttggcggatgaggagaaaaagctcaggcgcagccagcatgctcgcaaagagaccgagttcctccgcctcaaacggacccggctcggccttgatgacttcgaatcattgaaagtgatagggcggggtgcctttggcgaagtgcggcttgttcagaagaaagataccggccatatctatgccatgaaaatcttgcggaagagcgatatgctggagaaggagcaggtggcccatatcagagctgagagagacatcctggtagaggcagatggcgcctgggttgtgaagatgttctactcattccaggacaagagaaacttgtacctgattatggaattcctgccaggtggggatatgatgaccctactcatgaagaaagacaccctgacagaggaggagacgcagttttatatttctgaaaccgtcctggccatagatgcaattcaccaacttgggttcatccatagggacattaagcccgacaacctgctgctggatgccaaaggccacgttaaactgagcgatttcggtctatgcactggcctgaaaaaggcccaccgaacagagttctaccggaacctcacacataatccaccttccgacttcagctttcaaaatatgaatagtaaacggaaggcagagacttggaagaaaaaccgcaggcaactggcctacagcaccgttggcacacctgattacatcgctcccgaggtatttatgcagacggggtacaataaactgtgtgactggtggagcctgggcgtgattatgtacgagatgttaatagggtacccaccattctgctctgagacaccccaggaaacctacagaaaggtcatgaactggaaggaaacattggtgtttccacctgaagtccccatcagtgagaaggccaaggatttgattctgcgattttgcatcgactcagagaacagaatcggtaactccggagtagaagagatcaaggggcacccctttttcgagggggttgactgggagcacattagagagagacccgccgctatccccatcgagattaaaagtattgatgatacttcaaactttgatgattttccggagtccgatattttacagccagtccccaacaccacggagcccgattacaaaagcaaagactgggtctttctcaattatacctataagaggttcgaaggcctaactcagaggggctctatcccaacatacatgaaagccgggaagctgtag

SEQ ID NO: 24782 - DNA, 3951 bp, synthetic construct
  source 1..3951: mol_type = other DNA; note = Synthetic coding sequence
atggccagcaagggcgccggcatgagcttcagccggaagagctacaggcttacttccgacgcggagaagagcagggtgaccggaatcgtgcaggaaaagttgctgaatgattatctgaatcgcatttttagctcttccgaacacgccccacctgctgccactagtcgcaaacctctaaatttccagaatctccccgagcacctggatcagttactgcaagtggacaacgaagaggaagagagtcagggccaggtggagggaaggctaggcccaagcaccgtcgtgctggatcacaccggcgggtttgagggactactactcgttgacgacgacttactgggagtgattggccattctaattttggaactatcaggtcaactacttgtgtttataagggaaagtggctgtacgaggtgctgatctccagtcagggcctgatgcagatcgggtggtgtaccatcagctgtcggtttaatcaggaggaaggagttggcgacacacacaactcatatgcttatgatggaaacagggtgcgtaagtggaatgtgactacaacaaactatggcaaggcttgggctgccggggatatcgtatcgtgcctgatcgacctagacgacggcaccctgagcttctgtctcaatggggtcagtctgggaaccgcctttgagaacctctcacgagggcttggtatggcatatttcccagccatcagtttgagttttaaggagtctgtcgcttttaatttcggctcccgacctctgagatatcccgtcgcagggtaccggccgctacaggatccaccttcagcggaccttgtgcgagcgcagcgcttgcttggttgcttccgggcggtgctgtcagtcgaactcgatccagtggagggccgcctgcttgataaggaaagttccaagtggagactgcggggacaacccacagtattgttaactctggcacatattttccaccattttgccccactgctccgcaaggtgtaccttgtcgaggcagtcctgatgtcctttttgttgggcattgtggagaagggaacaccaacacaggcccagtctgtcgtacatcaggtgctcgatctcttgtggttgttcatggaagattatgaggtacaggattgtctcaagcaactgatgatgtccctcctacgcctctaccgcttcagccctatcgtccctgacctgggccttcagatccattatctgcgcctgaccatcgcaatcctgagacatgagaaatctagaaagtttctcttaagcaacgtgcttttcgacgtgctgcgcagtgtcgttttcttttacattaagtcccctctgagggtggaggaggctggattacaggaactgattcctaccacgtggtggccccactgttcgagccgggaagggaaggagtcaaccgaaatgaaggaggagaccgccgaggagcgcctgcggcgtagagcgtacgagcgaggatgccagagactgaggaaaagaattgaggtcgtggaagaactgcaggtgcagatcttgaaactgctgttagacaacaaagacgacaatgggggcgaggcttctcgctacatttttctcaccaagttccgtaagttcctccaagagaatgcctcaggacgggggaacatgccaatgctctgtccccccgagtatatggtttgcttcctgcaccgactgattagcgccctccgctattattgggacgagtacaaggcttcaaacccccatgccagcttctccgaggaggcttacattccaccacaggtgttttacaatggcaaagtggattattttgatctacaaagactgggcggtctccttagccacctgagaaagacactgaaggacgatctagccagcaaagctaatatcgttatcgatccactggaactccagtctaccgctatggacgacctggacgaagatgaggaacccgcacccgccatggcccagagaccaatgcaggccctcgcagtggggggccctcttcccctcccgaggccaggatggttgtcttcccccacactgggacgcgctaataggttccttagtaccgcggccgtgagcctaatgaccccccgtcggcctttgagcacgagcgagaaggttaaagtccggactttgtcggtggagcaaagaacacgcgaggacatcgaaggaagccactggaacgagggactgctgttaggtcggccccccgaggagccagagcaacctctgacagagaacagtctccttgaggtgcttgatggggccgtaatgatgtacaatttatccgtacatcaacagctgggtaagatggtcggtgtgtctgatgacgtgaatgagtacgccatggcacttagagacacagaagacaagttaagacgctgccctaagcggagaaaagatattctcgcagaattaaccaagtctcagaaggtgttttcagagaaattggatcacttaagcagaaggctggcctgggtgcacgcaacggtctactctcaggaaaaaatgctggacatttactggctcctgcgggtctgtctgcgcacaattgagcatggcgacagaactgggtctctgttcgctttcatgcctgagttctacctcagcgtcgccatcaacagttattctgctctgaagaactacttcgggcccgttcattctatggaagagttgcccggctatgaagagactctcaccagactcgctgctatcctcgcaaagcactttgccgatgctcggattgtcggcacggacatcagagatagtctgatgcaggccctggcctcatatgtctgctaccctcactccctccgggccgtcgaaaggataccagaggaacagcgtatcgccatggtgcgcaatctcctggcaccctacgagcagcgaccatgggcacagaccaattggatcctggtccggttgtggagaggctgcggctttggatacagatatactcgtttgccccaccttctaaagacaaaattggaggacgccaatctgccgtccctgcagaaaccgtgtccaagcactttactccagcagcacatggcggatctgctgcagcagggtcccgatgttgctccaagttttctgaattctgtacttaatcaactgaactgggcgttttctgaatttatcggcatgatccaagagattcaacaagccgccgagagactagagcggaacttcgttgatagtcggcagctgaaagtatgtgccacttgtttcgatctgtccgtgagcctccttcgtgttcttgaaatgacaatcaccctcgtaccagagatctttctggactggaccaggcctacaagcgagatgttgctacggaggcttgcacagcttcttaatcaggtcctcaacagggtcactgccgagcggaatctatttgatcgggtagtaacactgcggctgccgggtctggaatctgtggatcattaccctatcctagtggccgtgaccgggatccttgtgcagttgctcgtacggggccccgcctccgagcgtgagcaggccacgagtgtactgctggctgacccctgcttccaattacgctccatttgttacctcttaggacagcctgagccgcctgccccggggaccgctttacctgccccagacaggaaacggtttagccttcagtcctatgctgattatatcagcgctgatgagctggcgcaggtggagcagatgctagcccatctcacctcagcctctgcacaggcggcagccgctagtctgcccaccagtgaagaggacctctgtcctatctgctacgcacatccaatcagcgctgtcttccagccttgcgggcacaaatcttgtaaggcctgtatcaaccaacatcttatgaacaacaaagactgctttttttgcaaaaccactacctcaaacctgctggcatgtctatatcctcattggtgggaaccttcccacgggccaaactgcgcgtag

SEQ ID NO: 24783 - DNA, 2043 bp, synthetic construct
  source 1..2043: mol_type = other DNA; note = Synthetic coding sequence
atgcccagcgtgagcaaggccgccgccgccgccctgagcggcagccctcctcagactgagaagcccactcattacagatatttgaaagagtttcggaccgagcagtgccctctcttttctcagcataaatgcgctcagcacaggcctttcacttgttttcattggcatttcctcaaccagaggcggagacgccccttgcgcaggcgagacggtaccttcaattattcacctgacgtttattgctccaaatataacgaagctactggcgtctgtcccgatggagatgaatgtccatacttgcataggacaaccggggatactgaacggaaataccatttaagatactacaaaactggaacctgtatccatgagaccgacgccagggggcattgcgtcaagaacggccttcactgcgctttcgcccacggcccactggacttaagaccaccagtttgcgacgttagggagcttcaggcacaggaggcattgcagaatggccaactgggcggcggcgagggcgtgcctgatctgcaaccaggagtcctggcctcccaggcaatgattgagaagatcttgtctgaggatcctcgctggcaggacgcaaattttgtgctgggcagttacaaaaccgagcagtgtccaaagccaccaagactgtgcaggcaagggtatgcttgcccgcactaccacaattctcgggatcggcggcgaaatccacgtagattccagtaccgctcaacaccctgtccatccgtgaagcatggagacgaatggggtgagccaagccgatgtgacgggggggacggctgccaatactgccactccagaactgagcagcagttccatcccgaatctacaaagtgcaacgacatgcgtcagaccggatactgtccacgcggtccattttgcgcttttgcgcacgtggaaaaatcgctaggcatggttaacgaatggggatgccatgatctgcaccttacttccccctctagtactggatcagggcaaccaggaaacgccaagaggcgagattcccccgcagagggcggtccccgggggtcagaacaggatagtaaacaaaatcatctggcagtgttcgccgctgttcatccaccagcccccagtgtctcatcaagcgtcgcgtcgtcgctagcctccagtgccggaagcggctctagctccccaaccgccctgcctgcccctcccgcgagggccctacccctgggcccagcatcaagcacggtcgaagccgtcctcggaagcgcactggaccttcatctttctaatgtgaacatcgcaagcttggaaaaagatctggaagagcaagacggtcatgacttgggagccgccggacctaggagcctcgctggcagcgcccctgtggcaattccgggaagccttccccgcgccccgtcactacatagtccatcatctgcatctacatcccctttggggtcactatcacagccactccccgggcctgtaggatcaagcgctatgaccccccctcagcagccacctccgcttcgcagcgagcctggtaccttaggtagcgctgcctcatcctacagtcccctaggcttgaatggggtgccagggagtatttgggattttgtttcgggtagtttctcacctagcccttcccccattctcagtgctggcccacctagttcttccagcgcctcccccaacggcgcagaactggcccgggtgcgccgacagttggatgaggctaagcgtaaaatcagacagtgggaagagtcttggcagcaggtgaagcaggtgtgcgacgcatggcaacgcgaggctcaggaagctaaggagagggctagggttgcagactccgacaggcaactcgcactgcagaaaaaggaagaggtcgaggcacaggtgattttccagctgcgggctaaacagtgtgtggcctgccgcgaaagggcgcacggggccgtacttcgtccttgtcagcaccacatcctctgtgagccctgcgccgccacagcacctgagtgcccatactgcaagggtcaacccttgcagtggtag

SEQ ID NO: 24784 - DNA, 462 bp, synthetic construct
  source 1..462: mol_type = other DNA; note = Synthetic coding sequence
atgagcagccccctggccagcctgagcaagacccggaaggtgcccctgcccagtgagccaatgaaccccggccgccgtgggattcgtatctacggagatgtgccagccagtcatgactctgaactgatggccttcatgaccagaaagctctgggatttagaacagcaagtcaaggcccagactgacgaaatactgagcaaagaccagaagattgctgcgttggaggacttagttcagaccttgagacctcaccctgcggaggccactctgcagcgccaggaggagctcgagactatgtgcgtgcagctgcagagacaggttagggaaatggaaaggttcttgagtgattatggcttgcaatgggttggggagcccatggaccaggaggactcggagagtaagactgtcagcgagcacggagaacgcgattggatgacagccaaaaaattctggaagccctag

SEQ ID NO: 24785 - DNA, 2382 bp, synthetic construct
  source 1..2382: mol_type = other DNA; note = Synthetic coding sequence
atgggccagtgctacaacctggaggacgacgacctggagaccgacgtgaacaagctgtccagtaagcctggcctggacagacccgaggaggagctgatgcagtacgaggtgatgtgcctcgaactgtcctatagcttcgaagaactgcagagtaaactgggcgacgacctaaattcggagaaaacacagtatgctaatcaccatcatattccagctgccgcgagctccaaacagcattgctattccaaagatcaaagttcatgcggccaggagcgcgaatatgccgtgcagactagcctgctgtgcagagtgaaaaccgggaggagtaccgtccatctggggtcaaagaaaaatcccggggtgaacctgtatcagaacgtccagtcgaattctcttaggagagattcctccgagagcgaaatccccgacatccaggcatcgcctaaggccgacgcttgggacgtggacgctatcttttgccctagaatgtcggcctcattttctaattctactaggacacgcgaagtggttaaagtgatcgacaagctgttacagacgcacttgaaaagggttcccttccatgatccatatctgtatatggctaaggcccgacgaacttccagtgttgtggatttcaagatgatggcgtttcccgatgtttggggtcactgccccccaccaaccacgcagcctatgctggaacgcaagtgcggcgtgcaacgaatccggatatttgaggacattcggagactgattcagccatccgacgtgatcaataaggtggtcttcagtctggatgagccatggcccttgcaggataatgccagcaactgccttcgcttcttttccaagttcgagagcgggaatctgagaaaggcaattcaggtgagggaattcgagtacgatctgttggttaatgccgatgtgaactccacccagcatcaacaatggttttactttaaagtttcaggcatgcaggctgctattccatatcacttcaacattattaactgcgaaaagccaaacagtcaattcaattacggcatgcagcccacactgtatagtgttaaagaagcactgctggggaagcccacttggatcaggactggacacgagatttgctattataagaatcactacagacagtcaactgccgtggctggtggagcatcaggcaagtgttattacaccctgaccttcgcagtcaccttccctcattccgaggacgtctgctatctggcctaccactacccatatacctacactgcactcatgacacacctcgacattctggaaaaaagtgtcaaccttaaggaggtgtattttaggcaggacgtcctttgccagacactcggtggcaatccatgtcctctcgtgacaattactgcaatgcctgagagtaatagtgatgagcatctggaacagttcaggcaccgcccctaccaggtgatcacagcccgggtccaccccggtgagtccaatgcctcctgggtaatgaaaggcacacttgagtttctagtgtccagtgatccggttgcccgtttacttagagaaaacttcattttcaagataatcccgatgctgaaccctgacggcgttataaatggcaaccacagatgttccctgtctggcgaagacctcaaccgccagtggctaagcccttcagctcacctgcagcctacaatctatcatgccaaaggcctcctgtatcacttatcctcaatcggccgcagccctgttgtgttctgtgacttccatgggcattcccaaaaaaaaaacgtgtttctctacggttgctcaatcaaagagacactgtggcaggctgcctgcacagtggggacctctacgatcctggaagaagtaaactaccggaccttacctaagattctcgataagctggctcctgcgttcactatgagctcctgttctttcctagttgagaaatcaagagccagtactgcgcgagtggtggtctggagggagatgggcgtgtctcggtcatacactatggaatcaagttactgcggctgcaatcaaggaccctaccagtgcactcagagactgcttgagcgaaccaaaaacgaacgggcccacccagttgacggcctccagggactccaatttgggactagagaacttgaggaaatgggcgctatgttctgcctgggacttctgattctggaattaaaatcggcatcctgcagtcaccagctgctggcccaggcggctaccctcctctctgctgaggaggacgcgctggaccagcacctgcagcgcctgaagtccagtaacttcctccccaagcatatttggtttgcctaccacttctttgctattaccaatttctttaaaatgaatctactccttcacgtgtcaccttag

SEQ ID NO: 24786 - DNA, 153 bp, synthetic construct
  source 1..153: mol_type = other DNA; note = Synthetic coding sequence
atgatgcagaacgtgcacctggcccccgagaccgacgaggacgacctctactccggctataacgattacaatccaatttacgacattgaagaactagagaacgatgccgcctttcagcaggcagtgagaacctcacacgggcgaagaccctag

SEQ ID NO: 24787 - DNA, 1299 bp, synthetic construct
  source 1..1299: mol_type = other DNA; note = Synthetic coding sequence
atgaccgccgtgcgggccgccggcttcaccaaggccgccctgcggggttccgcctttgacccgctctcgcagtccagaggaccggcctctcctctggaagccaagaaaaaggattcccctgaggagaaaatcaaacagttggagaaggaagtcaatgagctcgtggaagagtcttgcatcgcaaactcctgcggtgatctgaaattggcgctggagaaggcgaaggatgcgggaagaaaggaacgagtgctggtccgacagcgcgagcaggtcacgacccccgagaatatcaatctggacctaacctatagcgtcttatttaatctcgctagccagtacagcgtgaacgagatgtatgctgaagctcttaacacttatcaagtcatagtgaaaaacaagatgttctcaaatgcagggattctcaagatgaatatgggcaacatctacctgaagcagcgaaattacagcaaagctatcaaattctatcggatggcactcgaccaggtgccctctgtcaacaagcagatgcgcatcaagataatgcagaacattggagtcacttttatccaagctgatcgggagaaaatgaaaaaagcattccagaagttaatcacagtgccccttgagatcgacgaggataaatatatatctccaagtgacgacccccatacgaatcttgtaactgaggcgataaagaatgatcacctgcgccagatggagagggagcgtaaagcaatggccgaaaaatacataatgacaagcgcgaaattaatcgccccagtgattgagacgtctttcgcagcaggatatgactggtgcgtcgaagttgtgaaagcttcccagtacgttgagttagctaatgatctggaaatcaacaaggctgtgacgtacctccgccagaaagattacaaccaggccgtggaaatcctgaaggtgctggagaaaaaggatagtagggttaagtcagccgctgcaacgaacttgtctgccctctactatatgggtaaagactttgcacaggcaagctcttatgccgacattgccgtcaatagcgacagatataaccccgctgctttgactaacaaaggaaacaccgtctttgcgaacggcgattatgagaaggcagctgaattttataaagaggctttgcgcaacgacagttcctgtactgaggccctttataacataggactgacatacgaaaaactgaatcgcctggatgaagcactggattgcttcctgaagctgcatgccatactacgaaattctgccgaggtgctctaccagatagctaactag

SEQ ID NO: 24788 - DNA, 387 bp, synthetic construct
  source 1..387: mol_type = other DNA; note = Synthetic coding sequence
atggccgccgccgccgccgagcagcagcagttctacctgctgctgggaaatcttctgagcccagacaacgtggttcgaaagcaggccgaagcacgacaaatggctgccgtgctgctccggcgactcctcagctctgcatttgatgaagtgtacccagccctccctagcgacgtccagacagcaattaaatccgagctgctgatgataattcagatggaaacccagtcatccatgcgcaagaaagtttgcgacatcgcagctgaactggctcgtaatcttatagatgaggatggcaacaatcaatggccagaagggttgaagtttcttttcgattctgtgtcctctcagaacgtcggacttagggaggccgcccttcacatcttctag

SEQ ID NO: 24789 - DNA, 2766 bp, synthetic construct
  source 1..2766: mol_type = other DNA; note = Synthetic coding sequence
atgcggcccgagggcgccggcatggagctgggcggcggcgaggagcggctgcccgaggagagtcgtcgcgagcactggcaactcctgggtaacctaaagacaactgtagagggcttggtgagtacaaacagtccgaacgtgtggtctaagtacggggggttagaacggttatgtcgtgacatgcagagtatcttatatcacggactgatcagggaccaagcttgccggcggcagaccgactattggcagttcgttaaagatattagatggctcagcccccactctgctttacatgtggagaagtttatttccgtccatgaaaacgatcagtcctctgcagatggcgcctccgagagggcagtggccgagctatggctgcagcactctctacagtatcattgtctgtcggcccaactgcgacccctgctcggcgatcgccagtatatacgaaaattttacacagatgccgcctttctcctgtcggacgcacatgtcaccgccatgttacagtgcttagaggcagtggaacagaacaaccctagactcctggctcagattgatgccagtatgttcgcccggaaacatgaaagtcctctgctggtcaccaaatcccagtccctcaccgcactcccaagcagtacctataccccacctaacagctacgcccagcactcttattttggatctttctcttctcttcatcagtcggtgccaaataacggcagtgagaggcggagtacctcatttcctctatctggcccgcctcggaaaccccaagaaagtcgagggcacgtcagcccagcggaagaccaaacgatccaggcgcctccagtgtctgtttcggcccttgcccgggattccccacttacaccgaacgaaatgtcgtcttccaccctgacctcccccatagaagcctcatgggtaagctctcagaatgacagtccaggcgacgcctccgaagggccagaatatctcgctataggtaacttggaccctaggggaagaaccgcatcctgccagagtcacagtagtaatgctgaaagctcaagcagcaatctgttcagttcttccagctcccaaaaacccgactcagctgccagttctctcggcgatcaggagggcgggggcgaaagccagttatcgtctgttttgcgacgcagtagtttcagtgagggacagactcttactgttacctcaggtgccaagaagtcacacatccggtctcattcagatacctccatcgcttcacggggggcccctgaaagttgcaacgataaagctaagcttcgggggccacttccctatagtggtcagagcagtgaagtttctaccccctctagcctctacatggagtatgaaggaggccgctacctgtgcagtggtgaaggcatgtttcgcaggccgtcggaggggcaatctctgatctcctatttatcggaacaggacttcgggtcctgtgccgatttagagaaagagaacgctcatttttcgatttccgaatccctcatcgccgccattgaactgatgaagtgtaatatgatgagccagtgtctggaggaagaggaggtggaggaggaggatagcgatagagaaatacaagaactgaaacaaaaaatccgactcaggcggcagcagatacggaccaagaacctgttacctatgtaccaagaagccgagcacgggagctttcgcgtgacaagctcatcctctcagttttcttctagggactcggctcagctgagcgactcaggaagcgccgacgaggtcgacgagtttgagatccaggacgggtcagaggggagcaacctgactcatatcagcaaaaacggtttatctgtgtctctggctagtatgttttcggacgccgatatccgtagaaacaccgctagttcttccaagagttttgtgtcatctcagtctttttctcattgcttccttcactcaacaagtgcggaggcagtggccatggggctgctaaaacagtttgagggaatgcagttgcccgcagcgagcgaactcgaatggctggtgccggagcacgatgcaccacaaaaattgctgcccatccctgactcactgcccataagtccggacgatgggcagcacgccgacatttataagctgcggatcagagtgcggggtaatctggagtgggcccctccacgccctcaaataatcttcaacgtgcatcctgctcctacccggaaaattgctgtggcgaagcagaattaccggtgtgccggttgcggcatcaggacagatcctgattatattaaacgacttaggtattgtgagtacttgggcaagtacttctgtcagtgttgccatgagaacgctcagatggcaataccctctcgtgtgcttcgaaagtgggatttcagcaagtactacgtatctaacttcagcaaggaccttctgattaagatctggaacgatcccctgtttaatgttcaggacatcaacagcgctttgtacaggaaagtgaaactcctcaaccaggttagactgctgcgggtacagttatgtcacatgaagaacatgttcaagacttgccgtctggctaaagagctcctggacagctttgataccgtgccaggacacctgacagaggacctgcacctctatagcctaaatgatctaacggcgactcgcaaaggagaactcgggcctaggctggccgaattaaccagggccggtgctacacacgtggaaagatgtatggtcaggaaatctcattgcagcatgcagctcagtccctgcttttag

SEQ ID NO: 24790 - DNA, 1644 bp, synthetic construct
  source 1..1644: mol_type = other DNA; note = Synthetic coding sequence
atgcgggccctgaccgtgcagcgggtgaagttcgccatggacctgccactgcttaagagagctgggcaagacctggccgaaaagacaaagaattttgtttcaaggagcctcgtaattggggaagtgctttccatggcagacatggctactggtgttaagtgtggtatcatctattggctgtttggaggggctattaggaaccttggcagcccagaacacgtaaccaagtggttccaacccctgcaagaacagaaatatactggaatgtttgccatgactgaacgaggccatggttcaaatgctcgaggaatccagactgaggccacattcgacctcagtgcacaagagtttgtcatcgatacaccatgtgagaatgccgagaagatgtatatcggcaacgctatgtatggaaattacgctgcagtatttgctcagcttatcatcgacggaagatcccagggaccacactgcttcatcgtgcccgtgcgcgacgagaacggatctctgtatccaggtgtaacggctatcgacatgatgtacaaagaagggctgcatggggtggacaatggtatcttgatctttgataaggtcaggatcccaagagagaatctcttagacaagtttggatctgtagcgcctgacggacagtatcacagcccaatacgtaacaaatcagccagatttaacgctatgctggctgcccttacccctagcagacttgccgtggccttccaagctatgggggctatgaagttaggcctcacaatcgcgattcgctactctcactcacgaagacaatttggtcctaaaacaaaagaagaggtgaagatcatcgagcatcaaacccagaccctgcgccttatgccccacctggctactgcactggctttgacgtttgtctctcggtatgccggcgccctgctggacgaggacgtgttccagggtaaagagttagtgaattcccgcagtctgcaggccttggtggctggtctcaaggcttacagtacctgggagaacataagatgcttgcaggactgccgggagtgtaccggcggcatgggatacatgatggaaaacagaatatccggtcttaagtgcgacacagatgtattcgcaacattcgagggcgatgacgttgtcatgctgcaggtcgtcggccgagagttgcttgctcagtataccaaacagtatgaggagaagcccctcttcggcttgcttcagaactgggccgagtctgtgggggacaaactgcggacaagcttcctcgcctttaacatggatactgtagacgaccttgcattcttgttaaaggcagtcaagtttagggaacgcgtgctacaacgcgggctagtggcaaggatctactacaaagttaaaactaagaaggaggactttttccatgcttggaatagctgtctccatcacgtggccagtctgtctctggctcacacacatagggtgacactggagcagttctctctggccgtaaaatcatgtcccgaccaggaggaccagacgttgcttatgaagttctgtcttctgtatgggactaagctcgttttccaagaacgcgcctggtacctcgagcacaagtacctgacacctatggcttctactcgtatccgcaaccaggagcgctgctag

SEQ ID NO: 24791 - DNA, 6087 bp, synthetic construct
  source 1..6087: mol_type = other DNA; note = Synthetic coding sequence
atggacgtgaccgtgagcgagctgctggagctgttcctgcagagcccacttgtcacttgggtaaaaacatttgggcccttcggcagcggaagccaagacaacctgacaatgtacatggacctcgtcgatggcatatttctcaaccagatcatgctgcagattgaccctagacccactaaccaacgcataaacaagcatgtgaacaatgacgtgaacctcagaattcagaatcttacaatcctcgtgaggaacattaaaacctactaccaggaggtgctgcaacaactgattgttatgaatttaccaaacgtgttgatgatcggaagagaccctttgtctggaaaaagtatggaggaaatcaagaaggtgctactcctggtgctcggctgtgctgtgcagtgtgagcggaaggaggaattcatagagcgtataaagcagcttgatatcgaaacccaggccggcatagttgcccatattcaggaagtgacccataaccaggaaaacgtttttgacctacaatggctcgagctacctgatgttgccccagaggagcttgaagccttgtcacggagcatggtgctccatctcagacgcttgattgatcagagagatgagtgtacggagttgatagtggacttgacccaggaaagggattaccttcaagctcagcatccaccatctccaatcaagtcttcgtccgcagactccacgcctagtcctactagcagccttagcagcgaagataagcagcatctggccgttgagttagccgatacaaaggctagacttcgccgcgtgcggcaagaactggaggacaaaacagagcagctggtcgacacacgccacgaagtggatcagctggtgctggaactgcagaaggttaagcaggaaaatattcaactcgctgccgacgctaggtcagccagagcttaccgagacgaactggattcacttcgagaaaaggcaaatagagtggaaaggttggagctggagctgaccaggtgtaaagaaaagctccatgatgttgatttttataaggctagaatggaggagctcagagaggacaatattatactcattgagactaaagccatgttggaagagcagctgactgccgcacgtgctcggggagataaagtccatgagctcgaaaaagagaatctgcaactgaagtccaaactccatgaccttgagttggatagggacactgacaaaaagcgaatcgaggagcttctggaggagaatatggttctcgagattgcccagaagcagagtatgaatgaaagcgcccacctcggatgggaactggagcaattgtcgaaaaatgccgatttgtccgatgccagtagaaagagcttcgttttcgaattgaatgaatgcgctagctccaggattctaaagctagaaaaggagaatcagtccctgcagagcaccattcagggtctcagagacgcctctttggtgttagaggaaagcgggttgaagtgcggcgagctggaaaaagaaaaccatcagctgtcgaaaaaaatcgagaaactgcaaacccaacttgagcgcgaaaaacagtccaaccaggacttagagacactgtcggaggagttgatccgtgagaaagaacagctgcagtccgacatggagacattgaaggccgataaggcccggcagattaaagatctggagcaggaaaaagatcacctcaatagagcaatgtggagcctacgagaacgctcgcaagtgagctcagaggccaggatgaaggatgtagaaaaggaaaacaaagcactgcatcagacagtcaccgaagctaatgggaagttgtcgcagctcgagttcgagaagcgccagctgcatcgcgacctggaacaggccaaagaaaaaggggaacgagcggaaaaactcgagcgggagttgcaacgcctccaggaggagaacggtagactggctcggaaagtcaccagtctcgagaccgcgaccgagaaggttgaggccctggagcatgagtcccagggccttcagctcgaaaacagaacccttcggaagtccctggatacacttcagaatgttagtttacaactggagggactggagcgcgataacaagcagctcgacgccgagaacctggaactgagaaggctggtagagacaatgagatttactagtaccaaattagctcagatggagagagaaaatcaacagcttgagcgagaaaaagaggagctgagaaagaacgtggacctccttaaagcgctggggaagaaaagcgagcgccttgaactcagctaccaaagcgttagcgctgagaacctgagacttcagcagtctctggagtcctcgagccacaaaactcagactctcgagtcggagttaggagagttggaggccgaaaggcaggccctgcgtcgggatcttgaagctctgcgcctagccaacgcccagctcgaaggagccgagaaagaccgcaaagctctcgaacaagaagtggcacaactcgagaaggacaagaaactgctagagaaggaggctaagcggttatggcagcaggtggagcttaaagatgccgtgcttgacgatagcacggcaaaattatcggccgtagaaaaggaaagccgggctctggacaaagagctggcccgctgccgggacgctgccggtaaactgaaagaactggagaaagataatcgcgacttgactaaacaggtgaccgtgcacgcccggaccctgacaaccctgcgggaagatctcgtgctggagaaactgaaatctcagcaattgagttctgagctcgacaaactttcacaagagctggaaaaggtgggtctaaaccgtgagctcttactgcaggaagacgacagtggctccgatacgaagtacaagatactggaaggccgaaatgaaagcgccctgaagacaacgctggccatgaaggaggagaaaatcgttctgctcgaagcacagatggaggaaaaagctagcctgaatcgccaactagaatcagaacttcaaatgctgaaaaaagagtgcgaaactctgagacagaatcagggtgaggggcaacacctgcagaatagctttaaacatcctgctgggaagacagcggcttcacaccaagggaaggaggcatgggggccgggacataaagaggcaactatggagttgctcagggtgaaagatcgcgccatcgagctggagcgcaacaacgctgcgctgcaggcagagaagcagctgttaaaggagcaattacaacacctggaaacacagaacgtcacctttagctctcaaatcctcaccctgcaaaagcaaagcgcatttcttcaggaacacaacacaacccttcagacgcagactgctaaactccaggtcgagaattctacactttccagccagtccgctgctctgaccgctcaatacaccttgcttcagaaccatcacaccgccaaggagaccgaaaatgagagcttacaacgccagcaggagcaacttacagccgcctacgaagcactgctccaggatcatgagcatctcggaacactgcacgagaggcagtctgccgaatatgaggctttaatccgccagcactcatgccttaagaccttacataggaatttagagctggagcacaaggaactcggtgagaggcatggtgatatgcttaaacgcaaggctgagctggaggagcgcgagaaggtgctgactaccgagagagaagctctgcagcaggagcagcgcacgaatgccctagccatgggtgagaaccagcggcttagaggcgagttagacagagtcaattttcttcaccaccagttgaagggtgaatacgaggaactccatgcgcatacgaaggaactgaagacctccctaaacaacgctcagttggagctgaaccgatggcaggccagattcgacgaactcaaagaacagcatcagactatggacatcagtttgactaagcttgataatcattgcgaattgctgagccgcctaaaaggcaatctggaggaggaaaatcaccatctccttagccagattcaactgctgtcacagcagaatcaaatgttgctggagcaaaacatggagaacaaagaacaataccacgaagagcaaaaacagtatatcgacaagctgaacgctttacgccggcacaaggagaaactcgaagaaaagataatggaccagtacaagttctacgaccctcccccgaagaagaagaaccactggatcggagctaaggcgctagtgaagctcattaagcctaaaaaagagggatctagggagcgtttaaagtctactgtggatagccctccctggcagctggaatccagcgatccagcatcgcccgcagcttctcagccactgcgctcacaggccgaaaacccagatactcccgcattagggtcaaactgcgctgaggagcgtgacgcccacaacggatcggtcggcaagggccctggggacctcaaaccgaagcgcggaagcccgcacagaggttccttagatagaacggacgcaagcactgatctggccatgcgcagttggccttccgagctgggaagccggacctgctctacctcagccactaccacagccccatctaattccacccccatcgccagacatcccgggaggacaaagggttataattcggatgacaacctgtgcgagccgagcctggagttcgaggttcccaaccaccggcaatacgtgagcaggccttcttccctggaaagttcaaggaacacaagctccaattcatcacctctcaacctcaaaggatcatctgagcagctgcacggtcgctctgagagtttctcctcggaggatcttatacccagccgggacttagctaccttacccagggaggcttcaacgcccggcagaaatgcactgggtcggcacgagtacccactgccgcggaatggacccctgccacaagagggtgcacagaaacgagggactgcccccccctacgttggcgtgcgtccctgtagcgcaagcccctcttccgagatggtcaccctagaggaatttttggaggagagtaacaggagctcacccacccatgacacgccctcatgtcgggatgatctgctgtctgactacttccgaaaggccagcgacccaccagcaattggtggccagcccggcccccccgccaagaaagaaggggctaagatgccaacgaacttcgtcgctcctactgtcaagatggcagccccaacctcagaagggcgacctctgaagcccggtcaatacgttaagcctaattttcgcctgaccgaggccgaggctcctcctagcgtagcacctaggcaggcccagccaccacagtctctctcacttggtcgccccagacaggcccctgtgccgcccgcgagccatgcaccagcttctcgttccgcgtcgctgagtcgcgctttcagtctcgcatcagccgacttgctccgcgcttcaggacccgaggcatgtaagcaggagagtccacagaagctcggagcaccggaggccctgggcggtcgcgagactggctcccatacactgcagtcacctgcccctcccagcagccatagcctcgcaagagagagaacaccattagtgggtaaagctgggagttcctgtcaagggccagggccccgttcccggcctctggataccagacgctttagtctggctcccccaaaagaggagcggctcgctcccctgcatcagtcagcaacagcccctgctattgcgacagctggagcaggagcagccgccgcggggagcggctctaattctcagctccttcatttttcccccgctgcggctccagctgctagaaccaagcctaaagcccccccccgttcaggcgaggtagcaacaatcacaccggtgcgggctggactatctctgtctgagggggatggagttcctggacaaggttgcagtgaaggattgcctgccaagagtccgggccgcagccccgatctcgcgcctcatcttggccgcgctctggaggactgttccagggggagcgtgtctaaatccagccccgcttctccagaacccggcggcgaccctcaaactgtttggtacgagtacggctgcgtgtag

SEQ ID NO: 24792 - DNA, 3831 bp, synthetic construct
  source 1..3831: mol_type = other DNA; note = Synthetic coding sequence
atggacgaggtggagcaggaccagcacgaggcccggctgaaggagctgtttgacagcttcgatacaaccgggaccgggtctcttggccaggaagagctgacggatctgtgtcatatgctgtctctagaggaggtagcccctgtcttgcagcagactctcctgcaggacaaccttcttggcagagtgcacttcgaccagttcaaggaggccctgattttgatactttctagaacgttaagcaacgaggaacacttccaagagcctgactgcagtctcgaagcacagcctaagtatgttcgcggggggaagcgctatggtcggaggagcctgcccgagttccaggagagtgttgaggagttccccgaggttacagtaattgagcccctcgacgaggaagccaggcctagccacattcccgccggcgattgttccgagcactggaaaactcagcgcagcgaggaatacgaagcggaagggcagctgaggttttggaacccagacgatctgaacgcaagccagtccggctctagtcccccccaagattggatcgaggagaagcttcaagaggtatgcgaggacctgggcatcacgagagatgggcatctaaacaggaaaaaacttgtgtctatttgcgaacagtacgggcttcaaaacgtcgacggggaaatgttagaagaagtgtttcacaatctggacccagacggaacaatgagtgtcgaagacttcttctacgggctctttaagaacggcaagagcctgaccccgagcgcctctaccccatatcgccaacttaagcggcacctgagcatgcaaagttttgacgagtctggaagacggaccaccacatcttccgccatgacttctacaataggcttccgcgtgttttcttgtttggatgatggcatgggccatgcatctgtggaaagaatactggatacctggcaggaggaaggaatcgagaatagccaggagatcctgaaagccctggatttttcactggatggaaacatcaatctgacagaactaacactggcgttggagaatgagctcttggtgaccaaaaacagcattcaccaggccgccctggcatccttcaaggccgaaattaggcacttactcgagcgcgtcgaccaggtagtgcgagagaaggagaagctgcgatcagacttagataaagcggagaagctcaagagcctgatggcatctgaggtagatgatcatcatgccgcaattgagcgacgtaacgagtacaatctgagaaaactagacgaggaatacaaggagaggattgcagcattaaagaatgaattaaggaaagaacgcgaacagatcctccaacaggccggtaagcagcgactagaattagaacaggagattgaaaaagcgaaaacagaggaaaattacatcagagatcggctggctctgtcgctgaaagagaactcaaggcttgagaacgagctgcttgagaatgccgaaaaattggccgaatatgagaacctaaccaataagttgcagcggaatttagagaacgtacttgcagagaagtttggcgacttggatccgagtagtgctgaattctttttgcaggaagaaagattgacacagatgcgaaacgagtacgagaggcagtgccgcgtcctccaagaccaagttgatgagctgcaatcggaattggaagagtaccgtgctcagggacgagtcctgagattacctctcaaaaatagtccttctgaagaagtagaggccaacagtggcggaatagaacccgaacatggtttggggagcgaagagtgcaaccctcttaacatgtcaattgaagccgagctcgtgatcgaacaaatgaaagaacagcaccatagggatatctgttgcctgaggctggagctggaagacaaggtgcggcattatgagaaacagctggatgagacagtggtatcttgtaaaaaagcccaggagaatatgaagcagcggcacgagaatgaaactcacaccctcgaaaaacagatttcagacttgaagaatgaaattgccgagctgcagggtcaagctgccgtcctcaaggaggcgcatcatgaagccacatgtcgccatgaagaggagaagaaacagctccaggttaagttggaagaagagaagactcatctccaagaaaaactccgcctccagcacgagatggagcttaaagcacggctcacacaggcacaagcctcctttgaaagggagagggagggcttgcagagcagtgcatggaccgaagagaaagtgaggggcctgactcaggagctggagcagtttcaccaggagcagctgactagcctcgttgaaaaacatacgctcgagaaagaggagctccggaaagagctgcttgaaaaacaccagagggagctccaggagggtcgctacgaatcagaaaagctgcagcaggagaactccatattacgtaacgaaattacaaccctgaatgaggaggacagtatttctaaccttaaactgggcaccttgaatggcagccaggaggagatgtggcagaagacagaaacagtgaaacaggagaacgctgctgtccagaagatggtggaaaaccttaaaaagcagattagtgaacttaagataaagaatcagcaactggatctggagaatacggaactttctcaaaaaaatagccagaatcaagaaaagttacaagagctgaatcagagactcactgagatgctttgtcaaaaggaaaaggaaccaggcaactcagccttggaagagcgggagcaggagaagtttaatctgaaagaagagctggagcggtgtaaagtgcagtcctccacactggtgtcctcactggaagcagagctcagtgaggtgaaaattcagactcacatagtacaacaggaaaaccacctattgaaggacgagttggagaaaatgaagcaactccaccggtgcccggacctgagtgattttcagcaaaaaatctcaagtgtgctgagttacaacgaaaaactccttaaggagaaggaggccttgtcagaggagctaaacagctgcgtcgacaagctggctaagtccagcttactggagcaccgcatcgccacaatgaagcaagagcagaaatcctgggaacaccagagtgcatcactaaaatcccagcttgttgcttctcaggaaaaggtgcagaacctggaggacacagtccagaatgtgaacctgcagatgtcaaggatgaagagcgacctacgggttacccagcaggaaaaggaagctcttaaacaggaggttatgtcccttcacaaacagttacagaatgctggcggtaagagctgggccccagaaatcgcgacccacccgtcaggcctccacaaccagcagaaaagactcagctgggacaagttagatcatctgatgaacgaggaacagcagctcttgtggcaggaaaacgagaggctgcagacgatggttcagaatacaaaagcagagctcactcattcaagggaaaaagtcaggcagctggagtccaatctgcttccgaagcaccagaaacacctcaacccttcaggcacaatgaaccctactgagcaggagaaactcagtctgaagagggagtgtgaccagtttcagaaagaacagtctccagctaataggaaagtcagccagatgaactctctggagcaagaattagagaccattcatttggagaacgagggcttgaaaaagaaacaggttaagttggacgaacaattgatggaaaactctgtcgtgggatcaagtagggaaggctgctcgtcactgcccgagatcgtttgcgaagatgccgcacctgaggtgcattgcgacgcgtag

SEQ ID NO: 24793 - DNA, 2997 bp, synthetic construct
  source 1..2997: mol_type = other DNA; note = Synthetic coding sequence
atgaaggacagcggcgacagcaaggaccagcagctgatggtggccctgcgagtcagacctatctctgtagccgaactagaagaaggcgccacattaatagcccacaaggtggatgagcaaatggtggtgcttatggacccgatggaggaccctgatgacatcttacgcgcccacagatctagggagaagagctacctttttgatgtcgcttttgacttcactgccacccaggagatggtttatcaagccacgactaagagtctgattgaaggggtgatcagtggatacaacgcaacagttttcgcctacggtccgacgggttgtggaaaaacatatactatgcttggtaccgaccaagaaccagggatttacgtgcagaccctgaatgatttgtttcgggcaattgaggaaacttccaacgatatggaatacgaagtatcaatgagttacctggaaatatataacgagatgattagagatttgctcaaccctagtctgggctatttggaattgagagaggactccaagggtgtgatacaggtagccgggattacagaggtctcaactatcaatgcgaaggagattatgcaactgttaatgaagggtaatcgccagcggactcaggagcctactgccgcaaaccagaccagctctagaagtcacgcggtactgcaggtaacagttcgacagcggtcgagagtgaaaaacatcctgcaggaagtgcggcagggacgtttatttatgattgacctcgccgggagcgagagagcctcgcagactcaaaataggggccagcggatgaaggagggtgctcacattaataggagtctgcttgccctggggaactgcattaacgctctctctgataaagggtctaacaagtacatcaattacagagattctaagctgaccagactgctgaaagatagcttaggaggaaactcacggaccgtcatgatcgcccatatctcacccgcatcatcggctttcgaagaatccagaaacacactaacctacgccggcagagcaaagaacataaagactagggtgaagcagaatttactgaacgtttcatatcatatcgcccagtacactagtattatagctgacctaaggggggaaatccaaagactgaagcggaagatcgatgaacagacgggaaggggccaggcgagaggcaggcaagatcgaggcgacattagacacatccaggcagaagtgcagctgcattctggccaaggggagaaggccgggatgggccagttgcgggaacagcttgcttccgctttccaggaacaaatggacgtcaggcgccgcctgcttgaactcgagaatagggctatggaggttcagatcgatacaagcagacacttgcttacaatcgcggggtggaaacacgaaaaatccagaagagccctgaaatggcgggaggaacagagaaaagagtgctacgctaaggatgactccgaaaaagacagcgacaccggtgacgatcagcctgatatactggaaccccctgaagtggcagcagcccgggaaagcattgcagcactagtggacgagcagaaacaactgcggaagcaaaaattggcactagaacagcgctgcagggaactacgcgctcgagggcgccggttggaggaaactctgcctcggcggattggctctgaagagcaacgcgaggtgttgtctttgctttgcagggtgcatgagctagaagtggaaaataccgaaatgcagtcccatgcgttgctgagagacggtgcgctccgccaccggcacgaggccgttcggcgtttggaacagcacaggtctctttgcgatgaaattatacaggggcagagacagataatcgacgactacaacttggccgtaccacaacggctcgaagagctttacgaagtgtacttgcgcgagctggaagaaggaagtctagaacaggcaacaataatggaccaagtggccagccgggccctccaggactcctcactgcctaaaatcacaccagccgggacatcgttgacaccggatagtgatttggagtccgtaaagactctcagcagcgatgcccagcacttgcagaactctgccctcccaccactgtcgacagagtccgaggggcaccacgtgtttaaagccgggaccggagcgtggcaggcaaagtcatcttctgttccgactccaccccctatacaactggggtctctcgtgactcaggaggctccagcccaggacagcttgggtagttggattaactcctcccctgacagctcagaaaatctgagtgaaatacccctctctcataaagagcgcaaagaaattctcaccggtacaaagtgcatttgggtcaaagccgcaagacgacgatcccgcgcactgggaaccgaggggagacacctgctggcaccagcaactgaaaggagctcactgagcctccacagtctatctgagggcgatgacgcacgcccaccaggacctctagcatgcaagcgtccaccgagtcctaccctgcaacatgctgcttctgaagacaacctgagttcctctaccggcgaagctcccagtcgtgccgtggggcatcacggagacggtccacgtccctggttacgtgggcagaagaagtccctgggcaaaaaaagggaggaatccctggaagcaaagcggaggaagcgcagatcccggtcgtttgaggtcacaggtcaaggactctcacatcctaaaacacatctcctcggcccccaccaggccgagcgcattagtgaccatcggatgcctgtttgtcgccaccctgcgcccggcattcgccacctggggaaggtgacccttcctctggcaaaagtgaaactgccgccgagccagaataccggaccaggagatagctcgcccctagcagtacctccaaaccccgggggtggctctcgcagagctacgcgtgggccacgtctaccccatgggacttctactcatggtaaagacgggtgcagtcgccacaactag

SEQ ID NO: 24794 - DNA, 1194 bp, synthetic construct
  source 1..1194: mol_type = other DNA; note = Synthetic coding sequence
atgaccgccgaggagggcgtgcagctgagccagcagaacgccaaggacttcttcagggtgctcaatttgaacaagaagtgcgacacgtcaaaacacaaagtgctggtggtttctgtgtgcccacagagtcttccatactttgcggccaagttcaatctgagcgtcactgatgcctcccgtcggctgtgtggtttccttaagagcctgggcgtacattacgtgttcgacaccactattgcggcggatttttcaatccttgaaagtcaaaaggagtttgttcggagataccggcaacacagtgaggaagagaggactctgcccatgctgacatctgcctgccctggctgggtacgatacgcagaaagggtgctgggacggccaatcacagcacacctctgtaccgccaagagcccacagcaggtgatggggagcttggtaaaggattatttcgcgcgccaacagaatttgagtccagagaagattttccatgtcatcgtggctccttgctatgataaaaagctggaggccctacaggagtccctgcctcccgcccttcacggttcacggggggcggattgcgtgctcacctccggcgagattgctcaaatcatggagcaaggcgacctgtctgttagggatgcagccgtagacacactctttggcgacctcaaggaagataaggtgactcggcacgatggagcctcctccgatggacatctcgcccacatcttccggcatgccgctaaagaactcttcaacgaagatgttgaggaggtgacctatcgtgcgcttagaaataaagacttccaggaggtaaccctggagaaaaatggggaggttgtcctgcgatttgcagctgcttatgggtttcggaacatccagaatatgattctgaagctgaaaaagggcaagtttccatttcactttgtggaggtgctcgcctgtgctggcggctgtcttaacgggcgaggccaggcacaaactcccgacgggcatgcagataaggctctccttaggcaaatggaggggatctacgccgatatacccgttaggcgccctgaatcttcagcacatgtccaagagttgtaccaggaatggttagaagggataaattcacctaaagctagagaggttctacacacaacttaccagagccaagagcgcggcacacactccctcgatatcaagtggtag

SEQ ID NO: 24795 - DNA, 3603 bp, synthetic construct
  source 1..3603: mol_type = other DNA; note = Synthetic coding sequence
atgaaggtggccggcggcctggagctgggcgccgccgccctgctgtctgcaagcccaagggctcttgtgaccctttcaacaggtcctacatgttccatactcccaaaaaacccactgtttcctcaaaatttaagctcccaaccctgcatcaagatggagggcgacaagtctctaacattctcctcttacgggctccagtggtgtctctatgaactcgataaggaagagtttcaaactttcaaagagctattgaagaagaagagctccgaatcaaccacatgctccattcctcagtttgagattgaaaacgcaaacgtggaatgcttggcgctccttcttcatgaatactacggcgcatccctagcctgggcaacttccatctccatctttgagaacatgaatcttcgaacactctcggaaaaagctcgtgacgacatgaagaggcatagccccgaagaccccgaagccacaatgaccgatcagggcccgtctaaggagaaggtacctggaatttcacaggccgttcagcaagattccgccacagctgccgaaactaaagaacaagagatctcacaggccatggagcaagagggggccacagctgctgagacggaggagcaagagatttcccaagccatggagcaagagggagccacagcagccgagactgaagaacagggacatggcggcgatacgtgggattacaagtcccacgtcatgaccaaattcgctgaagaagaagatgtcaggcggagcttcgagaacaccgcagctgattggcccgagatgcaaactctggcaggcgcttttgattccgacaggtggggcttccgaccaaggaccgtggttcttcacggtaagtcaggcatcggtaaatcagccctcgcccggcgcatagtcttatgttgggcacagggcggtttataccaaggtatgttttcctatgtctttttcctgcccgtccgagaaatgcagagaaagaaagagagcagcgtgacagaattcatctctcgggaatggccagatagtcaggcacctgtgactgagataatgtccaggcctgaacgactgctgtttatcattgatgggttcgatgatcttgggtccgttctgaacaacgacactaaactctgcaaagactgggcagaaaagcagcctccttttacccttataagatcactactgcgcaaggtgctgctgccagaaagctttcttatcgtcaccgtccgcgatgttggaactgagaagctgaaatcagaggtcgtgagtcctagatacctattggtgcgggggatcagcggtgaacagcgcatacacttgctcctcgagcgggggatcggcgaacatcagaagacacaagggcttcgagctattatgaacaatagagagttgctggaccagtgtcaggtacctgctgtaggtagcctcatctgcgttgcgttgcagctccaggacgtcgttggggagtccgtggccccctttaaccaaactctcacaggcctgcacgctgccttcgtttttcaccaactgacaccaaggggagtggtgcgtaggtgcttaaatctcgaagagcgagtggttctcaaacgtttctgccgcatggccgtggagggcgtttggaataggaaatccgtatttgatggggatgatttaatggtgcagggactgggcgaatcggaactgcgcgcactgttccatatgaatatccttctgcctgactcccattgtgaggaatactacaccttctttcacctgagcttgcaggacttctgtgccgccctgtactacgtactcgagggtctggaaattgagcctgcgctctgcccgctctacgtggagaagaccaagaggtcaatggagctaaagcaagcaggctttcacatccactcactttggatgaaacggttcctcttcggcttggtgtccgaggatgtccgtcgccccctcgaagtgttattgggatgccctgtcccactgggcgtgaagcaaaaactgctgcactgggtgagtctcctcggtcagcagccaaatgccaccacccccggagacaccctggatgcctttcactgcctgttcgaaacccaagacaaggaattcgtgcggctcgctctgaattcattccaggaggtatggctgcctataaatcaaaatctggatctcatagcttcaagtttctgcctgcaacactgtccttaccttcgaaaaattcgcgtggacgtgaagggaatctttccccgggatgagtctgccgaggcatgcccagtggttccgctctggatgcgcgataaaaccctgatcgaggaacagtgggaggacttctgctctatgcttggaacacacccccacttgagacagcttgacctgggctcaagcattctgaccgagagagccatgaaaactctgtgtgccaagttgcggcacccaacttgtaaaatccagacacttatgttccggaatgctcagatcacacccggtgtgcagcacctatggcgcatagtgatggccaaccggaacttaaggagtctgaacctcggtggaacccatctgaaggaggaggacgtacgcatggcttgcgaggcgttgaagcacccgaagtgcctgctggagagcttgcgccttgattgttgcggtctgacccatgcctgctacctgaaaatcagccaaatcctcaccacaagtccctcactgaagtccctctctctggctggaaacaaggttacagaccagggagtgatgccactgtccgacgcccttcgagtgagccagtgcgcactacaaaagctcatcctggaggactgtggaatcacagcgacagggtgccagagcttggcttccgctctggtctctaaccgctctctaacacatttgtgcttgagcaataattcgctcggcaacgagggcgtgaacctcttgtgtaggtccatgagactcccacactgctcccttcagaggctgatgctgaaccagtgccatctggatacagccggatgcggttttttggcacttgcactcatggggaattcctggctcacacacctgtcactgtccatgaacccagtggaggacaatggagttaagttgctgtgtgaggtcatgagagaaccctcttgtcaccttcaggatctagaactggttaagtgccacctgaccgccgcttgttgtgagtcactgtcatgtgtcattagcagaagtagacacctgaaatcactcgacctcacggacaatgctctgggggacggaggggtggcggcgctttgcgaaggattgaagcagaaaaactccgtgctcgcccggctagggctgaaggcttgtggcctcacaagtgactgctgtgaggcgctctcccttgccctctcatgcaatcgccatcttacttcactcaacctggtacagaacaatttttctcctaaagggatgatgaagctgtgttcggctttcgcatgcccgactagtaatctccagataatagggctgtggaagtggcaatacccggtccagattaggaagctgttggaggaggtccagttgcttaaaccacgcgtcgtcattgacggatcgtggcactcctttgatgaagatgaccggtattggtggaaaaactag

SEQ ID NO: 24796 - DNA, 2787 bp, synthetic construct
  source 1..2787: mol_type = other DNA; note = Synthetic coding sequence
atgaacgaggccatggccaccgacagcccccggcggcccagccggtgcacgggtggtgtggtcgtgcgccctcaggcagtgacagaacaatcatacatggaaagtgtagtgaccttcctgcaggacgttgtgccccaggcctattcaggaaccccattaactgaggagaaggaaaaaatcgtctgggtgaggttcgaaaacgccgacctgaacgatacaagccgcaatcttgagtttcacgagatacacagcacaggcaacgagcccccactgctgataatgatcggttatagcgacggaatgcaggtgtggagcatccctatctccggagaagcacaagaactctttagtgtacgccacggtccaattagggcggccaggatcctccccgctccccaattcggagcgcagaagtgtgacaatttcgctgaaaagcgccctctgctgggcgtttgcaagtctataggatcctccggcacatctcccccttattgttgcgtggatctgtactccctgcggaccggagagatggttaaatcaattcaatttaagacacccatctacgatttacattgcaataaaagaattttagtcgtggtgttacaggaaaagatagcagcttttgactcatgtacttttaccaagaagttttttgtgaccagttgctatccctgtcccgggcccaacatgaatcccatcgcactggggagcaggtggcttgcatacgctgagaacaaacttattcgctgccatcagagtaggggaggtgcttgtggtgacaatatacagagctataccgcaaccgtgatctcagcggccaaaacactgaagagtggcctcacgatggtgggcaaggtcgttactcaactcactgggaccctgccttcaggcgtcactgaagacgatgttgccatccacagcaatagccgaaggtcccctctcgtgccgggtattattacagtgatagatacagagacagtgggagagggacaggtcctcgtgagtgaggactccgatagtgacggcattgtggcccattttcccgcgcacgagaaaccagtctgctgcatggcttttaatacatcaggaatgctcctggttactactgataccctagggcacgattttcacgtctttcagatccttacccatccgtggtccagcagccaatgtgccgtccaccatttatacacactccaccgcggcgagaccgaagcaaaggttcaggatatttgcttctcacacgactgcaggtgggtggtagtttcaactctccgaggaacatctcacgtgtttcccattaacccttatggggggcagccatgtgttagaacgcacatgtctccacgcgtggtcaatcggatgtcaagattccagaagtccgccgggcttgaagagattgagcaggaattaacgagcaagcaggggggccgatgttctcctgtccctggtctgtccagctcacctagcgggtccccactgcatgggaagctgaattctcaggacagttacaacaattttaccaataataatccgggcaatcccagattatcacccctgccctccttgatggtggttatgcctctcgcccagatcaaacagcctatgacgctgggcactattaccaagcgtacaggcccatacctcttcggggcagggtgcttttctattaaagcaccctgcaaagtgaaaccaccaccccagatttcaccatccaaatctatgggaggcgagttttgtgtggccgccatctttggcaccagcagatcatggtttgctaataatgcagggctgaaaagagaaaaagatcagtccaaacaagtggtagttgagtctctgtatatcatctcttgttatggcaccctggtggagcatatgatggagccccgtcccttgtctacggccccaaaaatcagtgacgatacacccctggagatgatgaccagccctagagcttcttggactcttgtcaggactccccagtggaacgagctccagcctccatttaatgccaaccatccactgctcctggctgccgatgcggtccagtactaccaattcctcttggcggggctggtgccacctggctctcccggacctataacaaggcacgggagttacgattcactggctagtgaccattctggacaggaagacgaagaatggctgtctcaggtggagattgtcacgcatacagggcctcacagaagactgtggatgggtccccagttccagttcaaaacgatccacccgtccggtcagacaacggtgatttctagcagttcctcagttctgcaatcacatgggccaagtgatacaccacagccgctcctcgactttgacaccgatgatctggatttgaatagtctgagaatccagcctgtgagatctgaccccgtctccatgcccgggtcgagtaggcctgtgtcagatagacgcggagtatccacggttattgatgcagctagcgggaccttcgataggagtgtgactctcttggaagtgtgtgggtcctggcccgaaggcttcggcctgagacacatgagctcaatggagcatacagaggaaggcctgagagagaggttggcagatgcgatggccgaatccccttccagagatgtggtcggatcagggaccgagcttcagagagaagggagcattgagaccctgtccaactcaagcggcagcaccagcggttccattccgcgcaattttgatggttaccggagtcccctgcccacaaacgaatctcagccgttgtctctgttccctactggcttcccctag

SEQ ID NO: 24797 - DNA, 501 bp, synthetic construct
  source 1..501: mol_type = other DNA; note = Synthetic coding sequence
atggtgaacagctgctgcggcagcgtgtgcagcgaccagggctgcggactggagaattgttgtcgtccatcatattgccaaactacctgttgccgcaccacatgttgtcggcccagctgctgcgtatcatcctgctgtaggcctcagtgttgtcagaccacttgctgtagaaccacctgctgtcacccttcctgctgtgtgagctcatgctgtcgaccgcagtgctgtcagagcgtgtgttgtcagcctacctgctgtcggccgcagtgctgccagacaacgtgttgtcgcaccacatgttgtagaccttcatgctgtagaccccagtgttgtcagtccgtttgctgccaaccaacttgttgttgcccaagctactgcgtctcgtcatgctgccggccacagtgttgccagacgacctgttgccgcactacttgctgccgtccttcttgctgtgtctccagatgttatcgcccgcactgcggtcagagtttgtgttgttag

SEQ ID NO: 24798 - DNA, 1104 bp, synthetic construct
  source 1..1104: mol_type = other DNA; note = Synthetic coding sequence
atggacgacgccgccgtgctgaagcggcggggctacctgctgggcatcaatttgggcgagggctcctacgccaaggtgaagagcgcctatagcgagaggctgaagttcaacgtggctataaaaataatcgatagaaaaaaggcacccgcagattttctcgaaaagtttttaccgagggagatcgagatactggccatgttgaatcactgttccattattaagacctatgaaatcttcgagacctcgcacggaaaagtgtacattgtaatggagctggctgtccagggagacctgctggagttgataaaaacgcgcggcgcactccatgaagatgaagctagaaaaaagttccaccagctctcactcgccatcaaatattgccatgacttagatgtggtccaccgagacctaaaatgtgataatctgctcctggacaaagacttcaacatcaaactgtcggatttctctttcagtaagcgttgcctcagggatgatagtggaagaatggctctgtcaaagactttctgtggcagtccggcttacgccgcgcccgaggttttgcagggaattccttaccagcccaaggtgtacgacatatggagcctcggagttattctctatatcatggtgtgtggttctatgccttacgatgactccaacatcaagaaaatgctgcgcatccaaaaagagcatagggtgaactttcctcggtccaagcacctcaccggtgagtgtaaagacctgatctaccacatgttgcagcctgatgttaatagaaggctgcatatcgacgagattctgtcccactgttggatgcagcctaaggcacgaggatcaccttccgtggccattaataaggagggggagagcagtagggggaccgagccattgtggacacccgaacccggatctgacaagaaatccgcgaccaagctcgagcctgaaggcgaagctcagccccaggcgcagccagagacgaaacctgaaggcaccgccatgcagatgtccagacagtcagaaatcctgggatttccatccaagccaagtactatggaaaccgaagagggcccaccgcagcagcccccagagactagagctcagtag

SEQ ID NO: 24799 - DNA, 273 bp, synthetic construct
  source 1..273: mol_type = other DNA; note = Synthetic coding sequence
atgagccactacggcagctactacggcggcctgggctacagctgcgggggcttcggcggcttgggctatggttatggctgtggctgtggctccttttgtcgcagaggtagcggatgtggctacggaggctatggatacggaagtgggtttggtagctatggatacggatcgggctttggtggttacgggtatggatccgggtttggtggctatggatatggctgctgtagacccagctataatggtgggtacggcttcagcggtttttattag

SEQ ID NO: 24800 - DNA, 519 bp, synthetic construct
  source 1..519: mol_type = other DNA; note = Synthetic coding sequence
atgagctacaactgctgcagccggaacttcagcagctgcagccacggcggttatctgcactaccccggaagtagctgtggatccagttacccgtcgaacttagtgtacagcactgacctatgcagccccagtacatgccagctggggagttccctgtacagggggtgtcaggaaacctgttggcgccctaattcttgtcagactctgtgtgtcgagagttcaccatgccatactagttgttattacccaagaacgcacatgctctgcaattcttgtttgacgatgcatgtgggctcccgaggcttcgggagcaatagctgctgctcgcttagctgcggcagcaggtcatgttcaagcctggggtgcggctccaacggttttcgctatctgaactaccggattcacacatccccaagccagagttacagatccagattctgccaccctatatacttccccccgcgacggtggttccattccagctgttaccaacctttctgcagaagcggcttttactag

SEQ ID NO: 24801 - DNA, 1554 bp, synthetic construct
  source 1..1554: mol_type = other DNA; note = Synthetic coding sequence
atgagcggcagctgcagcagccggaagtgcttcagcgtgcccgccaccagcctttgttccaccgaagtttcctgtggaggacccatctgtctgccctcctcttgtcagagccaaacctggcagctggtgacttgccaggacagctgcggcagtagcagctgtggcccccagtgcaggcagcccagctgccccgtctctagctgcgcacagcctctctgttgtgaccccgtgatatgtgagcccagctgctccgtttcaagcggctgtcagcccgtttgctgcgaggctactacatgtgagccgtcttgctcagtttccaactgctaccagccggtatgctttgaagcgaccatctgtgaaccatcatgtagcgtctccaactgctgccagccagtgtgcttcgaagcaaccgtgtgtgagccaagctgctcagtgtctagctgcgcacaacccgtatgctgtgaacccgcaatttgcgaaccttcctgcagcgtgtcgagttgttgccaacccgtcggttcagaggccacatcttgccagcccgtcttgtgcgtccccaccagctgccagcccgtgctttgcaagagttcctgctgccaacccgtggtctgcgagccaagttgctgcagtgcagtgtgcacactgcccagtagttgccaacccgttgtctgtgaacccagctgctgtcagcccgtgtgtcccacccccacatgctccgtaacgtcctcctgccaggctgtttgttgcgacccatccccctgtgagcccagctgttcagagtcttcaatctgtcaacctgcgacctgtgttgccctcgtatgtgagcctgtgtgcttgaggcccgtgtgttgcgtccaatcttcctgcgaacccccgagtgtgccatcaacatgccaggaaccgtcgtgctgcgtttccagcatctgccagcccatatgctcagagccttctccttgttcaccagctgtctgcgtgagctctccatgtcagcccacgtgctatgtggtcaagcgatgtcccagcgtgtgccccgagcctgtttcctgtccttctacctcttgccgcccactctcctgttcccccggctctagcgcctccgccatctgtaggccaacatgtccccggaccttttatattcccagcagttctaaacggccttgtagtgctaccatatcttatagacctgtgtcccggcccatctgtagacccatctgttcgggccttctgacctatagacagccttatatgacttcaatatcctataggccagcgtgctatagaccctgttattctatcctgcgcagacccgcttgtgttactagctactcttgccgcccagtctatttccgcccctcctgtacagagtcagacagctgcaaacgggattgcaagaaatcgaccagcagtcagttggactgcgtggacaccactccttgcaaggtggatgtttctgaggaggctccatgccagccaacagaggccaaacccatcagtccgactaccagggaagcagcagccgcacagccggctgcctcaaaaccagcaaattgctag

SEQ ID NO: 24802 - DNA, 1026 bp, synthetic construct
  source 1..1026: mol_type = other DNA; note = Synthetic coding sequence
atggccgacggctgctgccccggcaacaccaccgccatccccgccgtccccaccatcacaacgtatcccgtgaagggcggctttcgccacgcattatgcctcccctcctcttgccacagccggatgtggcagctggtaacctgtcaggagtcatgtcagccaagtataggcgcaccctccggctgtgatccagccagctgccaacctacacgtctgcccgctactagttgtgttggttttgtgtgtcagccgatgtgctcacacgctgcctgctaccagtcagggactgggcagtctccctgtctggtgtcttcttgccaacccagttgctcagagagtacttgttgccaggaaaaatgctgtgacgcatcaccctgtcagcagagttcatgtcaggaatctgtgtgtatgagtggttcatgccaggccgcctgtggccagtctgtatgctgcgacgccggatcctgtcagccatcttgcagcgaggtgacttcctgtcccgaaacatcatgtctacccactatctgcacagcttctccttgtcagcccacttggtgccagggttcgagctgccagccggtcagcggagagggtcagccatgcaaatctacatactatcaaccaatttgttacatctttaaaccatgtcagtccgccctgtacatgcccgtgccatgtcaaccaagtacttgcgtcttctcttcctgcaataccacatgctgcgtcccgtctcattgccagcccccacactgccaactggtcccctcaacttgctttatatatcagcccgtggctaattgccaggctccttgctccaccaagaactgctgcaaacccgcttcctgcgacactgtaattagtggtcaacctacctgtgacggtcccccgagttacaaccagtccggatgcaagtctgcctgctgcgtgactggcctcggcaccagtccctcgtccgggtccaattgtctgcccacaagctgccagcccagctgcgagtcaagtttttgcaaggccaccctgtgctag

SEQ ID NO: 24803 - DNA, 588 bp, synthetic construct
  source 1..588: mol_type = other DNA; note = Synthetic coding sequence
atggtgagcagctgctgcggcagcgtgtgcagcgaccagagctgcggtcaaggactcgggcaggaatcgtgttgtcgacccagttgttgccagaccacatgttgtcgtactacctgttgccgcccttcctgctgcatctcttcttgttgtagaccgtcttgctgcatctcgtcatgttgcaagccttcatgctgcagaacgacatgttgtcgcccctcgtgctgcatttcatcttgttgccggcccagctgttgtatcagttcatgttgcaagccgtcctgctgtaggacaacttgttgcagacctagctgctgcatctcctcatgctgcaggccaagctgctgcatttccagctgttgcaagccgtcatgctgccagacaacctgttgtcgcccctcgtgctgtatttccagctgctatcggccccagtgctgtcagccctcttgctgcagacccgcctgttgtatttctagctgttgccatcctagttgctgcgtgtcaagctgccgatgcccattcagctgtcccacgacctgttgccgcactacctgttttcaccctatttgctgtgggtccagctgttgctag

SEQ ID NO: 24804 - DNA, 588 bp, synthetic construct
  source 1..588: mol_type = other DNA; note = Synthetic coding sequence
atggtgaacagctgctgcggcagcgtgtgcagccaccagggctgcgggagggatctgtgccaggagacatgttgtagaccctcctgctgcgagacaacctgctgcaggactacctactgccgccctagttgctgtgtgtcaagttgctgccgcccccagtgctgtcaaagcgtgtgctgccagccgacatgctgtcggcccagatgctgtatcagctcctgctgccgcccaagctgttgtgtgtcttcttgctgtaagccgcagtgctgtcagtcaatgtgttgtcagccgacttgctgccgacctcggtgctgcatttcttcctgttgccggccaagctgctgtgtatcttcctgctgccggccccaatgctgccagagcgtgtgttgtcaaccaacctgctgccaccccagttgtagcatttccagttgctgtcgccccagctgctgtgaatccagttgttgccgcccttgctgctgcctcaggcccgtgtgcgggagggtctcttgtcatacgacatgctaccgccctacctgcgttatatccagctgtcccagaccactttgctgcgcctcttcctgctgctag

SEQ ID NO: 24805 - DNA, 633 bp, synthetic construct
  source 1..633: mol_type = other DNA; note = Synthetic coding sequence
atggtgagcagctgctgcggcagcgtgtgcagcgaccagggctgcgggcaggatctgtgccaggagacttgctgtcgtccgagctgctgcgagaccacgtgctgtcgaacaacatgttgcagaccatcctgctgtgtgtcaagctgctgccgccctcagtgctgccagagtgtgtgctgccaaccaacatgttcccggccatcctgttgccagactacttgttgccgcacaacgtgctatagaccttcttgttgtgttagttcttgctgcagaccccagtgctgtcaacccgcctgctgtcaacctacctgctgtcgcccaagttgctgtgagacgacgtgttgtcatcccagatgttgtatatccagctgttgccgaccatcttgctgtgtcagtagttgttgtaaacctcagtgctgccagagcgtatgctgccaacccaattgctgccggccatcttgtagtatttctagttgctgccgcccgagctgttgcgagtctagctgctgcagaccctgctgctgtgttcgtccagtgtgtggtcgagtgagctgtcacactacatgttataggcctacctgtgtaatttcgagctgccctcggcccctgtgctgtgcttcaagttgttgctag

SEQ ID NO: 24806 - DNA, 387 bp, synthetic construct
  source 1..387: mol_type = other DNA; note = Synthetic coding sequence
atgaccggcagctgctgcggcagcaccctgagcagcctgagctacggcggtggctgctgccagccctgctgttgcagagacccctgttgctgtcgccctgtcacttgccagactaccgtttgccgacctgtgacttgtgtgcctagatgcaccagacctatctgcgaaccttgtaggagaccagtctgctgtgacccttgcagtttacaggagggctgctgtcggcctattacatgctgtccctcaagctgtaccgccgtggtgtgtcgaccttgttgctgggccaccacctgttgccaaccggtctcggtccagtcaccgtgttgcagacccccttgcggccaacccacaccatgcagcactacgtgcagaacctcatcatgctag

SEQ ID NO: 24807 - DNA, 387 bp, synthetic construct
  source 1..387: mol_type = other DNA; note = Synthetic coding sequence
atgaccggcagctgctgcggcagcaccttcagcagcctgagctacggtggtggctgctgtcaaccttgttgctgtcgggacccttgctgctgccgccctgtcacctgtcaaactacagtgtgccgaccagtgacctgcgttccccgctgcacgcggcctatctgtgagccatgtcgtcgcccagtttgttgtgacccctgttcccttcaggagggctgttgcagacctataacctgctgcccttcaagttgtacagccgtcgtgtgtaggccatgctgctgggccacaacatgctgtcagcctgtgtctgtacagtcaccttgctgcagaccaccatgcgggcagcccacaccttgctctaccacctgcaggaccagctcttgctag

SEQ ID NO: 24808 - DNA, 297 bp, synthetic construct
  source 1..297: mol_type = other DNA; note = Synthetic coding sequence
atggactgctgcgccagccggggctgcagcgtgcccaccggccccgcaacaacgatatgttcatccgacaagagctgcaggtgtggcgtgtgtctgccttccacctgtccacacactgtctggctgctcgagcctacatgctgtgacaactgccctccgccctgtcacattccacagccctgcgtgcccacatgctttctcctgaattcctgtcaacccactcccgggctggaaacattaaacttaacaacatttacgcaaccctgctgcgagccatgcctccctcggggctgctag

SEQ ID NO: 24809 - DNA, 297 bp, synthetic construct
  source 1..297: mol_type = other DNA; note = Synthetic coding sequence
atggactgctgcgccagccggagctgcagcgtgcccaccggccccgccacaacaatctgcagctcggataagtcctgccgctgtggggtctgtcttccttctacgtgcccacacaccgtctggttgctcgaacccatctgctgtgacaattgtccacccccgtgccacatccctcaaccttgtgtccctacatgttttctcttaaactcttgccagcctacacccggacttgagacccttaatctgaccactttcactcaaccatgctgtgagccttgtctgccacggggatgctag

SEQ ID NO: 24810 - DNA, 297 bp, synthetic construct
  source 1..297: mol_type = other DNA; note = Synthetic coding sequence
atgtactgctgcgccctgcggagctgcagcgtgcccaccggccccgcaacaactttctgttccttcgataaatcatgccgctgcggtgtgtgcttaccttctacatgtccccacgaaatatccctgctccagccaatttgctgcgatacatgcccgccgccgtgttgtaaaccagatacctacgtcccaacatgctggctcctgaataattgccaccccactccagggctatcgggcatcaatctgactacttacgtgcagcctgggtgtgaatccccttgcgaaccaagatgctag

SEQ ID NO: 24811 - DNA, 291 bp, synthetic construct
  source 1..291: mol_type = other DNA; note = Synthetic coding sequence
atgtgccacaccagctgcagcagcggctgccagcccgcctgctgcgcaccttccccatgtcaggcttcctgctatatcccagtggggtgtcaatcttccgtgtgtgtgcccgtgagcttcaagcccgctgtgtgcgtgcccgtgcgatgtcagagttccgtttgtgtgcccgtatcctgcaggccggttgtgtacgcagcaccatcttgccaatccagcgggtgttgtcagccaagctgcacatccgtcctgtgtaggcctatttcatgtagcaccccatcatgttgttag

SEQ ID NO: 24812 - DNA, 339 bp, synthetic construct
  source 1..339: mol_type = other DNA; note = Synthetic coding sequence
atgtgccacaccagccacagcagcggctgccccatggcctgccccggtagtccctgctgcgttccatccacatgttacccccccgagggatatggtacctcctgttgttgcagtgcaccctgcgtggcattgctgtgccgtcctctctgcggcgtcagcacttgctgtcagcccgcctgctgcgtgccaagtccctgtcaagtggcttgttgtgtcccggtatcctgtaaaccagtgctttgcgtggcttctttctgccccaccagcggatgctgtcagcccttttgtcctacattggtgtatcgaccagtgacatggagcacacccactgggtgttag

SEQ ID NO: 24813 - DNA, 666 bp, synthetic construct
  source 1..666: mol_type = other DNA; note = Synthetic coding sequence
atggccaccagcaccatgagcgtgtgcagcagcgcctacagcgacagctggcaggtggacgcctgtcccgagagttgttgtgaaccaccatgctgtgccacctcttgctgcgcccccgccccatgcctcacactggtgtgcactccagtgtcttgtgtgagctctccctgctgtcaggccgcctgtgaaccctctccctgtcagagtggctgtacatcctcatgtacgccttcctgctgtcaacagtcctcctgccagccggcgtgctgcacttcctccccttgccagcaggcctgttgcgttcctgtttgttgcaaaccagtatgctgcgtgcccgtctgctgtaagcccgtttgttgtaaaccgatttgttgcgtgcccgtgtgctctggagccagctcatcgtgctgccagcagagttctcgacagccggcgtgttgcactactagttgctgccgccccagcagctcggtttcacttctctgtcgccctgtgtgcaggtctacatgttgcgtgccaattcccagttgctgcgctccggcctctacctgtcagccctcctgctgcagacctgcttcctgcgtctctctcctgtgccggcccacatgcagccggctcagttccgcctgctgcggtctctccagcgggcagaaaagcagctgttag

SEQ ID NO: 24814 - DNA, 768 bp, synthetic construct
  source 1..768: mol_type = other DNA; note = Synthetic coding sequence
atggccgccagcaccatgagcatctgcagcagcgcctgcaccaacagctggcaagtcgatgactgccctgaaagctgttgcgaactgccatgcggaactccttcatgctgtgcccctgcgccatgcctaactctcgtgtgtacacccgttagctgtgtctcttccccatgctgccaggccgcttgcgagccttcagcatgccagagcggctgtacctctagctgtactccaagctgctgccaacagtctagctgccagcctgcctgctgtactagttctccctgtcagcaggcctgttgtgtgcccgtctgctgcaagccagtgtgttgtgtccccgtgtgctgtggggccagtagttgttgtcaacagtctagttgtcagcccgcatgctgcgcaagtagttcttgccagcagtcatgtcgagtcccggtgtgttgtaaggctgtgtgctgtgtccccacttgttccgagtccagctcatcttgttgccaacagtcctcatgtcagcccgcttgttgtacctcttccccgtgtcagcagagttgctgcgtttctgtgtgctgcaaaccggtatgctgcaagtcaatttgttgtgtgcccgtttgcagcggagcctcgtcaccgtgctgtcagcagagctcatgccagcctgcttgctgtacaagttcttgctgccgaccgagctcgtccgtgtctcttctctgtcgcccagtctgcagtagaccagccagttgttcatttagctccggccagaaatcaagctgctag

SEQ ID NO: 24815 - DNA, 312 bp, synthetic construct
  source 1..312: mol_type = other DNA; note = Synthetic coding sequence
atgtgcggcagctactaccggaactacaacggcggccacggctacggctgctgcggctacggtggccttggctgtgggtacggaggctgtggttatggctgttgtggttatggtgggctggggttcggatacgggggcttggattgcggatacggcggcctggggtgtggctatggctccttctgcggatgcggttacagaggcttagactgcggatacgggtgcggctacggttatgtctcccattcattctgcggttgtggctaccgctgcggttcagggtacggcagcagtttcgggtactattattag

SEQ ID NO: 24816 - DNA, 3117 bp, synthetic construct
  source 1..3117: mol_type = other DNA; note = Synthetic coding sequence
atggtgagcagcgcccagatgggcttcaacctgcaggccctgctggagcagctctcccaggacgagctgtcaaagtttaaatatctgataaccacttttagtctcgctcacgagctccagaagatcccacacaaagaggtcgataaggccgatggtaaacaattggtagaaatcttgacaacacactgcgacagctattgggttgaaatggcgtccctgcaggtgttcgagaagatgcacagaatggacctatccgagcgggccaaggacgaagtccgggaagccgcgctgaagagctttaataagcggaagcccctttcactggctttcacagaaactaaggggaatgttatttgcctcggaaaagaggtcttcaaaggaaaaaagcctgacaaagacaatcggtgtcgctacatcctgaagaccaagttccgcgagatgtggaagtcctggcctggggattcaaaagaggtccaggtaatggcagaacgctataagatgctgattccattcagcaatccaagagtccttcccggccctttctcttacaccgttgtgctgtatgggcctgccgggctcggcaagacaacgttggcacaaaagcttatgctagactgggctgaagacaacctgatacacaaatttaagtacgcattttatttatcctgcagagagctgtctagactcggtccttgcagcttcgctgagctcgtgtttcgcgactggcccgagctgcaggacgatatcccccatatcctggcccaggcccgtaaaatcctctttgtaattgatggattcgacgaattgggggccgctcccggggccctgattgaggacatatgtggcgattgggagaagaagaagccagttcccgtgttattaggttccctcctgaacagagtgatgctccctaaggccgcactgttggtgaccacccgtccacgtgctctgcgggatttacgcatcctggcggaagaacctatatatatacgagtggagggattcttagaagaggacaggcgagcatacttcctccgccactttggtgacgaggaccaggctatgagggctttcgagcttatgaggtccaacgctgccctttttcaactgggcagtgcacctgctgtttgctggatagtgtgcaccacgctcaagctgcagatggagaaaggtgaggatcccgtgccaacttgtctaacacgcacagggctgttccttcggttcctgtgtagtaggtttccgcagggtgcccagctccggggagcactgaggacgttgagcctactggcagcgcagggtctgtgggcacagacgtcggtgctccatcgtgaggacctcgaacgactgggcgtgcaggaatctgatcttagactctttctcgacggcgacatcctgcgacaggaccgggtgtctaaggggtgttactcattcattcatctttcttttcagcagttcttgacagccctgttctatactttggagaaagaagaagaagaagatagggacggacatacttgggacattggcgacgtacagaaacttctgtccggggtggagcggttgcggaaccccgatttaattcaagcagggtactattctttcgggcttgctaatgaaaagcgagccaaggaactcgaggctacatttggctgcaggatgtcacctgatataaagcaggaattattgcggtgcgacatctcatgtaagggcggccacagcacagtaacagatcttcaggagttactggggtgcctgtacgaatcacaggaggaggagctggtcaaggaagtcatggcacagttcaaagagatcagcctacatcttaatgccgtggacgttgtgccgagctccttttgtgtgaagcattgccgcaaccttcagaagatgagcctccaagtgattaaagaaaacctgcccgaaaacgtcactgcctctgaaagtgatgccgaagtggagagaagtcaggacgaccagcatatgcttccattctggacagacttgtgctccatcttcggatcaaacaaggacttgatgggcctagccattaatgactcatttctgtccgcgtccctggtccggatcctgtgtgagcagatcgctagcgacacatgtcacctgcagagggtggtattcaaaaacatttcaccggccgacgcgcatcggaatctatgcttggctttgcgtgggcacaaaactgtcacctatctgacacttcaaggaaatgatcaggatgacatgttccccgcactatgcgaagtcctaaggcacccagagtgtaatctgcgatatctgggtctggtgtcttgtagtgctacaacccagcagtgggcggatttaagcctggcactcgaagttaatcagtctcttacgtgcgtgaatctctcagacaatgaactcctggacgagggggccaagctgctctataccaccctgagacatcccaagtgctttttgcagaggctgagtcttgagaactgccatctgacggaagcaaattgcaaagatttagccgctgtgctggtggtgagtcgcgaactcacacacttgtgcctagccaagaatccaatcgggaatacaggtgtgaagttcctgtgcgaaggcctgcgataccccgagtgcaagttgcagaccctcgtgctttggaattgtgatatcacaagtgacggttgctgcgacctgacgaaattgctccaagaaaaaagctctttactgtgtttggaccttggattgaaccacataggagtcaaaggtatgaagtttttatgcgaggctttgaggaaaccactctgcaatctgaggtgcttgtggctgtggggatgctccattccaccatttagttgtgaggatttatgttccgccctcagctgcaatcagagtcttgtaacactggatttgggacagaaccccctgggtagcagcggtgtgaagatgctgttcgagacgctcacctgctccagtgggacattgaggaccctgcggctgaagatcgatgattttaacgatgagctaaataagctgcttgaggagatcgaagaaaagaaccctcagcttatcatcgacactgagaagcatcatccctgggctgaacgtcccagtagccacgatttcatgatctag

SEQ ID NO: 24817 - DNA, 762 bp, synthetic construct
  source 1..762: mol_type = other DNA; note = Synthetic coding sequence
atggagctggagcagcgggagggcaccatggccgccgtgggcttcgaggagttttccgcaccgccaggatcagagctggccctgcctccactgttcgggggccatatccttgaaagcgagctggagacggaggttgagtttgtgagtgggggcctcggaggttccggcctccgggaacgcgatgaagaagaggaggctgctcgaggacgccgaagaaggcagcgtgagctgaacaggcgcaaataccaggctcttggacgccggtgtagagaaattgagcaggtcaacgagcgagtgctgaatcgtctgcaccaggttcagaggattacacgtagactgcagcaggaacgcagattccttatgcgggttctcgatagctacggcgatgattacagagcctctcagtttaccattgtgctggaagatgaggggtcccagggaaccgacgccccaactcctggtaatgccgagaacgagccccctgagaaggagacactttcacccccacggaggacacctgcgcctccagagccaggcagcccggcacctggcgagggtccctcaggtaggaagaggcgccgcgttcccagggacggacggcgggcagggaacgccctcaccccagagttggcacccgtgcagataaaagtagaggaagactttggtttcgaagcagacgaggctttggatagctcatgggtctctcggggtccagataagctattgccgtatcccacacttgcttcaccggcttcagactag

SEQ ID NO: 24818 - DNA, 2679 bp, synthetic construct
  source 1..2679: mol_type = other DNA; note = Synthetic coding sequence
atgctgcggaccgccggccgggacggcctgtgccggctgagcacctatctggaggaattagaagccgttgagttgaagaagttcaagctgtatttaggtacagctacagagctgggcgaaggcaagatcccatggggttctatggagaaggcaggccctttagagatggcccagttactcataacacattttggacccgaggaggcttggcggttggccctatctaccttcgaacggatcaacagaaaggatttatgggagagggggcagagggaagatttagttagggatacgccgccaggtggcccatcctccctagggaaccagtccacatgcttgctcgaagtgtcactggtaaccccacgcaaggatccccaggagacctaccgagactatgtgaggcgaaagttccgactgatggaagacagaaatgctcgattgggggaatgtgtcaacctatctcaccgctatacccgactgctcttggtcaaagaacacagcaaccccatgcaagtccagcaacagcttctagacaccggacgcggccacgctagaaccgtggggcatcaggcatcacctattaaaattgaaactttattcgaacccgatgaggagcgaccagaaccaccaaggacggtagtgatgcaaggcgcagctggaatagggaaaagtatgctggcacacaaagtcatgcttgattgggccgacggaaagcttttccaaggccggttcgattatctattctacattaattgtcgcgagatgaatcagagcgcaacagagtgcagcatgcaggacctgatcttcagctgctggcccgaaccttccgcaccgcttcaggagcttatacgggtgccagagcggctactctttatcattgacggatttgacgagcttaaaccctctttccacgatccacaggggccttggtgtctttgctgggaggagaaacgaccaacagagctgctgctgaattccttgatcagaaagaaattgttacctgagcttagtctgcttatcacaactcggccaacagcacttgaaaagctccacagacttctggaacatccacggcacgtggagatactcggcttctcagaggccgagcgaaaggagtacttttacaagtactttcacaacgctgagcaggctggacaggtcttcaactacgtgcgtgataacgaacccctcttcaccatgtgtttcgtgccactcgtatgctgggttgtttgtacttgcttgcagcaacagctggaaggcggcggattgcttagacagaccagccgcacgacgacggctgtttacatgttgtacctactgagcctgatgcaacccaaacccggcgctcctcggctgcagccaccccccaatcaacggggcctgtgctccctggccgccgacggactctggaatcagaagattctctttgaggaacaggatctgaggaagcacggcctagatggagaggatgtgagcgctttcttaaatatgaatattttccagaaagatattaattgtgagaggtactactccttcatacatctcagcttccaggaattcttcgccgctatgtattatatattagacgaaggagaggggggtgctgggcccgaccaagatgtgaccaggcttttgaccgagtacgctttttccgagcgatcattcttggccctgacatcccgcttcttgttcggattacttaatgaggagaccagaagtcatctggaaaagtccttgtgttggaaggtatccccccacatcaagatggatctcttacagtggatccagtccaaagctcagagcgacggatccactcttcagcaggggtcattggagttcttcagctgcctctacgagatacaggaggaggaatttatacaacaggctctctcccatttccaggtgattgtcgtgagtaacatcgcctctaagatggagcacatggttagttcgttttgccttaagcggtgcagatcagctcaggttttgcatctgtacggcgcaacctacagtgcggacggggaagacagagcgcgatgtagtgccggtgcacatactctgctcgttcagctgaggccagagaggaccgttttattggacgcctactctgaacatctggctgccgcactgtgcaccaacccaaatctgatagaattgagcttatatcgcaacgccctcgggtcccgcggcgtgaaacttctgtgccagggcctgcgccaccccaattgcaaacttcagaatctgcggctgaagaggtgccggatctcatcaagtgcgtgcgaggatctttccgcagcacttatcgccaacaagaacctcacccggatggacctgtcaggaaacggcgtagggttcccaggcatgatgctgctgtgtgagggcctgagacatccccagtgccggctgcagatgatccagttgcggaaatgtcaacttgagagtggcgcctgtcaagagatggcttctgtgctaggcaccaaccctcacctagtggagctggatttaacagggaatgccctggaagaccttggactgagactgttgtgtcagggacttcggcaccctgtatgtcggctgaggacactgtggtggctttttggtatggatctcaacaagatgacgcattcccgattggccgcactccgagttacgaaaccgtaccttgacattgggtgctag

SEQ ID NO: 24819 - DNA, 3189 bp, synthetic construct
  source 1..3189: mol_type = other DNA; note = Synthetic coding sequence
atgctgcggaccgccggccgggacggcctgtgccggctgagcacctacctggaggagctggaggccgttgagctgaagaagtttaagttgtacctgggcacggctacggagttaggcgaaggaaaaataccgtggggctcaatggaaaaggcaggcccgttagagatggcgcagctactgattacccactttggcccggaggaagcctggagactggcactcagtacattcgagcgcatcaaccggaaggacctatgggagcgcggtcagagagaagacctggtgcgcgatacccctcctggcggtccctccagcttggggaatcagagcacttgtctccttgaggtaagcctggttacacctcgtaaggatccccaggaaacgtatcgcgactatgtgaggcgcaaattccggctgatggaggatcggaatgctcgccttggcgagtgcgtcaatctcagccatagatatacgaggctgctgctggtgaaggagcactccaacccaatgcaggtgcagcaacagcttctggacaccggtcgaggccacgcacgcacagtggggcatcaggctagccccatcaaaattgagactctctttgaacctgacgaggagcgccccgaaccacctaggactgttgtgatgcagggtgcagccgggatcggaaagtccatgctcgcgcacaaggtgatgctcgactgggcagatggtaaactgttccagggccgattcgattatctgttctatatcaactgtagagagatgaaccagtccgcgacagaatgcagcatgcaggacctgattttcagttgttggccagaacccagtgcaccattgcaggaactgatccgcgtccctgaaagacttctgtttatcatagacggcttcgatgaactcaagcccagcttccacgaccctcagggaccatggtgcctttgctgggaagaaaagagaccaacggagcttcttctaaattccctcataaggaagaaactgctgcccgagctgtccctcttaataaccactcgaccaaccgctctggagaaactgcataggcttctagagcatcctaggcatgtcgaaatcctggggtttagtgaggccgaacgaaaggagtatttttataaatatttccataatgccgaacaagcgggacaggtgttcaattacgttcgcgataacgagcccctgttcacaatgtgcttcgtacccctcgtgtgttgggtggtctgcacttgccttcagcagcagctcgagggcggggggctgcttagacagacctccaggaccactaccgcagtttacatgctgtatctcctgtccctgatgcagcctaagcccggagctccacgcttgcagcctccgcccaatcaaagaggcctgtgtagtctagctgccgacggactttggaaccagaaaatactattcgaggaacaggacctgcggaaacacgggctcgacggtgaagacgtttccgcctttctaaatatgaacatttttcaaaaagacattaattgcgaacgctattacagttttattcatctgtcttttcaggagtttttcgccgcaatgtattacatactcgatgaaggtgaaggcggggcaggacctgaccaggacgttacgaggctcctcacagagtacgctttttccgagaggtctttcctcgccctgacaagcagattcttatttgggctgcttaacgaggagacgaggtctcatcttgagaagagcctgtgctggaaggtcagcccccatattaaaatggatcttctgcagtggattcaatctaaggctcagagcgatggctcaactctccagcagggcagtctcgagtttttttcttgtctgtacgagatccaggaggaggagtttattcagcaagccctgtctcactttcaggtaatagttgtctctaatatcgcaagcaagatggagcacatggtgtctagcttttgcctcaaaagatgtaggtccgcacaagtcctgcatctgtacggcgcaacatatagcgccgatggtgaagaccgagccagatgctccgccggcgcccatactttgctggtgcagctgagacccgagcggaccgtccttctcgacgcatatagcgaacacctggcagcggccctttgcaccaacccaaacttaattgaactgtctctttaccgaaatgcccttgggtcacgtggagtgaagctactatgccagggtctgaggcatcccaattgcaaactgcagaatctccgtctcaagcgttgcagaatctcatcctcagcctgtgaggatctcagcgccgccctcattgcaaataaaaatcttacccgaatggacttgtcaggaaacggcgtcgggttcccggggatgatgctgctctgcgaaggtttgaggcatcctcaatgccgcctccagatgattcaactccgtaagtgtcagctggagtccggggcttgtcaggaaatggctagtgtgctcgggaccaacccgcacctcgtggagcttgatctcaccggcaatgctcttgaggatctcggtctgcggttactgtgccagggcctgcgccaccctgtctgcaggctccgaaccctgtggttaaagatctgtcgcttgacagccgcggcctgcgatgagctggcttccaccttgagcgttaatcagagccttagagagttggatctgagcctgaatgaacttggcgacctgggagtgctattactctgcgaagggctcaggcatcccacctgcaagctgcagactctcaggctggggatctgccgtctgggaagtgccgcttgtgaaggactctctgttgtgctacaggctaatcacaacttaagggagctcgacctgagcttcaacgacctcggggattggggcctgtggcttttggcagaagggctgcagcatcctgcctgtaggctccagaagctgtggctcgatagctgtggattaactgccaaggcatgcgagaacttatacttcacgttgggcattaaccagacgctgaccgacttatatctcactaataacgccttgggtgacaccggcgtgcggctattatgtaagagactcagccaccctggctgtaagctgcgcgtgttgtggctctttggaatggatctcaataagatgactcacagccgcttggcggcattgagggtgacaaaaccttatctggacataggttgttag

SEQ ID NO: 24820 - DNA, 3015 bp, synthetic construct
  source 1..3015: mol_type = other DNA; note = Synthetic coding sequence
atgctgcggaccgccggccgggacggcctgtgccggctgagcacctacctggaggagctggaggctgtggaactgaagaaatttaaactctacctgggtacagccaccgagctgggcgagggcaagatcccttgggggtccatggaaaaggctgggcccttggaaatggcccagttactgatcacacactttggacccgaagaggcgtggagactcgctctgagtactttcgaacggatcaataggaaggacctatgggagagggggcagcgcgaagatctcgttagagatacgccccccggcggccccagtagcttaggtaatcagagtacgtgtctcctcgaggtttctctggtgactccaagaaaggatccacaagaaacctatagagattatgtgcgtcgtaagttccggctcatggaggataggaatgcccgtctgggggaatgcgttaatctgtcccaccgttatactagactcttgctcgtgaaggagcacagcaaccccatgcaggtacagcagcagcttctggacacaggcagagggcatgccaggactgtgggacaccaagcctcccccattaaaattgaaaccttatttgagcccgacgaggagagacccgaaccgcctcgaactgtagtcatgcagggagctgcaggcattgggaaaagcatgctggcccacaaggtcatgcttgactgggcagatgggaaattgtttcagggtcgtttcgattatctcttttatattaactgtagagagatgaatcaaagcgccactgaatgtagtatgcaggacttgatctttagctgttggccagagcccagcgcaccattgcaggagctgattcgcgtgccggagcggctcctctttattattgatgggtttgacgagcttaaaccttcgttccacgacccacagggcccctggtgtctatgttgggaagaaaaacggcctacagaactgctcctgaactccctcattcggaagaagctcttacctgaattgtccctgttgattaccactcggcctacggcattagaaaaacttcaccggcttctggaacatccaaggcatgtcgaaattctgggcttctccgaggctgagcggaaggaatatttttataagtactttcacaacgctgagcaagcaggccaggtgtttaattatgtgcgggacaatgagccccttttcaccatgtgcttcgtccctctcgtgtgctgggtagtctgcacgtgccttcagcagcaattggagggcggcggtctgttgcggcagacaagcaggaccaccacagcagtgtacatgctgtatttgctgtcactgatgcagcccaagcctggtgcgcccaggttgcagcccccaccaaaccagagggggctgtgctccctggccgctgacggactatggaaccaaaaaatcctgttcgaagagcaggatcttcggaaacatggcctggacggtgaagacgtgagcgcattcctaaacatgaacatctttcagaaagatattaattgcgaacggtactatagttttatccatctctcgttccaggagtttttcgcggccatgtactacattctggacgaaggcgaaggcggcgcagggccagaccaggatgttactaggctcctgacagaatacgccttctctgaacggagttttctagcgctcaccagcagattcctcttcggcctccttaacgaggagacacgatcccatctggagaagagtctctgctggaaagtgtccccacatatcaagatggacttactgcagtggatccagtctaaggctcagagcgacggatcgactttgcagcagggctctcttgagttctttagctgtctgtacgagattcaggaggaggagtttattcaacaggcgctttctcatttccaggtgatcgtggtctcgaacatcgcctcaaagatggagcacatggtatcatccttctgtctgaagcggtgccgatctgcgcaggtgctacacctgtatggggccacgtattcagccgacggagaggaccgcgcccgttgttccgcaggagctcacaccctactggtgcaactgccagaaagaaccgtgcttctcgatgcgtattctgagcatctagcggcagctttatgtactaacccgaacctcattgaactctccttgtaccggaatgccctgggatcgcggggagttaaacttctgtgccaggggttacgacatcctaattgcaaacttcaaaacctgcggttaaaacggtgcaggatctcgagcagcgcttgtgaggacttgtccgccgcactcatcgctaacaagaatctcacgcggatggacctgagcggtaacggggtcggcttccctggcatgatgctgctgtgtgaagggcttcgtcacccccagtgcagacttcagatgatccaactgcggaagtgccagctcgaatctggggcctgccaagagatggcctctgttctgggaaccaatccacacctagttgaactggacctgacagggaatgcattggaagacttaggtctgaggctgctctgccagggtctccgtcacccggtgtgtaggttacgcactctttggcttaagatctgtcggctgaccgcagctgcctgcgacgagttggccagcacccttagcgttaatcaatctctccgagagttggatctgtccctaaacgaactcggtgacctgggcgtgctgctgctgtgcgagggacttcgccatcccacctgtaaattgcaaactcttagactcgacagctgtggcctgacagctaaggcctgtgaaaatctttacttcactttaggtattaaccaaacattgacagatctctatcttactaataatgctcttggagacaccggcgtacgcttgctctgcaagcggcttagccatccaggttgtaagctccgagtgctgtggctgtttgggatggacctgaacaagatgacgcactcgagactggccgccctcagggtaacgaaaccctatttagatatcggatgttag

SEQ ID NO: 24821 - DNA, 327 bp, synthetic construct
  source 1..327: mol_type = other DNA; note = Synthetic coding sequence
atggccagcggccggcccgaggagctgtgggaggccgtggtgggcgcagcagagcgattccgcgcccgtacagggacagagttagtattactcacggctgcacctcctcctcctcctcggccagggccctgtgcatatgcagcacatggcagaggggctctcgcagaggccgctaggaggtgcctccatgatatcgctttggcccatcgggccgctactgcggccaggcctccagccccaccacctgcaccacaaccacccagtcctacaccatcacccccgcggccaactctagcgcgagaggacaacgaggaggatgaagactag

SEQ ID NO: 24822 - DNA, 771 bp, synthetic construct
  source 1..771: mol_type = other DNA; note = Synthetic coding sequence
atggccagcggccggcccgaggagctgtgggaggccgtggtgggcgccgcagagagattcagagccagaaccggaactgagcttgtgctcctgactgctgcgccacccccacctccccgacctggaccatgtgcttacgcagcgcatggccggggcgccctggccgaagccgccaggaggtgtctgcatgacatcgcactggcacacagggctgcgaccgcagcgcggcctcctgcacccccacccgcccctcagcctccttcacccaccccatctcccccgcggcctaccctggcccgggaagacaatgaagaggatgaagatgaacccaccgaaaccgagacgagtggtgaacagctcggcatttcagacaacggtgggctgttcgtgatggacgaggacgctaccctgcaggacctgcctcctttctgcgaatctgaccctgagtccactgatgacggctcccttagtgaagagacccccgctggccctcctacctgtagtgtcccaccagcatctgccctccccacacagcaatacgccaaaagcctgcccgtgtcagtgcccgtatgggggtttaaagagaaacgcacggaggcacgttcatcagacgaggagaacggtcctccaagtagtcccgacttggatcggatcgccgccagtatgcgtgcattggtgttgcgggaagcggaagatacacaggtcttcggagatctgccacgcccacgactcaacaccagcgatttccagaagctcaagcgcaagtactag

SEQ ID NO: 24823 - DNA, 771 bp, synthetic construct
  source 1..771: mol_type = other DNA; note = Synthetic coding sequence
atggccagcggccggcccgaggagctgtgggaggccgtggtgggcgctgcagaaaggttccgcgcaaggacagggacagaactcgtgctcctgacagcagcaccccccccaccaccgcgtcctggcccttgtgcctacgctgctcatggtcggggggctttggcggaggcagcccggagatgcctgcacgacatagcacttgcccatcgggccgctaccgccgcacgacctccggcgcctccccctgcaccacagccccccagccccactccctctccccccagacctacgctggcccgagaagacaatgaagaggatgaagacgaaccaacagaaactgagacgagcggcgagcagttaggaatctcagataacggcggcctgtttgttatggatgaggacgccactcttcaggacctcccaccattctgtgaatccgacccagaatcaaccgatgacggcagcctgagcgaggaaactcctgccggacctcccacctgtagtgtcccacctgcctcagctttaccgacacagcagtacgccaaaagtctgcctgtctctgtgcccgtctggggattcaaagaaaagcgaaccgaagctcgctcgtcagatgaagagaatggcccaccctcatcccccgatcttgatcgcatcgctgccagtatgcgggctctcgtcctgcgtgaggctgaggatacccaagtgttcggagatctgcctcgcccgcggcttaatacttcagattttcaaaaactcaaaagaaagtattag

SEQ ID NO: 24824 - DNA, 771 bp, synthetic construct
  source 1..771: mol_type = other DNA; note = Synthetic coding sequence
atggccagcggccggcccgaggagctgtgggaggccgtggtgggcgcggctgagagattcagggccagaacagggaccgagctagtgttacttactgcagctccacctcccccaccgcgcccgggaccttgcgcctacgctgcccatgggagaggcgccctggctgaagccgccaggagatgcctgcatgacatagccctggcacatcgtgccgccacagctgcacggcccccagctcccccacccgctccgcaaccgccctccccaacgcccagtccacccagacccacattggccagggaggacaacgaggaggacgaggatgagccaaccgagaccgagacaagcggagagcaactaggcatttccgataacggtgggctgtttgttatggatgaagacgccacccttcaagacttgcctcccttctgcgagtctgatcccgaatccacggacgatggatccctctccgaagaaacaccggcagggcctccaacctgcagcgtcccacccgcttccgctctccctacacagcagtacgctaagtctctgccagtaagtgtaccagtctggggtttcaaagagaaacgaactgaagcccggtcaagcgatgaagaaaatggtccgccatcttctccagatttggatcgcatcgccgcaagcatgagggccctcgtattgcgcgaggctgaggacacacaggtttttggcgacctgccgaggcctcgccttaacactagcgattttcaaaaattgaaaagaaaatattag

SEQ ID NO: 24825 - DNA, 771 bp, synthetic construct
  source 1..771: mol_type = other DNA; note = Synthetic coding sequence
atggccagcggccggcccgaggagctgtgggaggccgtggtgggcgctgcggagagattccgcgccagaactggaacagagctggtgcttttgacagctgcaccacccccccctccacggccagggccttgcgcttacgccgcgcatggcaggggtgcattggccgaagctgccaggagatgcttgcatgacatcgccctggcgcatcgtgccgccactgcggcgcggccccccgcaccacctcctgccccccaacctcctagcccaactcctagtccgcctagacccacattagcacgagaagacaatgaagaggacgaagacgagccaacggaaacagaaacctccggtgaacagttaggaatttctgataatgggggtctattcgtgatggacgaggacgcaaccttgcaggaccttccacccttctgtgagagcgatccagaatcaacggacgacggcagcctcagcgaagaaacccctgccggtccacccacatgttcagtcccaccggcttcggctttaccaacacagcagtatgcaaaaagcttgccagtttcggtccctgtgtggggcttcaaggagaagagaaccgaggccaggtccagtgatgaggagaatggcccccccagctccccagacttggataggatagcagcctcaatgcgggcgctcgtgttgcgcgaggcagaggatactcaagtgtttggcgatttgccacgtccacggcttaatacatcagacttccagaagttgaaacgaaagtactag

SEQ ID NO: 24826 - DNA, 831 bp, synthetic construct
  source 1..831: mol_type = other DNA; note = Synthetic coding sequence
atgagcttcgagggcggcgacggcgccggccccgccatgctggccactggcactgctcgaatggcaagcggtcggcctgaggagctttgggaagccgtcgtgggagctgccgagaggttccgagcaaggactggcaccgaactggtactgctcacggctgcaccgcctccccctccccgtccagggccttgcgcctatgcagcccatgggcggggggctctggccgaagcagctagaaggtgtttacacgatatagcattggcacatcgagctgctacagctgcccgcccccccgccccccccccagcaccgcaaccgccctctccaacgccctcaccaccccgcccaacactggcccgggaagacaacgaggaagacgaagatgaacctaccgagacagaaactagcggcgagcaactcggaatcagcgataatggtgggctgtttgtcatggacgaggatgcaaccctgcaggatcttccacccttttgcgagagcgacccggagagtaccgatgacggttctctgtcagaggagacgccagccggtcccccaacttgcagcgtacctcctgcttcagccctgcccactcaacagtatgccaagtctctgccagtctccgtgcctgtctggggattcaaagagaagcggacagaagctcgctcttccgatgaggagaatggccctccctccagtcctgacctcgataggatcgctgcatctatgcgggccctggtcctccgcgaggcggaggacacccaggtcttcggtgatctgcctagaccccggctgaacacgagtgattttcagaagctcaagagaaagtattag

SEQ ID NO: 24827 - DNA, 906 bp, synthetic construct
  source 1..906: mol_type = other DNA; note = Synthetic coding sequence
atgacccggcacggcaagaactgcaccgccggcgccgtgtacacctaccatgagaagaagaaagacactgccgccagtggctatggaactcagaatatccgccttagtcgcgatgcagtgaaagatttcgactgctgctgtctttcactacaaccatgtcatgatcctgtggtgacaccagacggctacctgtacgaaagggaagctatcctagaatacatcctacaccagaagaaagagattgccagacagatgaaggcctatgagaagcagagagggacacgccgggaggagcagaaagagctacaaagagcagcaagtcaggatcatgtgagaggctttctggagaaggagtctgccattgtgtccagacccctcaatccctttactgcgaaggcactgtccggcacatctccagacgatgttcagcctggcccaagtgtaggaccaccttctaaggacaaggacaaggtccttccatctttctggatcccctctctgacaccggaagccaaggcaacaaagctggaaaaaccctccagaacagttacgtgccctatgtcaggcaagccactgcgcatgtccgatctgacgccagtgcatttcacccccctagacagctcagtggatcgagtgggcctaataacaagaagtgagcgctatgtttgtgccgtgactcgcgattctttatctaatgcgactccttgcgcagtactgaggcctagcggtgctgtggtcacccttgagtgcgtggagaaattgatcagaaaggacatggttgatccagtgactggtgacaaattgacagatcgggacatcatagttcttcagcgaggcggaaccgggttcgctgggagcggggtcaagctgcaggccgagaagtctcgaccagtcatgcaagcctag

SEQ ID NO: 24828 - DNA, 612 bp, synthetic construct
  source 1..612: mol_type = other DNA; note = Synthetic coding sequence
atggccgaggtgcaggtgctggtgctggacggccggggccacctgctggggaggttggcagccatcgttgctaaacaggtattactgggtcggaaggtggtcgtcgtcaggtgcgagggcatcaatatcagcggcaatttttatagaaataaactgaagtatctcgccttcttaaggaaaaggatgaacacaaaccccagtcgtggcccctatcattttcgggccccatctagaatattttggaggacagtaaggggcatgttgcctcacaaaactaagcgcgggcaggccgctttggatagactgaaggtgttcgatgggatccccccaccatatgacaagaaaaaacgcatggtggtccctgctgccctaaaagttgtccgactgaaacccacacgaaagttcgcctacttgggccgtctggcgcatgaagtagggtggaaatatcaagccgttactgctacactggaggaaaaacgtaaagaaaaggcgaaaatacactataggaagaagaagcaattaatgcgcttgcggaagcaagccgaaaagaacgtagagaagaagattgacaagtatactgaggttctgaaaacccatggtttgctggtgtag

SEQ ID NO: 24829 - DNA, 690 bp, synthetic construct
  source 1..690: mol_type = other DNA; note = Synthetic coding sequence
atgacctgctgcagccaggtgcccccccggcggcggcccagcctggcactgtcgccacggcttgactgtaacggtctcaacggcgtgcccggctctatttgggactttgtatcgggaagcttcagtccaagtccctcgcctattctgtcagccggccctccgagtagttctagcgccagccccaacggcgcggagcttgctagagttcggcgccaactggatgaggccaagagaaaaataaggcaatgggaggaaagctggcagcaggtgaagcaggtatgcgacgcgtggcagcgagaggctcaggaagcaaaggagcgggctagagtggccgattctgaccgccagctggcgctgcagaaaaaagaagaggtagaagcccaagtgaagcaactccaggaagaactggaggggctcggcgtggcaagtacgctgcctggcctgaggggctgcggcgacattggaactatccctctacctaaactgcattcactgcaaagccagttacgactcgacctggaggccgttgacggggtgatttttcagctgagagccaaacagtgcgtggcctgcagggagcgagcacatggcgctgtccttcgcccctgccagcaccacatcctctgtgaaccctgcgccgccacagcacctgagtgcccatactgtaaggggcaacctctgcagtggtag

SEQ ID NO: 24830 - DNA, 2283 bp, synthetic construct
  source 1..2283: mol_type = other DNA; note = Synthetic coding sequence
atgatggaggagcgggccgccgccgccgtggccgccgccgccagctcatgtcggccgctcggcagtggagccggacctggtccaaccggagccgcccccgtgagtgccccagcaccgggccctggcccggctggcaaaggaggcggcggaggaggctcccccggcccgactgccggcccagagccactatctctgcccggcattctgcatttcatccaacatgaatgggctaggttcgaggcggaaaaggcgaggtgggaagccgaaagggcagagctccaggcccaagtagctttcctccagggggagcgcaaagggcaggagaacctgaagacggatctcgtacgtcgcattaaaatgctggaatacgcattgaagcaggaaagagcgaagtatcataaactgaagttcggtacagacctcaatcaaggggaaaagaaagcagacgtaagtgagcaagtgtctaacggaccagtggaaagtgtaacactggaaaacagccctttagtgtggaaggagggaaggcagttactgaggcagtacctcgaggaggtcggatacacagacacaattctggacatgcggtcaaagagggtgcgcagtttgctgggacgatcactggagctgaatggggcagtcgaaccctctgaaggagcaccccgggcaccacctggacccgccggtttgtctggtggcgagtctttgttagtaaaacagatcgaggaacagatcaaacgcaacgctgcaggtaaagatggcaaggagcgcctcgggggatcagtcctgggtcagatcccttttctccaaaattgtgaggacgaagactccgacgaggacgacgaacttgatagtgtccagcacaagaagcagcgggtgaagctaccctctaaggccttagttccggagatggaggatgaggacgaagaggatgactccgaggacgccatcaacgagttcgactttctgggcagcggtgaggatggagagggggccccggatccgaggagatgtaccgttgacggttctcctcatgagctggaaagcagacgggtgaaattacagggaattctggccgacctgcgggatgtggatggactgccaccgaaggttacaggacctccaccaggcacccctcagcccaggccccatgaagggagcttcggcttctcttcagatgtgttcattatggatactattggcggaggcgaggtgtcccttggtgaccttgctgatctaactgtgactaacgataacgacctgtcctgcgatctgtctgacagtaaagacgccttcaagaaaacttggaatcccaagtttactctgcggtcgcattatgacgggattcgctctctggcatttcatcactctcagtcggcccttctgaccgcgagtgaggatggcacactcaaactgtggaatctccagaaggctgtgacagctaaaaaaaacgcagccctcgatgtggagccaatccacgctttcagggcccaccgaggacctgtcctggcagtggccatgggttctaattctgaatactgctactctggcggggccgacgcttgtattcactcttggaagataccagacctgagcatggatccgtacgacggatacgaccccagcgtcctgagtcatgtgttggagggtcacggcgatgcagtgtggggtctggctttctcacctacctcgcagaggctggcctcctgctccgccgacggaaccgtgagaatctgggacccatcttcttcttcaccagcctgcttgtgtacgttccctactgccagtgagcacggcgtacctacttccgttgcgtttacttccaccgaacctgcacatatcgtcgccagtttccggtcgggtgacacggtgctgtacgatatggaagtgggatccgcgctgctcaccttggagtcacgggggagttcaggccccactcagattaatcaggtcgtgtcccaccccaatcagcctttgacaatcaccgcacacgacgatcgcggcatcagattcctggacaacagaactggcaagcccgtgcatagcatggtggcacacctcgacgccgtgacctgcttagcagtagatccaaatggggcctttcttatgtccggcagccatgactgcagccttcgtttatggagtctcgacaacaaaacatgcgtccaggagatcactgcacaccgcaaaaagcacgaagaggccatccacgctgttgcatgtcatccgtctaaagcactcatcgcatccgccggcgccgatgcactcgccaaagtattcgtgtag

SEQ ID NO: 24831 - DNA, 327 bp, synthetic construct
  source 1..327: mol_type = other DNA; note = Synthetic coding sequence
atgacccccgaggagctgcagaagcgggaggaggaggagttcaacacggggcctctgtccgtgttgacacagtctgtgaagaacaatacacaggtgttgatcaattgccgcaataataagaaactgctcggacgcgtgaaggctttcgatcgtcattgtaatatggttctggaaaacgtgaaggagatgtggaccgaagtgccgaagtcagggaagggaaagaagaaatccaagccggtgaataaagaccgatacatctccaagatgttcctgagaggggatagcgtgattgtggtccttcgcaatcccctgattgcagggaaatag

SEQ ID NO: 24832 - DNA, 1275 bp, synthetic construct
  source 1..1275: mol_type = other DNA; note = Synthetic coding sequence
atggtgcagaccctgtactacagcgccgaccacaagctgctggacggcaaccttctggatggtcaagctgaagttttcgggagcgacgatgatcatattcaatttgtgcagaagaagcccccgcgcgaaaatggtcacaagcagatttcttcaagcagcacagggtgcttgtcatcgcccaacgctactgtacagagtcccaagcacgaatggaagatagttgcctcagaaaaaactagtaacaacacctacctctgcctggcggtgcttgatgggatcttttgtgtgatattcttgcacggacggaactctccccaaagctccccgaccagtaccccaaagctgtccaagtctttgtcctttgagatgcaacaggacgaattgattgagaagcccatgtcacctatgcaatatgctcggagtggattaggaaccgccgagatgaatggaaagctaatcgccgctggcggctataacagggaagagtgtctgaggactgtggaatgttataacccccatacagaccattggagctttttggctccaatgagaaccccaagagctcgcttccagatggccgtgctgatgggccagctttatgtggtgggcggcagtaacggccactcggacgacctaagctgtggcgagatgtacgactcgaacatagacgactggatacctgtcccagaattgcgcactaataggtgtaatgccggtgtgtgtgccctaaacgggaagttatatatcgtcggaggctcggatccttacgggcaaaagggcctcaagaactgtgacgtgttcgacccagtaacgaagctgtggacatcctgtgctcctttaaatatccgtcgccatcagagcgccgtttgtgagctgggaggctatctttatatcataggtggggccgaatcttggaactgcctgaacaccgtagagcgatataatcctgagaacaatacctggaccttaatcgccccaatgaatgtggccaggcggggcgcaggggtggcggtgctcaatggaaagctatttgtgtgtggtgggtttgacggttcgcatgctatcagctgcgtggagatgtacgaccctacgcgcaatgaatggaaaatgatgggcaatatgacgtcaccaagatcaaacgccggcatcgcgaccgtgggaaacactatctatgctgttggcggctttgacgggaacgaattcctcaacacagtggaagtctacaatctggagtctaatgagtggtctccctacacaaaaatattccaattctag

SEQ ID NO: 24833 - DNA, 483 bp, synthetic construct
  source 1..483: mol_type = other DNA; note = Synthetic coding sequence
atgaacaacgcccggtacctgtggaagcggatcccccccgccatcaagagtgcaaattccgagctcggtggcatttggagcgtcggccagcgcatttggcagcgggatttccctggcatctacacaactattaatgcacatcaatggtccgagaccgtgcaacctattatggaggctctgagagacgcaactcgcagacgggctttcgctctagtctcacaggcgtacacttcaattatcgccgacgacttcgccgcctttgtagggttacccgtggaggaagcggttaaaggaatcctcgagcaggggtggcaagcggacagcactacgcgtatggtgttgccacgcaaaccagtggccggagcactggatgtctcctttaacaaatttattccacttagtgaaccagcacccgtgccgcccatccccaatgaacagcaattagcgaggctcaccgattacgtggcttttctggaaaattag

SEQ ID NO: 24834 - DNA, 927 bp, synthetic construct
  source 1..927: mol_type = other DNA; note = Synthetic coding sequence
atgatggaggagatcagcatcatggtggcctacgacgcccacgtgttctcccaattgcacgacgaagatttcttgacctcactggtggcgatctccaagccgcgcagcatggtccctacgaagaaacttaagaaatatgaaaaggagtatcagacaatgcgagaatctcagttgcaacaggaggatcccatggatagatataagagagagaacagacgcctgcaagaagctagcatgcgcctggaacaggagaacgacgacttagcccacgaacttgtgacttctaaaatagctctaagaaatgaccttgaccaggcagaggacaaagctgatgttctgaacaaagagctgctcctcaccaagcagcgcctagtggagaccgaggaggagaagaggaagcaggaagaagagaccgcccaactcaaagaggtgtttcgcaaacaattggagaaagctgagtatgagattaagaaaactactgccataatcgcagagtataaacaaatatgttcacagctgtccacgcgtttggaaaaacagcaagcagcctctaaagaggagctcgaggtggtgaaaggcaagatgatggcctgcaagcactgcagcgatatcttctcgaaagaaggcgcactcaagcttgcagcgactggtcgggaggaccagggaatcgagacagatgacgagaaagacagcctcaaaaagcagctgcgcgagatggagctggagctggctcagacaaagttgcagttggtggaagcgaagtgcaagatccaggaactggagcatcaaaggggcgccctgatgaatgaaatacaggccgccaagaattcctggttctccaaaacactgaatagcatcaagacggctacgggtacccaacccctgcagccagctcccgtgactcagccaccaaaggagtctacgtag

SEQ ID NO: 24835 - DNA, 3600 bp, synthetic construct
  source 1..3600: mol_type = other DNA; note = Synthetic coding sequence
atggccagcgccggcacccagcactacagcatcggcctgcggcagaaaaattccttcaaacagtccggcccctccgggaccgtacccgccaccccccctgaaaagccttcggaaggcagagtgtggccccaagctcaccagcaggtaaaacccatttggaagctggagaaaaaacaggtcgagaccctgagtgctgggctgggacccggtttgctcggtgtccctcctcagcccgcctacttcttttgcccaagtaccctgtgctccagcggcaccacagccgtcattgctgggcactcgagctcttgctatttacactcccttcccgatttgttcaattctaccctcctctatagacggtcctcctatcgacagaaaccatatcagcagctggagagtttttgtttgcgaagctcaccatccgagaaaagtcccttttctctcccccagaaaagcctacccgtctctcttactgctaacaaagccacatcctctatggtgttctcaatggctcagccaatggcctcctcttctactgaaccatacctgtgtctggctgccgccggagagaacccatcaggcaagtccctcgcctcggctataagcggcaagattcccagcccgctctcttctagctataagcctatgctcaataataattccttcatgtggcccaatagtacccctgtgcctctgctacagaccacccagggtctcaagcctgtctcccctcctaagattcagcccgtctcctggcaccactccggtgggactggcgactgtgctccgcagccagtggaccataaggttcctaagtctattggtacagttccagctgacgctagtgcacatatcgccctatccaccgcgagtagccatgacaccagcaccacttctgtggcaagttcctggtataaccgcaataacttagccatgcgggctgagcctctgtcttgcgccctggacgattcttccgactcacaagacccgacgaaagagattcgatttaccgaagctgtcaggaaactgactgcgagagggttcgagaagatgcctcgccaaggttgccagcttgaacaaagctccttcctcaaccccagttttcagtggaacgtgttaaataggtcacgccgctggaagccaccggccgtgaaccagcagtttcctcaggaggacgccggctccgtgcgcagggtgctgcccggagcgagtgatacgctcgggttagataataccgttttctgtactaagcggatctccatccatctgctcgccagccatgcctcaggccttaaccacaatccggcctgtgagagtgtaatagactcatctgcgttcggcgaggggaaggcacccgggcctcctttccctcagactttgggtattgccaatgtggcaacccgcctgtcttcgatacagctgggccagtccgaaaaagaacgcccagaagaggccagggaactggattcctcagaccgggatatctcatcagcgactgatttacaaccggatcaggcggagaccgaagacaccgaggaggagctagtcgacggactcgaggattgttgctctcgcgatgagaatgaggaagaggaaggcgattcagaatgcagctctctttcagccgtttcaccttccgaaagtgttgccatgatcagtcggtcgtgcatggaaattctgactaagccactgagtaaccatgagaaggtggtcagacctgctcttatctacagtctgtttcccaatgtcccgcccaccatttacttcggcactcgcgatgagagggtggagaaacttccgtgggaacaacgcaagctgctgaggtggaagatgtccacggttacgccaaacatcgtaaaacagacaatcgggaggtcccatttcaagattagtaaaagaaacgatgattggttaggatgttggggccatcacatgaagtcgccttcattccggtcaattcgcgaacatcagaaattgaatcattttccaggaagctttcagattggacgcaaggaccggctctggcgcaatctgagcagaatgcagtcgcggtttggaaaaaaagaattcagtttctttccccaatcctttattctcccgcaggatgccaagctgctaaggaaggcttgggagtcctcgagcaggcagaagtggatagtgaaacccccggcgagtgcacggggaataggcatccaggtgatccataaatggtctcagctccctaaacgtcggcctctgctagtgcaaaggtatttgcacaagccgtatctgatcagtgggtctaagttcgacctgagaatctacgtttacgtgacaagttatgatcccctgaggatttatctcttctccgatgggctggtgagatttgctagttgcaaatacagtccttccatgaaatccctgggcaataagttcatgcacttaacaaactattccgtaaacaagaagaatgccgaatatcaggccaacgctgacgagatggcttgccagggacacaagtgggcccttaaagctctttggaactaccttagccagaaaggcgtgaacagtgacgccatttgggaaaaaattaaggatgtggtggtgaaaactatcatctccagcgagccctacgtgacttctttattaaaaatgtatgtccgccgtccttatagttgccacgagctgtttggcttcgatataatgctggatgagaatctgaaaccatgggttctggaggtgaatattagtccatccctgcatagttctagtccactggatatttcaatcaagggacagatgattagagatctgttaaacctcgcaggctttgtccttccgaatgcagaggacattattagtagcccatcttcctgtagctcatcaacaacatccttgcccacctcccctggggataaatgtcgcatggctcccgaacacgtcactgcacagaagatgaagaaagcctactacctgactcaaaagattccagatcaggacttctatgcctctgtgctggacgtgctcaccccagacgatgtccgcatcttagtggaaatggaggatgagttctcccggaggggccaattcgagagaatcttcccctcccacatctcttctcggtacctgcgattcttcgagcagccccgttactttaacatcctgacgacacagtgggaacaaaagtaccacggcaacaaactcaagggagtggatctcctaagatcttggtgttacaaggggtttcacatgggagtggtgagcgatagtgcacccgtctggagtcttccaacatctctcctcaccatctccaaggatgatgtcatcctgaacgcatttagcaaaagtgaaacctcgaagctgggcaaacagtcttcttgcgaggtcagcttgctgctttccgaggacggaacaacacctaagagtaagaagacccaagccggattatctccctatccacagaagccatcatcttccaaagacagcgaagacacctcaaaggagcccagcctgagtacccagaccctcccggttattaagtgtagtggccagaccagcaggctttccgctagcagtacttttcagagcatctcagattccctgctggccgtttcgccatag

SEQ ID NO: 24836 - DNA, 2337 bp, synthetic construct
  source 1..2337: mol_type = other DNA; note = Synthetic coding sequence
cggatccaggagcagctggagagcagcttcaccggcctgaccgacgaaaaagtaaaggcctatctgtccctgcatccacaggtactggacgagttcgtgagtgaatccgtaagcgctgaaacagtcgagaagtggttgaagcggaaaaacaataaaagcgaggacgaaagtgcccccaaggaagtgtccaggtatcaggacacaaatatgcagggcgtggtgtatgagctgaactcatatatagagcagaggctcgatacagggggagacaatcagctgttgctttacgaactgtctagcattattaagatcgcgaccaaggctgatgggttcgccctgtacttcttgggggagtgcaataattccctgtgtatcttcacccccccaggtatcaaggagggaaagcccaggctgattcctgccggaccaatcacgcagggcacaactgtctcagcctatgtcgctaagagtaggaagactttattggtcgaagacattttaggcgatgagagatttccccgtggcaccgggctcgaatctggaacgagaatccagagcgtgctgtgcctccctattgttaccgctatcggcgatctgattggaatcctggagctgtaccggcactggggcaaagaggctttttgcttgagccatcaagaggtggctaccgcgaacctcgcgtgggcctctgtcgctatccatcaggtccaagtctgtcgcggactcgctaagcagacagaactcaacgacttcctgctcgatgtttctaagacctattttgacaatatcgttgccatagacagtttgctcgagcacattatgatttacgctaagaatttggtcaatgccgataggtgtgccctcttccaggtggaccataaaaacaaagaactgtattccgatctgtttgatattggcgaagaaaaagaaggcaagccagtgtttaaaaagacaaaggagatccggttttcgattgaaaaagggattgccggacaggtggcaagaactggagaagtgttaaatattcctgacgcctatgcagacccgcgattcaaccgtgaggtcgatttgtataccggttatacgacacgtaacattttgtgcatgccaatcgttagcagaggaagtgttattggagtggtacagatggtgaataagatctcagggagtgcattttcaaaaacagacgaaaataacttcaaaatgtttgcggtgttttgcgctcttgctcttcactgcgctaatatgtaccatcggatccggcatagcgagtgtatttaccgcgtgacgatggagaaactgtcataccactcaatttgcacatctgaggaatggcaggggctgatgcagtttactctgcccgtgcgactgtgcaaggagattgagctttttcattttgatattggcccctttgagaacatgtggcctggtatttttgtatacatggttcacagatcatgtggtacctcctgctttgaactggagaaactttgcagatttataatgtctgtgaaaaaaaattatagacgtgtaccctatcataattggaagcacgcagtcactgtcgcccattgcatgtacgccatactgcagaacaaccacactctgttcaccgatttggaaaggaaagggcttctcatcgcctgcctatgtcacgacctggaccatagggggttcagcaattcttacctgcaaaagttcgaccaccccttagctgctttgtactcgacatcgacgatggagcagcatcatttcagtcagactgtatctatccttcagctggaggggcacaacatttttagtacactcagcagcagcgagtatgagcaggtgctcgagatcatacgtaaggcgattattgccacagatctggccttgtattttgggaaccgtaaacagctagaagaaatgtatcaaacggggagtctgaacttgaacaatcagagccaccgggacagggtgattgggctcatgatgactgcttgtgatctctgtagtgttacaaagctgtggcctgtgactaagcttaccgcaaatgatatctatgctgagttctgggccgaaggtgatgaaatgaagaagctgggaattcagccgatccccatgatggatcgagacaaaaaggatgaagtcccgcagggccagcttgggttctacaatgctgtcgcaataccgtgctacacaacactgacacagattctaccacccaccgagccattgctaaaggcttgccgggacaacctgtcacagtgggagaaagtgatccgaggagaggagacggccacctggatcagctccccgagcgtggctcagaaagccgctgccagtgaggattag

SEQ ID NO: 24837 - DNA, 1281 bp, synthetic construct
  source 1..1281: mol_type = other DNA; note = Synthetic coding sequence
atgtggcccctgaccgccctgctgctgctggtgcccagcagcggccaggcggccactttggagaagccaattctaagcctacaccccccatggaccaccatctttaagggggagcgagtgaccctgaagtgtgacggctaccatcctcttttgttggagttacagcccatctccacactgtggtatttgggccatcttttattgccgtctcataagaagtcaatcgaggtgcaaacacctggcgtttacagatgccagacccgtggcgccccagtgtccgacccgatccatcttagtgtgtcaaacgattggctcatcctgcaggtcccctatgctcccgtattcgagggcgagcctctcgtgcttcggtgtagagggtggtacgataaagtggtctacaagctgcactattaccatgacgggcaggctgtgcggtacttccattcgagtgctaattacaccgttctacaggctcgtgcatctgattccggcagataccagtgtagtgggactatgcggatacccgtcgagtcagcccccatgttctccgctaaagtggctgtcaccgttcaggagctgtttagggccccagttctcagggtcatgggacctcgggaggcccgcggtgccgcattgggtggggtcgtgctcaggtgcgatacccggctccatccgcagaagcgggacaccccacttcaatttgccttctacaagtacagcagagccgtacgtcggttcgactggggcgccgagtacaccgtgccagaaccagaggtggaggagttagaatcatactggtgcgaggcggccaccgcaacacgaagtgtgagaaagagatctccatggctgcaattgcccggacccggaagccctctggaccctgcctccaccaccgcccccgccccatgggctgctgcgctggccccggggaaccgccctctgtcatttaggaagcctcctgtctcccggtctgtgccactggtgacctccgtaagaaataccacaagcaccggcttacaattcccggcaagcggtgcgccaacagcaggcccgcctgcgtgcgcgcccccaaccccacttgagcagtcggcaggtgctctgaagcctgacgtggacctgctgctccgagagatgcagctgctgaaagggctgctctcaagggttgtactggagctcaaagagccccaggcgttgagggaattaagaggcactccagagacaccaaccagccatttcgccgtcagcccaggaacacctgagacaacaccagttgagagctag

SEQ ID NO: 24838 - DNA, 1779 bp, synthetic construct
  source 1..1779: mol_type = other DNA; note = Synthetic coding sequence
atggacgtgatgctggagaactactgccacctgatcagcgtgggctgccatatgaccaaaccggacgtaatcctgaagttagaacgcggagaggaaccctggaccagcttcgcggggcacacctgtctcgaggaaaactggaaggccgaggacttcctcgtgaagttcaaagaacaccaggagaaatactcgaggtctgtcgtttccataaatcataagaagctggttaaggaaaaaagcaaaatctatgagaaaacttttaccctgggcaaaaatcccgtgaattctaaaaaccttcctccagaatacgatacacacgggcggatcttgaagaacgtaagtgagctgatcatctccaacttaaatcctgcccgcaaaagactttcagagtacaacggatatggcaagtccttgctatcaactaaacaagaaacaacacacccagaagtgaagagccacaatcagtccgctcgcgccttcagtcataatgaggtgctgatgcagtatcagaagacagagacgccggcgcaatcctttgggtacaacgactgcgagaagagctttcttcagagaggcggtctgatcactcacagccggccttataaaggagagaatccgagcgtgtacaataagaagaggcgagcaactaatatcgagaaaaagcacacctgcaacgagtgcgggaagtctttttgtcggaaatctgttttgattctccatcagggcattcatagtgaagaaaagccatatcagtgccatcagtgcggaaacgccttcaggcggaagtcttaccttatcgaccatcaacggacgcacactggtgagaagcctttcgtgtgcaatgagtgcgggaaaagctttcgcctgaagaccgcgctgactgatcatcagcgcacccacacaggagaaaagtcctatgagtgtttacagtgccgcaatgcattcagactgaagtcccacctcattcggcaccagaggactcataccggagagaaaccctacgaatgtaatgattgcggtaagagcttccgacagaagactacactgtccttacatcaaagaattcacaccggcgagaaaccgtacatctgcaaggaatgcgggaagtcattccaccagaaggcgaacctcaccgtgcatcagcggacacacactggtgagaagccttacatctgcaacgaatgcggcaagtctttttcccagaaaaccaccctcgctctgcacgaaaagactcacaatgaagagaagccatacatttgctcagaatgtggcaagagttttagacagaaaaccacccttgtggcacaccaacgtactcacacaggagagaaaagctacgaatgccctcactgcggtaaagcgtttcgcatgaagagctacctcattgaccaccatcggacacacaccggtgagaagccctacgagtgcaatgaatgtggcaaatccttcagccagaaaactaacttgaacttgcatcagcggattcatacaggcgaaaagccttacgtgtgcaatgagtgcggaaagagctttaggcagaaggctacactcactgtgcaccaaaaaatccacactggccagaagtcttatgaatgcccccagtgcgggaaagctttctcccggaagagctatctgatccatcatcaacgtacacatactggcgagaaaccatacaagtgctccgagtgcggaaagtgcttccgtcagaagaccaacttgattgtgcatcaacgtacgcacacaggaggcgaggatggcttgaccggctgcctgtcatag

SEQ ID NO: 24839 - DNA, 645 bp, synthetic construct
  source 1..645: mol_type = other DNA; note = Synthetic coding sequence
atggaggtgaccggcgtgagcgcccccaccgtgaccgtgttcatcagttctagcctaaacacatttaggtcagaaaaaaggtactctcggagcctgacgattgctgaatttaagtgtaagctggagctcctggtcggtagtcccgcatcttgtatggagctagagttatacggcgtggacgataagttctattctaaattggatcaggaggacgctcttctgggctcttatccagtggacgatggctgccgcattcacgtcattgaccattccggcgcacggttaggagagtatgaggacgtaagtcgagtcgaaaagtacacaatcagccaagaggcttatgaccagcgacaggacactgtcaggtccttcctcaaacgctccaagctcggcagatacaatgaagaagagcgagcccagcaggaggcagaagctgcccagaggctcgcagaagagaaggcccaggcctccagcatccctgtgggcagtcgttgcgaggtgagggccgccggacagagccctcgtcggggcactgtgatgtatgtcggcgcttggcttgcgggtcccgtgccaggctctcgcgccccacgtcctggtggcaacgtgggtggaacggtggagcctagacgccccagatcggcctag

SEQ ID NO: 24840 - DNA, 189 bp, synthetic construct
  source 1..189: mol_type = other DNA; note = Synthetic coding sequence
atgagcatccagtggaagacccggcagctgcagagcaagctgcacgaggccgatatcgtggttctcggcagtcctaagccagaagagatcccgcttacatggattcagcccggtaccactgtcctgaattgttcacacgacttcctgtctgaaagcctcattatcatccgacgcatggctatcttctag

SEQ ID NO: 24841 - DNA, 1269 bp, synthetic construct
  source 1..1269: mol_type = other DNA; note = Synthetic coding sequence
atgtaccccaaccccctgatctactgcacctgctgggacccctggaatctggggccaagaaagcttattaaaacaccgcaattgcctcgaaaaaattccactggctcttccaagctcacacccctggtgccagcacccaagaaccacaattaccttcagcctaccaaaccagtggtcagtcctaagatgaaaatccatagtgcaaggcaggaggagaccaataagagcttttatgaagtaatcaatgtaagccctggataccagctagttcgaaaccgcgagcagatatctgtgactttaggtgatgaaatgttcgatcggaagaagaggtgggaatctgaaattcctgacaaaggtaggttctcaagaaccaacatcatctctgacctggaagaacaaatctctgagctcacggctattattgagcaaatgaatagagaccaccaaagtgctcagaagcttctgtcgtctgagatggacctccgctgtgcagagatgaaacagaactttgaaaataagaaccgtgagcttaaggaagcacacgaagcagagctgtcagaactcgaaaacaattacaaagccgctctcaaagccgaaaagttggccgctcaggaaaagctggaggaaatgggtaaggagtataaatacctgaaaaacatgtttcggacataccaggatagcatctacgacgaaatggaagagaaatggtctaagcagaaagccaaatggaaaaaggatgagaaattcgagagggagaatatcctgctacagcagaaaaagaagatgactaaaaagttcgagatggaatccggtgaggaggataagaagatcaacgaatcttgttcggcggtgttcgaaaattttatccaggaaaaggaggagttgctgaaacaacaccagtcagatactctgcagttagaagagcttcgaaagactaaggaggttatgcaggaagaattgcatgcccaagctttaatcctggaaagcctcaacaccaatttgtactatacacagctagagttgcagaaagagaaggccattgtgggcaacttagagaaaatgctgcagacgaaatttgccgagactgaggaaaagtacaaacataccatacagattttgactgaggaaaacattcatctgaaacaaaagataattagcaaaaatgaggaaatttgtgagggatgttccggcaggctggcctcaattacagtttccaaagacgactctgataccgttcaggacggttcaaaaaagggccaggagagctag

SEQ ID NO: 24842 - DNA, 1380 bp, synthetic construct
  source 1..1380: mol_type = other DNA; note = Synthetic coding sequence
atggtgcccttcggccccttcgccttcatgcccggcaagctggtgcacacaaatgaggtcacagtcctgcttggcgataattggttcgcaaagtgttcggcaaagcaagccgtcggcctggtggagcaccggaaagagcacgtgaggaaaacaatagatgacttaaaaaaggtgatgaaaaattttgagagccgggtcgagtttacagaagatctgcaaaagatgtctgatgcagctggcgatattgttgatattagggaggaaataaagtgtgacttcgagttcaaggccaagcaccggattgcccataagccccattcaaagccaaagacttcagatattttcgaggctgatattgccaatgatgtcaagagcaaagatctgctcgctgacaaagaattgtgggcgaggctggaagaacttgaaaggcaggaagagttgctcggagaactggactcaaaacctgataccgttattgccaatggcgaggataccacaagctcagaagaggagaaagaggatagaaacaccaatgtcaatgccatgcatcaggtgaccgattcacacacaccctgtcataaggatgtcgcatcttctgagccattttcggggcaggttaactcacagctgaattgcagtgtcaacggatcttccagctatcattccgacgacgacgacgacgacgacgatgatgacgacgatgataatattgacgacgacgatggcgataacgatcatgaggcgctgggcgtcggcgataattctattcccaccatctatttctcccatacagtcgagccaaaaagggtccgaatcaacactggtaaaaacaccactctgaaattttcagaaaaaaaagaggaggcaaagcgcaagcggaaaaatagtactggctcaggtcattccgctcaggagttgcctaccatcagaactccagccgacatctacagggcctttgttgacgttgtgaatggagagtacgtgcctaggaaaagcatcctgaagagtaggagcagggaaaattccgtatgctccgatacatcggagagtagtgcagccgaatttgacgacagaagaggggtgctgaggagtatttcctgcgaagaggcgacctgcagcgatacatcagagagcatcctggaggaagagccccaggagaaccagaagaagcttttgccactctccgtcactccagaagcatttagcgggactgtgatcgagaaggagttcgtgtctccgagtcttacacctccccctgccatcgcacaccctgcattgccaacaattccggagagaaaggaggttctccttgaggcgagcgaggaaactgggaaacgcgtcagcaaattcaaggctgcgagactccagcagaaagattag

SEQ ID NO: 24843 - DNA, 1068 bp, synthetic construct
  source 1..1068: mol_type = other DNA; note = Synthetic coding sequence
atgcgggagatcgtgcacatccaggccggccagtgcggcaaccagattggggccaagttctgggaggtcataagtgatgaacacggaatcgatccgactgggtcttaccacggggattccgatctccagctgctgactcattccctgggaggaggcaccggcagcggaatgggtaccctgttaatctccaaaatccgggaggagtacccggaccggatcatgaatacgttctctgtgatgcctagtccaaaggtttcagatacggttgtggaaccttataacgccacactgtctgtccaccagctcgtggagaacacggacgaaacttactctatagacaatgaagccctatatgatatttgctttcggactctgaaacttaccacacccacatatggcgatctcaaccaccttgtttccgcgaccatgtctggagtgacaacttgtctgaggttccctggacagctgaatgccgatctcaggaagttggccgtgaacatggtcccttttccccgcctgcacttctttatgccaggattcgcgcctctgacttctcggggctcccagcagtatcgcgcactcaccgtgccagaactgacccagcagatgttcgatagtaagaacatgatggccgcctgtgatccgaggcatggtcgttatctgacagttgctgccatttttcgagggcgaatgtccatgaaagaagtggacgaacagatgcttaacgttcagaataaaaattcgagctattttgttgaatggattccgaacaacgtgaaaacagctgtgtgtgacatccctcccagaggtctcaaaatgagtgcaacctttatcggcaacagcactgccatacaggagctcttcaagcgtatctccgagcagtttactgcgatgttcaggcgcaaggcatttctgcactggtacacaggcgagggcatggatgaaatggaatttacggaagctgaatccaacatgaatgatttagtgtctgagtatcagcagtaccaggatgccaccgccgatgagcaaggtgagttcgaagaagaggaaggtgaggacgaagcctag

SEQ ID NO: 24844 - DNA, 255 bp, synthetic construct
  source 1..255: mol_type = other DNA; note = Synthetic coding sequence
atgaaggtgaagatcaagtgctggaacggcgtggccacctggctgtgggtggccaacgatgagaattgtggcatttgtcgaatggcgttcaatggctgctgtcctgactgcaaggtgccgggagatgattgccctctggtttggggacaatgcagtcattgcttccatatgcactgcattctcaagtggctccatgcacagcaggtccagcagcactgtccaatgtgcaggcaggagtggaaattcaaagaatag

SEQ ID NO: 24845 - DNA, 1416 bp, synthetic construct
  source 1..1416: mol_type = other DNA; note = Synthetic coding sequence
atgaagatgcaggtgttctgcaagagcatcgaggacatgaccgtgaaagctgagcagtcgcagcaagaagccgccaaaaagcacgaggaggaaaaaaaagagctcgagcgcaaattatcagacctggagaagaagatggaaacctctcacaaccagtgtcaagagctgaaggctagatacgaaagggccacgtccgagactaagaccaaacacgaggagatcttacagaacttgcaaaagaccttactggacaccgaggacaaactgaaaggtgcacgcgaagaaaactcaggcctgttgcaggaactcgaagagctgcgcaaacaagccgacaaagcaaaggcagcccagactgcagaggacgcgatgcagattatggagcagatgacaaaggagaaaaccgaaaccctggcctccttagaggataccaagcagacgaacgcaaagctgcagaacgagcttgacactttaaaggagaacaacctgaagaacgtggaggagctgaacaaatctaaagagctgctaaccgttgaaaaccagaagatggaagaattcaggaaggagattgagaccctgaagcaggcagcagcccagaaatcccagcagctgtccgccctccaggaagaaaatgtcaaactggccgaagagctgggccggtcccgggacgaagtgacctcacaccaaaagctcgaggaggagcgttctgtactgaacaaccagctgcttgaaatgaaaaaacgggaaagtaagtttatcaaagacgcagacgaggagaaggctagcctacagaagagtattagcattacaagtgctctgctgacggaaaaggatgcggagttagagaagctgcggaatgaagtgaccgtgcttcgcggagagaacgcctcagccaaatcattacatagcgtcgtccagacgctggaatcggacaaggtcaaacttgagttgaaggttaaaaatctggaactccagttaaaggagaacaaacgccagctgagctcttcgtccgggaacaccgacacgcaagccgacgaggacgagcgcgcacaagagtcccaggttatgatcgattttctaaactcagtgattgtagatctccagagaaaaaaccaggatcttaaaatgaaagtggagatgatgagcgaagctgcccttaacggaaatggcgatgatctgaacaattatgattccgatgatcaggagaagcagtccaaaaagaaaccgcgcctattctgtgacatctgcgattgcttcgatctacacgacacggaggattgtcctacacaggcccaaatgagcgaggaccccccacattctactcatcacggatcgcgaggtgaagagcggccatattgcgagatctgtgaaatgttcgggcactgggcgactaactgtaacgacgacgagactttctag

SEQ ID NO: 24846 - DNA, 1602 bp, synthetic construct
  source 1..1602: mol_type = other DNA; note = Synthetic coding sequence
atgagcagctgcgtgagcagccagcccagcagcaaccgggccgccccacaggatgagctgggaggacgcgggagttccagtagtgagtctcagaagccttgtgaggcgttaagaggcctcagtagcctgtccattcatttggggatggagagcttcatcgtggtcactgaatgcgaacccggctgcgctgttgacttggggctggcacgcgatcgtccgctggaggcggacggccaagaggtcccactcgataccagcggcagccaggccagaccccatctctccggcaggaagctctctctgcaagagcggtcgcagggcggcctggccgccggaggttcactggacatgaatggtaggtgtatctgccccagcttgccctattccccagtgtcgtccccacagagcagcccacggctgccgcggaggcctacagtggagtcgcaccatgtctctattacaggaatgcaggactgcgttcagttaaatcagtacacactgaaggatgaaattgggaagggatcgtatggcgtcgtgaaactggcctataacgagaacgacaatacatactatgccatgaaagtgctctctaaaaagaaactaattcgccaggccggctttccgaggagaccgccaccaagggggacccgtcctgcccctggcggctgtattcaaccgcggggccccatcgagcaggtgtaccaggaaatcgctattctcaagaagcttgaccatcccaacgtcgtgaaactcgtcgaggtactagatgatccaaacgaagatcatctttacatggttttcgaactcgtgaatcagggtcccgtcatggaggtgcctacactgaagccactttctgaagaccaggcccgattctactttcaagatttgattaaggggattgagtacctgcattatcagaagatcattcatcgagacatcaaaccctccaatctacttgtgggagaagatgggcacattaaaatagccgattttggtgtgagtaacgaatttaaagggtctgacgctttgctgtctaatacagttggcactcccgcatttatggcccctgaatctctgagcgagactcgcaaaatattttctgggaaggccctggatgtgtgggccatgggggttacgctctattgtttcgtctttgggcagtgcccatttatggatgaacggatcatgtgcctacattcaaagattaagagccaagctcttgagtttcccgaccagcccgacatcgccgaggacctgaaagacctgattacgagaatgctggacaagaaccccgaatcacgtatagtagttcctgagatcaagctgcacccatgggtgaccagacatggagccgaaccactgccgagcgaagatgaaaactgtacgctagtggaagtcaccgaagaagaggtggagaactccgttaaacatatcccctccttggccactgtaatccttgtgaagactatgattcggaagcggagcttcggaaatcccttcgaggggagccgaagagaggagagaagcctctctgccccaggtaatcttctgaccaagaaacccacccgtgagtgcgagagcttatccgagttaaagacatag

SEQ ID NO: 24847 - DNA, 1671 bp, synthetic construct
  source 1..1671: mol_type = other DNA; note = Synthetic coding sequence
atgagcagctgcgtgagcagccagcccagcagcaaccgggccgcccctcaagatgagctgggtgggcggggatcctcctcgagtgagagccagaaaccttgtgaggccctgaggggactgtcctccttgtctatacatttgggcatggagtcctttatagtggtgactgagtgcgaacccggatgcgccgtggatctgggcttagctagagataggccactcgaagccgatggccaggaggtgcccctcgataccagtggctctcaagcacggccccacctgtctggacggaaattgtcattacaggagcggtcccagggtggattggccgccggtggctcgttggacatgaatggccgctgtatctgcccatcactcccgtatagcccagtatcttccccccagagctccccacggctgcctcgccgaccaacagtggagtcccaccacgtgagcatcaccgggatgcaagactgcgttcagctcaatcaatacaccctgaaagatgaaatcggcaaagggtcttatggggtggtaaagctggcctacaacgagaacgataatacctattatgctatgaaggtgctgagtaagaagaaactgattaggcaggctggatttccccgcaggcccccaccgagggggactcgcccagcaccaggggggtgtatccagcccaggggtccaattgagcaggtgtatcaggagatcgcaatccttaaaaagctggatcatccaaatgtagttaaactggtagaggttctggatgatcctaacgaggatcacctgtatatggtcttcgagctggtgaatcagggccccgttatggaggttcctaccctgaagcccttatccgaagatcaggcccgcttctactttcaggacctgataaaaggtattgaatatctacactaccaaaaaattattcaccgcgacattaagcccagcaatcttctggtcggtgaggacggccacattaagatcgcagattttggtgtgtctaatgagttcaaaggttcagacgctctgttgtccaacacagtgggaacgccagcattcatggctccagaatcgctctccgagacccgcaaaatcttttccgggaaggccttggacgtgtgggccatgggtgtgactctctactgcttcgtattcgggcaatgccccttcatggatgaacgcatcatgtgcctccactccaaaattaaatctcaagcgctcgagttcccagatcagccggacatagctgaagatcttaaggacctaattacccgcatgttggataagaacccggaatcccgtatagtcgtaccggaaataaaactgcacccctgggttactcggcacggcgcagagccccttcccagcgaagatgaaaattgcacactggtcgaagttaccgaagaggaggttgagaattcagtgaagcacatcccctcgctagcaacagtgattctggtgaaaacgatgattcggaagagaagtttcggcaacccattcgagggcagtcggcgcgaggagaggtccctgagtgctcctgggaatctgttaacaaaaaagcccacacgggagtgtgaatccttatctgagctgaaggggaccaaaaagaagaaaggcctcgactccatgacttccaccgtcgctgccggctggctagacaggagagtgtag

SEQ ID NO: 24848 - DNA, 309 bp, synthetic construct
  source 1..309: mol_type = other DNA; note = Synthetic coding sequence
atgctgagcgaggaggagaaggaggagctgaaggccgagctggtgcaactggaagatgaaatcaccaccctcagacaggtgctgtctgccaaggagcggcatctcgtggagattaagcagaagttaggcatgaacctcatgaacgagctcaaacaaaactttagcaaatcgtggcacgatatgcaaacaacaacagcttacaaaaaaacccatgagacattgtcacatgctgggcagaaagccaccgctgccttttctaacgtcgggacagccatttctaaaaagttcggggacatgcggcgcaagtag

SEQ ID NO: 24849 - DNA, 615 bp, synthetic construct
  source 1..615: mol_type = other DNA; note = Synthetic coding sequence
atggaggccgagcccaagggcctgctggagaccgagcccctgcaggggaccgatgaggatgcagtagcatcagctgactttagctcaatgctgtcagaggaggaaaaggaagaacttaaggccgagctggtgcagttagaagacgagatcaccactctgcgccaggtactgtctgcaaaagagagacacctcgtagagattaagcagaaactgggcatgaaccttatgaatgaattaaagcagaacttcagcaagtcttggcacgacatgcagaccactaccgcgtacaagaaaacccacgagactctgtcccatgccggccaaaaagccacagcggcgttctctaacgtgggcaccgccatctcaaagaagttcggcgatatgtcctattccattcgccattctatcagcatgcctgccatgcgaaattcccctacatttaagtccttcgaagaacgtgtggagacaaccgtcacctctctgaagactaaagttggagggaccaatccaaatggggggtcctttgaggaggttctgtcgagcactgcacatgcaagcgcacagtctctagccggcggctctagacggaccaaggaagaggagctgcaatgttag

SEQ ID NO: 24850 - DNA, 369 bp, synthetic construct
  source 1..369: mol_type = other DNA; note = Synthetic coding sequence
tgatacctggtggccctgggctgcatcaagcccctgtgcgacctgttgacggtcatggattccaagattgtacaagtggccttgaatgggctcgagaatatccttcgcttgggcgaacaggagagtaaacagaatggtatagggattaacccatactgtgcgctgattgaagaggcgtatggacttgacaagattgagtttctgcagtcacatgagaatcaggagatttaccagaaggctttcgatctcatcgaacattattttggagtcgaagaagacgatccttccattgtcccccaggtggacgagaatcagcaacagtttatcttccagcagcaagaggcaccgatggacggattccagctgtag

SEQ ID NO: 24851 - DNA, 1137 bp, synthetic construct
  source 1..1137: mol_type = other DNA; note = Synthetic coding sequence
atggaggtgaagcccccccccggccggccccagcccgacagcggccggcgccgtcggcggagaggggaggaaggtcacgatccaaaggaacctgagcagttgagaaaactgttcataggtggcctctcgttcgaaacaacggacgactcgctgcgggagcactttgaaaaatgggggaccctcacagattgcgtggtgatgcgggatccccagacaaagcgcagcagaggcttcggattcgttacttatagctgtgtcgaggaagtggatgccgctatgtgcgcccgccctcacaaagtcgacggacgggtggtggagccaaagcgggcagtttcccgtgaagattccgtaaaacctggcgctcatcttactgtcaagaagatcttcgttggaggtatcaaggaggataccgaggagtacaacctgcgcgactacttcgagaagtacggaaaaatagaaaccatcgaggtcatggaggatcggcagagcggaaaaaagaggggcttcgctttcgtgactttcgacgatcatgacacagttgataagattgtcgtgcagaaatatcataccattaacggacataattgcgaggtcaagaaggccttgtcaaaacaggagatgcagtcagcaggctcccagagggggagaggaggaggatctgggaatttcatgggtagaggtggcaatttcggaggtggaggagggaattttgggaggggaggcaatttcgggggcagaggcggctatggtgggggaggggggggtagtagagggtcctacggagggggggacggggggtacaatggatttggcggagacggaggaaattacggcgggggccccgggtacagcagccgaggtggctatggcgggggaggacctggttatgggaatcaaggcggaggctatgggggaggcggtggatacgacgggtataacgaagggggtaattttgggggaggtaactatggtggtggaggcaattacaacgactttgggaactactcggggcagcaacagagcaattatggccccatgaaagggggcagcttcggaggcagaagcagtggatccccctacggcggggggtatgggtcaggcgggggatctggcggctacgggtcgagacggttctag

SEQ ID NO: 24852 - DNA, 3063 bp, synthetic construct
  source 1..3063: mol_type = other DNA; note = Synthetic coding sequence
atgcggcggttcctgcggcccggccacgaccccgtgcgggagcggctgaaaagagatcttttccagtttaataaaaccgtcgagcatggtttcccgcaccaaccaagtgccttggggtactcgccttcgctgcgcatactcgccatcggaacgcgctccggggccatcaagctgtatggagccccaggtgtagagtttatggggctccaccaggaaaataatgccgtgactcaaattcatctcttgccggggcagtgtcagctggtaacgctcttggatgacaactccctccacttatggagtctgaaggtgaaaggtggcgctagcgagctgcaagaggacgagtcttttactctgcgtggaccaccgggcgctgcccccagtgctacacagatcacagtggttcttccccatagtagttgtgagctcctctatctggggactgagtcaggtaacgtgttcgtagtccaactgcccgcattccgcgccctcgaagaccgcaccatctcgagcgatgccgtcctgcagcgccttcctgaggaagcaagacaccgccgtgtcttcgagatggtggaggcattgcaggagcatcctagggatccaaatcagatcctaattggatattctagaggcctggtggtgatctgggaccttcagggctcccgtgtcctctatcacttcctgagttcccaacaactcgagaatatctggtggcagagagacgggcgcttgctcgtgagctgtcactcagatggctcttactgtcagtggcctgtatcttccgaggctcagcagcccgaaccactccgatctctcgtgccatacggacctttcccctgcaaagccataacgcgcattctctggctgaccacaaggcaaggccttcctttcaccattttccagggaggcatgcctagggcatcctatggggatcgacattgtatctcagtgatccacgatggtcagcagactgctttcgacttcacatcacgagtgatagggttcaccgtactgactgaagctgacccggccgccacttttgatgatccctacgccttagtagtcctggccgaggaagaactggtggtcattgatcttcagacagcaggctggccacccgtgcagctgccctacctggcctccctccactgctctgccattacctgtagccatcatgtttcaaatattccgctgaagctttgggaacggattatagcagctggttcccgtcagaatgcccattttagcactatggaatggcccatcgacggtggaacctctctgacacctgctccgcctcagcgtgacctactgctcaccggccatgaggacgggaccgtgcggttttgggacgcaagtggcgtttgccttcggctgctctataagctatccacagtgcgcgtgtttctgacagatactgaccctaacgaaaattttagtgcccagggcgaagatgagtggcctccgctgcggaaagtcggtagctttgatccgtattccgatgacccaaggcttggaattcagaaaatttttctttgcaaatacagcggctatctggctgttgccggtactgcgggacaggttctcgtcctggaattgaatgatgaagctgccgaacaggcagtagaacaggtagaggctgacctgctgcaagaccaggaagggtacaggtggaaagggcacgagaggctggccgccaggtccggcccggtgcgatttgaacctggatttcagccattcgtcctagtgcagtgtcagcccccagccgtagttacatcactcgccctgcactctgagtggcggctagtggcctttggcacatctcatggttttgggctgtttgatcatcagcaaagaagacaggtgttcgttaagtgcacattgcatcctagcgaccagcttgccttggagggacctctcagtcgtgtgaaaagcctgaagaagtccttacgccagtcgttcagacgaatgagaagaagtcgcgtttcaagtcggaagcgacatccagccgggcctcccggagaggcacaagaaggatcagccaaagccgaacgtccaggactgcagaacatggagctggcacccgttcagcgtaagattgaagcccgcagtgcggaagatagtttcacagggtttgtacgaactctgtattttgccgatacctacttaaaggattctagtagacattgtccaagcctgtgggcgggcacaaacggagggacgatatatgccttctccttgagggtaccccctgcggaaagaaggatggacgaacctgttagggccgaacaggccaaagagatccagttgatgcatagagcacccgtggtgggtatcctagtgctcgatggccactcagtgccactgcctgaacctttggaagtcgcccacgatcttagcaagtcgccagacatgcagggaagtcaccagttgctggttgtgagtgaggaacagttcaaggtgttcacacttcccaaggttagcgccaaacttaagctgaaactgactgctctcgaggggagccgcgtacggcgagtcagcgtggcgcactttggcagtcgccgcgcagaagattacggcgaacaccacctcgccgtgctcaccaatcttggcgatattcaggtggtaagcttgcctttgctgaaaccccaagttcggtactcatgtattagaagagaagacgtgagtggaatagcctcctgtgtatttaccaagtatggacagggattctatctcattagcccttccgaattcgaacggtttagccttagtacgaagtggctcgtggagccccgctgccttgtggactctgcggagaccaagaatcacaggcccggtaatggcgccggccccaaaaaggcaccctcacgcgcgcgcaactctggcacccagtcagatggcgaggagaaacagcccggcctcgtgatggaacgagctcttctttccgatgaaagggtcctaaaagagattcaaagcaccttagaaggagacagagggtctggtaactggcgatctcaccgcgcagcagtgggttgctctctaagtaatggcggagccgaatag

SEQ ID NO: 24853 - DNA, 1458 bp, synthetic construct
  source 1..1458: mol_type = other DNA; note = Synthetic coding sequence
atggccgccgagctgtacgcccccgccagcgccgccgccgccgaccttgccaattcaaacgctggggcggccgtgggccgcaaagccgggccaaggagtcctccatctgccccagcacccgccccccctcctccagcccctgccccaccgaccctgggcaataaccaccaagaatctcctgggtggagatgctgtaggccaaccctccgcgagagaaacgctctcatgttcaacaacgaactgatggccgacgtgcacttcgtggttggaccgcccggcgccaccaggactgtgcccgcgcataaatatgtactggccgtcggtagcagcgtcttctacgccatgttctacggtgatctagccgaagtcaaatccgagatacacattcctgacgtggagcccgcagcgtttctgatactactgaagtatatgtattctgacgagattgatctggaagcggacaccgtcttagctactctgtatgctgccaaaaaatacatcgttccagccctcgccaaagcatgcgttaacttcctggagacttccctcgaggccaagaacgcatgcgtgttgcttagccagtctagactttttgaggagcctgagctgacgcagcgctgctgggaggtgattgatgcgcaggcagagatggcactgagaagcgagggtttctgcgagatagatcggcagacacttgagattatagtgacccgggaagccctaaatacaaaggaggccgtggtctttgaagcagtgctgaactgggcagaggcagaatgtaagaggcaaggtttacccatcacacccagaaataagaggcacgtgctggggagagcattgtatttggtacgcattcctactatgactctggaggaattcgctaatggcgctgcccagtccgatatcctcacgttagaagaaacccactcaatattcctgtggtataccgctacaaataagcctaggctggatttcccattgaccaagagaaagggtctggccccgcagcggtgtcatcgctttcagtctagcgcctaccggtccaaccaatggcgatatcgggggcggtgcgatagtattcagtttgcggttgaccggcgagtattcattgccggcctggggttatacggctctagctcagggaaagctgagtattccgtcaaaattgagctgaagcggctgggagtggtcctggctcagaacctaacaaagttcatgagtgacggaagcagtaataccttcccagtttggttcgaacaccccgtgcaggtggaacaggacactttctatacagccagcgcagtgctcgatggtagcgagctgtcatacttcgggcaggagggcatgacagaagttcaatgtggcaaagtggctttccaattccagtgctctagcgactctacgaacgggaccggggtccaaggaggccagatacctgaattaatcttttatgcttag

SEQ ID NO: 24854 - DNA, 2883 bp, synthetic construct
  source 1..2883: mol_type = other DNA; note = Synthetic coding sequence
atgagccggctgatcgtgaagaacctgcccaacggcatgaaggaggaacgctttcgacagttatttgctgccttcggaacccttactgactgcagccttaaatttactaaggatgggaaatttcgtaagtttgggtttatcggcttcaagtcggaagaagaggcccagaaggcccaaaagcattttaataaatcatttatagacacatctcggattaccgttgaattctgcaagagctttggagaccccgccaagccgcgagcatggtccaaacacgcccagaagcccagccagcccaagcaaccccccaaggactccacgacgcccgaaattaaaaaagacgaaaagaagaaaaaagtcgctggccagttggagaaactgaaggaggataccgagtttcaagaattcctgtcagtccaccagcgccgagcccaagcagctacatgggccaacgacggcctggacgctgaaccttctaaaggaaagagcaagcccgccagtgactatctgaatttcgactccgacagcggacaagagagcgaagaggaaggcgcaggcgaggatttagaagaggaggcgagtcttgagccaaaggccgcagtgcagaaagaactctctgacatggactatcttaagtccaaaatggtgaaggccggctccagttctagttccgaagaggaggagtcagaggacgaagccgtacactgcgatgagggcagcgaggccgaggaggaagatagcagcgctacacccgtgctgcaggagcgtgactctaagggggccggacaggagcagggaatgcccgcagggaagaaaagaccccccgaagctcgtgccgagacagaaaaacccgcgaatcagaaagaacctaccacttgtcataccgtgaagttgagaggcgctccatttaacgtcaccgagaaaaatgtgatggaattccttgcccctctgaagccagtggcaatcagaattgttcggaacgcccacggaaacaaaacaggctatatctttgtcgatttttccaatgaggaggaggtaaaacaggccctgaagtgcaaccgggaatacatgggaggtagatacatcgaggtgttccgcgagaaaaacgtccctacaaccaaaggcgcccccaagaataccacaaagtcttggcaaggccggatccttggagagaatgaggaagaggaggatttagcggaatcagggcgcttatttgtccgtaacctgccttacaccagcaccgaggaggatctggagaagctgttctcaaagtatggaccgctctcggaacttcactaccctatcgattcgttgaccaaaaagcctaaaggattcgctttcattacatttatgttccctgaacacgccgtcaaggcgtatagcgaggttgatggccaggtgtttcagggacgaatgctccatgtcctgccaagtacaatcaaaaaggaggcctccgaggacgcttccgccctcgggagttcgagctataaaaaaaaaaaggaggcacaagataaagcaaactctgcgtcttcccataattggaatactctgtttatgggtccaaacgctgtcgcggacgccatagctcagaaatacaacgctactaagagccaggttttcgaccacgagaccaaagggtccgttgccgttcgggtggccctaggcgaaacacagctggtgcaggaggtccgccgcttcttgattgataatggcgtatctctggacagcttttctcaagccgccgccgagaggagtaagacggtaatcctcgtgaagaacttgccagccgggactctggcggcccagttgcaagagaccttcgggcacttcggcagtctgggcagagtcctgctgcccgagggcggtataactgccatagtggagttcctggaaccgcttgaagctcgcaaggcctttcgtcacctggcctacagcaaatttcaccatgtgccactgtacctggaatgggctccagtgggtgtgttcagttccacagccccccagaaaaaaaagttacaggacaccccctctgaacccatggagaaagatccagccgaacctgagaccgtacccgacggggagacacccgaggatgagaatcccacagaggagggagcggataactccagtgcaaaaatggaggaggaagaagaggaagaggaagaggaggaagagtccctgcctggatgcacactgtttatcaaaaatctgaatttcgatacaaccgaggaaaagttgaaagaggtgtttagcaaagtgggcacagtgaaatcttgctcaattagtaagaagaagaataaagccggggtcctgctgtctatgggcttcggctttgttgagtaccgtaagcccgagcaggcccagaaagctttgaagcagcttcaggggcacgtggtggatggacacaagcttgaagttcgaatcagcgagcgagcaactaagccagccgttactctggctcggaagaagcaagttccaagaaagcagactaccagtaagattctggttcgaaacataccctttcaagcccacagtcgtgagatccgagaactgttctccaccttcggggagctcaaaacagtgaggttgcccaaaaagatgactggcaccggaacccatcgcggcttcggctttgtagattttctgactaagcaggatgccaaaagagcttttaatgccctgtgtcactctacccacctgtacggacgtaggctcgtgctggagtgggcagacagtgaggtcacactgcaggcactcaggagaaagaccgcagcccacttccacgaacctccaaagaaaaagcgatctgtggtgctagatgagattctggaacagctggaggggtccgattccgactccgaagagcagaccttgcaactctag

SEQ ID NO: 24855 - DNA, 669 bp, synthetic construct
  source 1..669: mol_type = other DNA; note = Synthetic coding sequence
atggagcggatcgagggcgccagcgtgggccggtgcgccgccagcccatacctgcgcccactgactctgcactatagacaaaatggggcccagaagagctgggatttcatgaagacccacgattcagtaactgtcttactgtttaattcaagcaggcgttctcttgtattagtgaagcagttccgaccggcggtctacgcaggagaggtggaacgtcgttttcctggaagtttggccgctgtcgatcaggatgggcctcgggagctgcagccggccttgccaggatcagcgggagttaccgtagaattgtgcgcaggcctcgtggaccagccgggcctctcactggaggaagtagcctgtaaagaagcgtgggaggagtgtgggtaccatctggcaccgagcgacttacggagggtcgccacctattggtcaggagtaggtctgacgggatctcgccagaccatgttctataccgaagtcacagatgcacagagaagtggtccagggggcggtttagtggaagaaggcgaactgatcgaagtggtacacttgcctctggaaggtgcccaggcattcgccgatgaccccgatatacccaagactctgggcgtgatatttggagtgagctggtttctcagtcaggttgccccgaacttagatctccagtag

SEQ ID NO: 24856 - DNA, 876 bp, synthetic construct
  source 1..876: mol_type = other DNA; note = Synthetic coding sequence
atgaacatgatctggcggaacagcatcagctgcctgcggctgggcaaggtaccgcatcggtaccaaagcggctaccatccagtggctcctctggggtcaaggattctgacagacccagctaaagtgttcgagcacaatatgtgggatcatatgcagtggtctaaagaggaggaagctgctgctcggaagaaagtcaaggagaacagcgcagtcagagttctgctggaagagcaggtgaagtacgaacgagaagcaagcaaatactgggacaccttctacaagattcacaaaaacaaattctttaaagatagaaactggttactgcgggagttcccggaaatccttcccgtggatcagaagccggaggagaaggctagggagtcatcttgggaccacgttaagacctccgcaactaacaggttctctcgcatgcattgccctactgtcccagacgaaaagaaccattacgagaaaagttccggcagtagcgaaggtcaaagtaaaacagaaagcgattttagtaatctcgacagcgagaaacacaaaaagggtccaatggagactggtctcttccctgggagcaatgcaacttttcgaatcctggaagtgggctgcggcgcaggcaactcagtattccccattctcaacacactggagaactctccggagagctttttgtattgttgcgactttgcctccggtgctgtggagctcgtcaaatctcactcctcataccgggctacccaatgttttgcatttgtgcacgatgtatgcgacgatggcctcccatacccctttccggatgggatcctggacgttatcttacttgtttttgttctctcaagcatccatccggaccggaccttattcatatag

SEQ ID NO: 24857 - DNA, 630 bp, synthetic construct
  source 1..630: mol_type = other DNA; note = Synthetic coding sequence
atgaagaaggtgcggctgaaggagctggagagccggctgcagcaggttgatgggttcgaaaagccaaagctgctgctcgagcagtatccgacacggccccacattgcagcgtgtatgctgtacactatccataatacctatgatgacattgaaaacaaggtcgttgcagatttaggctgtggctgcggggtgttatccatcgggaccgccatgttaggcgccggcctttgcgttggctttgatatagacgaagacgcccttgagattttcaatagaaatgcagaagaatttgaactcaccaacattgatatggtgcagtgtgatgtgtgtctgctcagtaatcgcatgtccaagtcatttgacactgtcatcatgaaccctccctttggcaccaaaaataataaggggactgatatggcatttctcaaaacagctctggagatggcccgcacagctgtgtacagtttgcataagagctccacacgcgagcacgtacagaagaaagcagctgagtggaagattaagatagacataattgctgaactgcggtacgatctgccagcctcttataagttccacaagaagaagtccgtggacatcgaagtggacctgattcggttctccttctag

SEQ ID NO: 24858 - DNA, 504 bp, synthetic construct
  source 1..504: mol_type = other DNA; note = Synthetic coding sequence
atgcccgcctaccacagcagcctgatggaccccgacaccaagctgataggcaacatggccctgttgcccatacgttcccagtttaaaggtcccgcaccacgtgagaccaaggataccgatattgtggatgaagctatctattacttcaaggcaaacgttttcttcaagaattacgagataaaaaatgaggctgacaggacactcatctacattactctgtacatctcagagtgtctgaagaagctccagaaatgtaatagtaagtcacagggagaaaaggagatgtataccttgggcatcactaacttccccattccgggagaacccggatttccgctgaacgccatttatgcaaagccagcgaataagcaggaggacgaggtgatgagggcatatctacagcagctccggcaggagaccggtttgagattatgcgaaaaggtaatcaagggcgacctgaagttcagcgcagccctcaaactggctctcaacaagaacaagtag

SEQ ID NO: 24859 - DNA, 4074 bp, synthetic construct
  source 1..4074: mol_type = other DNA; note = Synthetic coding sequence
atggccgacaccgacctgttcatggagtgcgaggaggaggagctggaaccctggcagaagatttccgatgtcatcgaagattccgttgtggaagattacaactctgtggacaaaactaccacggccggaaatccactggtccaacaaggaggacaacccttaattttaacccagaatccagcccctggcctgggtacaatggtgacacagcccgtactgcgtccagtacaagtgatgcagaacgccaatcatgtgactagctcacctgtcgcaagtcagccaatcttcatcacaacacagggctttccagtccggaatgtgcggcccgttcaaaatgctatgaatcaggtaggcatcgtgctcaatgtgcagcagggccagaccgtgcgtcctattacccttgttcctgcgccagggacgcagttcgtcaaacccacagtgggagtcccacaagtgtttagccagatgacacctgtgagaccaggctctaccatgcctgtgaggccgacaaccaacacgttcactacggtcataccggctaccctgacgatacggtcaactgtgccccagagccagtcgcagcaaaccaaatctaccccttccacctccacgacccctacagccactcagcctaccagcctgggtcaactcgcagtgcagtcccccggccagtccaatcagactaccaacccaaaactggccccaagctttccgtctcccccggccgtatctatcgctagtttcgtcactgttaagaggccaggcgtgaccggggaaaactcaaatgaggttgctaaattagtgaacaccctaaacaccatcccttccctcgggcagtcgccaggtcccgtcgttgtgagtaataacagctctgcccatggttcgcagcgtaccagcggccctgagtcttcaatgaaggtcacctctagcatacccgtgttcgatctacaggacggcggtcgtaaaatctgtccacggtgcaatgcccaattcagagtgactgaggcactcagggggcatatgtgctattgctgtcctgaaatggtcgaatatcagaagaaggggaaaagccttgactccgagccgagcgtgccgtcggccgcaaagccgccctcgcctgagaaaacagctcccgttgcatccactccaagctctactccaataccagcacttagtcctccaaccaaggtgccagagccaaatgaaaacgtgggggacgcagtacaaacaaagttgattatgctggtggacgatttctactacggacgcgacgggggaaaagtcgcgcaactgacgaacttcccaaaagtggccaccagcttcaggtgcccccactgtacaaaacgactaaaaaataacattcggtttatgaaccatatgaagcatcacgtagaactggaccagcagaatggggaagttgatggccacaccatctgccagcactgttacaggcaattcagtacaccattccaattgcagtgccacctcgaaaacgtccactcgccatacgaatcaactacgaaatgtaaaatctgtgagtgggcatttgaatcagagcccctgttcttgcaacatatgaaggacacccataagccaggcgagatgccttatgtgtgccaagtgtgtcagtatcgaagctctctgtacagcgaggtggatgtgcattttcgcatgattcacgaggacaccagacaccttctgtgtccctattgtctgaaggtgtttaaaaatggcaatgcctttcaacaacattacatgcgccatcaaaaacgcaacgtctaccattgcaataagtgtcgattacagtttctgttcgccaaggataagattgaacacaagttacagcaccacaaaactttcaggaagccgaaacagcttgagggcctgaagcctggcacaaaggtaacaatccgcgcctcccgcggacagcctcgaacagtgccagttagctctaacgataccccaccatctgcactgcaggaagcagctccactgacctccagtatggaccctctcccagtcttcttatacccacctgtgcaacggtctatacagaaacgggccgtacgaaaaatgtcggtgatgggcaggcagacatgtctggagtgcagctttgagatacccgacttccctaaccacttccctacctacgttcattgttctctttgccggtactcaacatgttgttctcgcgcctatgcgaatcacatgattaacaatcacgtcccgcgtaaatctcctaagtacctggctttgtttaagaatagcgtcagcggcattaaactagcatgtacctcctgcaccttcgtcacctcagtgggagatgccatggccaaacatctcgtgtttaacccctctcacaggtcatcttccattctcccacgcgggctgacttggatcgcccactctcgccacggccagacccgagatagggtgcacgacaggaatgtcaaaaacatgtaccctccaccctcctttccgacaaataaggccgctactgtgaagtcggctggcgctaccccagcggagccagaggagcttctcaccccgttggccccagcgctgccctcaccagcctccacagccacccctccaccaaccccaacacacccccaggcgctcgcgctgcctcctctggccactgagggagcggaatgtctgaatgttgacgatcaggatgaggggtcacccgtgactcaagaaccagaactggcttccggaggcggcgggtctggtggggtgggtaaaaaagagcagctgagcgtgaaaaaactgagggtggtcctgttcgccctttgttgtaacaccgagcaggctgccgagcattttcggaacccacagagaagaatccgccgatggctgagaagatttcaagcaagccagggcgagaatctggagggaaagtacttatcctttgaggctgaagaaaaactggccgagtgggtattgacccagagggaacagcaattgcccgtgaacgaggaaacattatttcaaaaagctacaaagatcggccgatctctagaaggcggctttaaaatctcgtacgaatgggcggtgagatttatgctgaggcaccatctgacaccacacgctcgccgggcagtagcccacactttgcctaaggatgtcgcagagaatgccggtctgtttatcgactttgtgcaacggcagattcataaccaagatctccctctgagcatgattgtagcaatcgacgagatatcactgtttcttgacacagaagtgctgagcagcgatgatcgcaaagaaaatgcgttgcaaactgtgggaacaggagaaccttggtgcgacgtggtattggccattctggctgatggaaccgtactgccaacactggtgttctaccgcggtcagatggaccagccggcgaatatgcccgacagtatcctgttagaggccaaagaatcaggttactcagacgacgagattatggaattgtggtcaactcgggtgtggcaaaagcataccgcctgtcaacgttcgaaggggatgcttgtgatggattgccatcggacccacttgtctgaggaagtactagcaatgctgtccgcaagttccacgctgccagctgtcgtccctgctggttgtagctctaaaattcagcccctggatgtgtgtattaagcggaccgtcaagaattttctccataaaaaatggaaggaacaggctagagagatggcagatacagcctgtgactccgacgtgttgcttcaactggtgctggtctggctcggggaagtgctcggggtaatcggcgactgcccagagctggttcagcgctccttcctagtggcaagtgtgctaccgggccctgatggcaatatcaatagcccaacacggaatgccgacatgcaggaggaacttattgcctcgttggaagagcagctcaaattgtcaggggagcatagcgaatcctccactcccaggccacgctctagccctgaagagacgatagagcctgaaagtcttcaccagctgttcgagggcgagagcgaaaccgagagtttctacggattcgaagaggccgaccttgatctgatggaaatatag

SEQ ID NO: 24860 - DNA, 288 bp, synthetic construct
  source 1..288: mol_type = other DNA; note = Synthetic coding sequence
atgctgaagaacaagggccacagcagcaagaaggacaacctggccgtcaacgctgtggccctccaggaccacatcctgcacgaccttcagttaagaaatttatcagttgctgatcacagtaaaacgcaggtgcaaaaaaaagaaaacaagagcttgaagcgtgatactaaggccatcatcgatacagggctgaagaagactacacagtgcccaaaactggaagattccgaaaaggaatatgttcttgaccccaaaccacctcctctgactctgggataccatagttag

SEQ ID NO: 24861 - DNA, 708 bp, synthetic construct
  source 1..708: mol_type = other DNA; note = Synthetic coding sequence
atgctgaagaacaagggccacagcagcaagaaggacaacctggccgtgaacgctgtcgccctgcaagaccatatcttgcacgacttgcagctcaggaacctttcagtggcagatcactctaagacccaggttcagaagaaagagaataagagtctgaaaagggataccaaggccataatcgatacagggctgaagaaaaccacacagtgtccgaagctggaagactccgaaaaggagtacgtgctggaccctaaaccacctccattgactctcgcccagaagctgggcctaatcgggccacctccaccaccactctctagcgacgaatgggagaaagtgaagcagcgcagcctgctgcaaggcgacagcgtgcagccatgtcccatttgtaaggaagagtttgagctgcggccccaggtgctcctgtcctgctcccacgtctttcacaaagcatgcctccaggccttcgagaaattcaccaataagaaaacctgccccttgtgccggaagaaccagtatcaaactcgcgtcatccatgatggagccagactcttccggatcaaatgtgttacgcgtatccaggcctattggcgcggttgcgtggttcgtaagtggtacagaaatctgagaaagacagtaccccccaccgacgctaagctgcggaagaaattcttcgaaaaaaaaacccaggattggaagcctgcgtag

SEQ ID NO: 24862 - DNA, 1089 bp, synthetic construct
  source 1..1089: mol_type = other DNA; note = Synthetic coding sequence
atgctgaagaacaagggccacagcagcaagaaggacaacctggccgtcaacgctgtcgcgcttcaggatcacatcttgcatgacctgcagttgcgtaaccttagtgtggccgatcattcaaaaacccaggtgcagaagaaggagaacaagtcactgaagagggacacaaaggcaataattgatacaggccttaagaaaacgacccagtgccctaagctagaagatagtgagaaagaatacgtgctggaccccaagcctcccccacttacattggcccaaaaactaggactgataggaccccctccgcctcccctgagctccgatgagtgggagaaggtgaaacagaggagcctcctccaaggagattctgtgcaaccttgtccgatttgcaaggaggagttcgagttgcgcccccaggttctgctctcatgttcccacgtgtttcacaaggcctgcctgcaggccttcgaaaagtttaccaacaaaaagacatgccctctgtgtcggaagaaccagtatcagactagggtcattcatgatggggcccgactattcagaattaagtgtgtcactcgcatccaagcatattggaggggatgcgtcgtgcgtaagtggtaccgcaacttgcggaaaacagtgcctccgaccgacgccaagctaaggaaaaaatttttcgagaaaaaatttactgaaataagccatagaatcttgtgtagctacaataccaacattgaggaattgtttgcagaaatagaccagtgcttggccatcaatcgatcagtactccagcaactggaggaaaagtgcggacatgaaataactgaggaggaatgggagaaaatccaggtgcaggcgctgcgtcgggaaactcacgagtgtagcatttgcctagctccactcagtgccgcaggcgggcagagagtgggtgccggacgccgaagccgtgagatggctctgctgagctgttcccatgtttttcatcacgcctgcctgcttgcgctggaggagttcagcgtgggggatcggccacctttccacgcctgtcccctctgtcgctcttgctaccagaaaaaaatcctggagtgctag

SEQ ID NO: 24863 - DNA, 1278 bp, synthetic construct
  source 1..1278: mol_type = other DNA; note = Synthetic coding sequence
atggacaagaacatcggcgagcagctgaacaaggcctacgaggccttccgccaggcctgtatggatcgtgattccgcagttaaagagttacagcagaaaactgagaactacgagcaaagaatccgcgagcagcaggagcagctttcccttcagcagacaatcattgacaagctcaagtcccaactgctgctggtcaactccactcaggacaacaattacgggtgtgtcccactgctcgaagactctgaaacacgaaagaacaacctgaccctggaccagcctcaagacaaggtaatatctggcatcgcaagagagaaattgccgaaggtccgtagacaggaggtgtcgtccccccgaaaagaaacctctgcgcgatctcttgggtctccccttctgcatgagcgcggcaacattgaaaagaccttctgggatctgaaggaggagtttcataaaatctgtatgctcgccaaagcccagaaggatcacctcagcaaattaaacataccggacacggccacagagactcagtgctctgtgccaatccagtgcacagataaaaccgacaagcaggaagctctgttcaagccccaggctaaggatgacattaatagaggggcacccagcatcacttctgtgacacctcgcggcttgtgccgggacgaggaggacacatcattcgagtctttatcgaagtttaacgtaaaatttccaccaatggataacgacagtaccttcctccacagcacacctgagcggccaggcattcttagtcctgccacatccgaggccgtgtgtcaggagaagtttaatatggagttcagggacaaccccgggaacttcgtgaaaaccgaagagacacttttcgagattcagggtattgatccaattgcttctgccatccagaaccttaagaccaccgacaaaaccaaaccttcaaatctggtcaatacttgcatacgcactaccttggatagggccgcctgcctgccaccaggtgaccacaacgccctctacgtaaatagtttccccttgctcgaccctagtgacgccccatttccctcgctcgactcccctgggaaggctatcaggggaccacagcaaccaatctggaagcctttccccaatcaagattcggactctgtggtgctaagtggaactgactccgaactgcacattccccgcgtgtgcgaattttgccaagcagttttccccccaagcatcacctctcgcggtgattttctgagacatctgaattctcacttcaacggcgaaacctag

SEQ ID NO: 24864 - DNA, 639 bp, synthetic construct
  source 1..639: mol_type = other DNA; note = Synthetic coding sequence
atggccccctggggcaagcggctggccggcgtgcggggcgtgctgttggacataagtggcgtactatatgatagcggagcagggggcggaaccgctattgcaggatcggtggaggcggtggcgcgacttaagagaagccggctcaaggtccgcttttgtaccaacgaaagccagaagagtagagcagagctggttggccagctgcagcgccttggattcgacatttcagagcaggaagtcaccgcgccagcgccggccgcttgccagattctgaaggagcagggactcagaccatatctgctgattcacgatggggtcaggtcggaatttgaccagatcgacacctccaatccgaattgtgttgtcatcgcggacgccggggaaagttttagctatcagaacatgaacaacgcctttcaggtgctgatggaactggagaagccagtattgatctcacttggcaagggtcgctactacaaagaaacctctggattaatgcttgacgtggggccttacatgaaggccctcgaatatgcttgcgggattaaagcagaggtggtggggaaaccatcgccagagttctttaaaagcgccctccaggcgattggtgtcgaggcacatcagcttctcagcgtgtag

SEQ ID NO: 24865 - DNA, 2868 bp, synthetic construct
  source 1..2868: mol_type = other DNA; note = Synthetic coding sequence
atggaggtgggcagcgaggaggagaagtgggagaagctggacgccgagttcgaccatttcgtcgttgatatgaagccctttgtactaaagctgcctcatcgaaccgaaaggcagagatgtgcactttggattcgtaagctatgcgagcccagcgggacaggcgcaggtatcatggggcggaaaaacagaaacttatacgcaaaactattgctgcacatgctcaagcgtggagcgctcgaaggcccattcacacatcggcctgagcccggaacccttaaaatacttccatcttatatgtccatctacttcgatgaacctaatccagctcgggccaagggtagctcccccgaaggtctcccggcttgggtgctgggcgagctggagacatctgagcacaaactaaatgaaagttggaagctcagcagcggcgaagacaatacactcgtgcagtctcctacagatgtctatagcagagaacagtacacaggtaaactaagggtcaggagccattccctgtcaccaacccaccgggaggacggacaaaatattacgccaaagatctgcgaggtgtacagcaagaagtcccctgtttctctggacgacagcgatattgaggctaggctaaattcgtggaatctagggatcgagaatcccagatacctgcgccagaaaccaatcccagtcagcctgatgaccccaaaattcagcctcaggaagtcctctagcttccatgatgaccatttcctatcgcgcatacgagagaaagagctggacatgaagacaaagatgatggaggccaaattccacgaagaaaagttaaaattgcaacaaaaacacgacgcggatgttcagaagatcctcgagcggaagaacaatgagatagaggagctgaaaactctgtacaggtccaagcagcacgagacggaagagaccatccgcaaactcgagaaaaaggtgcagacactcatcagggactgccaggttattagagagaccaaggaggaccagattgctgaactgaagaagatctgcgagcagagcactgaatctcttaacaatgattgggaaaaaaagctccataacgccgtcgccgagatggagcaggagaagttcgatctgcagaagcagcacaccgagaatattcaggagctacttgaagacactaacgttcgcctgaataaaatggagagcgagtatatggcacagactcaatccacaaatcatatgatcaaggaacttgaggcccgggtgcagcagctcaccggtgaagccgagaacagcaacctccaaagacagaagctaatccaggagaaagcagaactggaacgctgctaccagatcacttgttctgagctccaggaggtaaaggcgcgcaggaatactctgcacaaagagaaagatcatctggtgaatgactacgagcagaacatgaaattactgcaaactaaatatgatgctgatattaatttgttaaaacaggagcacgccctcagtgcatctaaggcatctagcatgattgaggagctcgagcagaacgtgtgccagctcaaacaacagctgcaggagtcggagcttcagaggaaacagcagttgagagatcaagagaataaattccaaatggagaaatcacatctgaagcacatttatgagaaaaaggcccatgatctccaaagcgagctcgacaaaggcaaggaggatacccaaaaaaaaatccacaaattcgaagaggcactgaaggagaaggaggaacagctgacccgggtgacggaggttcagcggctgcaagcccagcaggcagacgctgccttggaggaattcaagcgccaggtggaactgaattctgaaaaagtgtatgccgaaatgaaggagcagatggagaaggtggaagcagatctcactcggtcgaagtcgctcagggaaaaacagagcaaggaattcctgtggcagttggaggacatcaggcagcggtacgaacagcagattgttgaactgaaactggagcacgaacaagagaagactcatttattgcagcagcacaacgctgagaaggatagtctggtgagagaccacgagagagagattgagaacttagagaagcagctccgtgccgccaatatggagcacgagaatcagattcaggagtttaagaagcgggacgcccaggtgatagccgacatggaagcccaggttcataagttgagggaagaactgatcaacgttaactcccagaggaagcagcagttggtcgaactgggcttgctgcgagaagaggagaagcagagggccacccgggagcatgaaatcgtggtaaacaaactcaaagccgagtccgagaagatgaagatcgaactgaagaagacacacgctgccgagactgagatgacgctggaaaaagccaatagtaagttaaaacagatcgagaaagaatacacccagaagctggccaagagctcccagattattgccgagttacagacaacaatctctagtctgaaggaggagaattcccagcagcaactggctgccgagcgaagattacaagacgttagacaaaaattcgaagatgaaaagaagcagctgatcagagacaacgatcaagctattaaagtgctccaggatgaactggaaaaccgcagtaaccaagtacggtgcgccgagaagaaactgcagcataaggagctcgaatcacaggaacagattacatacatccgacaagaatacgaaacaaagctgaaggggttgatgcctgcatctctgaggcaggaactggaagacacaatctcatcccttaagtcacaagttaatttcttacaaaagcgtgccagcatacttcaggaggaacttaccacgtatcagggcagacgctag

SEQ ID NO: 24866 - DNA, 1269 bp, synthetic construct
  source 1..1269: mol_type = other DNA; note = Synthetic coding sequence
atgccccggaagggcacccagcccagcaccgcccggcggcgggaggagggccccccccctccatcgcctgatggcgccagctcagacgcagagcccgagccaccctcaggccgcaccgaatctccagccaccgcagccgaaactgccagcgaagaactggataaccggtctttggaggaaatactcaacagcattccaccacccccaccccctgctatgaccaacgaggcgggagcccctcgcttgatgatcacacatattgttaaccagaattttaaaagttatgcgggcgagaaaatcctggggccattccataaacgattcagctgcattattggcccgaatggtagcggcaaaagtaacgtgatcgacagcatgctgttcgtctttggctacagagcccagaagatccgcagtaagaagctaagcgtgctgattcataactcggacgaacacaaggacatccaatcctgtacggtcgaagtgcactttcaaaaaatcatcgacaaagagggagatgactacgaggtcatcccaaacagcaatttttatgtctccagaactgcgtgtagggacaatacttccgtgtaccatatcagcgggaagaagaaaacttttaaggacgtgggcaacctactccggagccatggcatcgaccttgatcataaccgctttctcatactgcagggagaggtggaacaaatcgcaatgatgaagcccaagggccagaccgagcacgacgaagggatgttggaataccttgaagatatcattgggtgcggacgtctgaacgagcccatcaaggtgctttgcagaagagtggagatcttgaacgaacacaggggtgaaaaactgaaccgcgtgaaaatggtggaaaaggaaaaggacgctctcgagggtgagaagaatattgccattgaattcctgacactggagaatgaaatttttcggaaaaaaaaccacgtgtgtcagtattatatttacgagctacaaaagcggatcgccgagatggaaacacagaaagagaaaatacacgaggataccaaagagattaacgaaaagtcaaatattcttagtaatgagatgaaggccaagaataaggacgttaaagatacagagaagaaacttaacaaaatcactaagtttatcgaggagaataaggagaaattcacccagcttgatcttgaggacgtccaagtgcgtgaaaaactcaagcacgccacgtcaaaagcaaagacaggggagactaccagcaagaggaagaagtag

SEQ ID NO: 24867 - DNA, 303 bp, synthetic construct
  source 1..303: mol_type = other DNA; note = Synthetic coding sequence
atgcggaagcggctgagcgcccccgagctgcggctgagcctgaccaagggacccggcaacgatggcgccagcccaacccagtcagctccatcctccccagatggtagctccgatcttgagattgatgaactggagactccctccgactccgagcaactcgactctggacacgagtttgagtgggaggatgagctgccacgcgctgagggactcggcactagcgaaaccgccgaacggcttggacgcggctgtatgtgggatgtcacaggtgaagacgggcatcattggagagtatttcggtag

SEQ ID NO: 24868 - DNA, 1059 bp, synthetic construct
  source 1..1059: mol_type = other DNA; note = Synthetic coding sequence
atgggcaaggtggagaacagcaagagcgcccagggcctggccggccttcggaacctgggcaatacctgttttatgaatagcatactccaatgtttgtctaacaccagagaattgagagactactgcctgcagagactgtacatgcgagacctgcatcacggaagcaatgcgcataccgctctggtcgaagaatttgcaaagctcatccaaacaatctggacttcatctcccaatgacgtagtgagcccatcagaatttaagacccagatccagcgttacgcaccccgctttgttggctacaatcagcaggacgctcaggagttcctgaggttcctgctggatggtttgcataatgaggtcaatagggtcaccctcaggcctaagtccaacccagagaatttggaccacctgcctgatgatgagaagggtaggcagatgtggcgtaaatacctcgagagggaagactctcggattggcgacctgtttgtgggacagctcaaatcatcgctaacgtgtacggactgcggctactgttctaccgtgtttgacccattttgggatctgtctttgcccattgccaaaagaggatatcctgaagtgacactgatggattgcatgcggctctttacaaaggaagatgtcctggacggcgatgagaagccaacgtgctgtaggtgtcgcggccggaagcgctgtattaaaaaattttcgattcagcgtttccccaagatccttgtcctgcacctgaagcgtttttctgagtccaggattcggacttctaagcttacaacctttgtgaattttcctctccgagacctggatttgcgggagttcgcttcagaaaacaccaaccatgcggtctataatctctatgccgtatcaaatcactccggcaccaccatgggcggccactataccgcatattgccgcagccccgggaccggggagtggcacacctttaatgattcttcagtgacccctatgagtagcagtcaagttagaacatccgatgcatacctgctgttttacgagcttgcctccccaccttccaggatgtag

SEQ ID NO: 24869 - DNA, 1497 bp, synthetic construct
  source 1..1497: mol_type = other DNA; note = Synthetic coding sequence
atggtgatcgaggaggtgaacttcatgcagaaccacctggagatcgagaaaacatgtcgagaaagcgccgaagcactggctactaagctcaataaagagaacaaaacacttaagaggatttcgatgctctatatggccaagcttggcccagacgtgattactgaagagattaatatagacgacgaggattctaccacagatacagatggagctgccgagacctgtgtgagtgtgcagtgccagaaacagatcaaagagctccgagatcagattgtgagtgtgcaagaagaaaaaaagatcctggccattgagctagaaaacctcaaaagtaaacttgtagaggttatagaggaagtaaataaggtgaagcaggagaagaccgtgctcaatagcgaagtccttgagcagcgcaaagttttagaaaagtgtaatagggtctcaatgcttgctgtagaggagtatgaagagatgcaggtaaaccttgagctagaaaaggatcttagaaagaaagccgagtcctttgcgcaggagatgtttattgaacagaataaattgaagagacagagtcacctattgctgcagagcagcatcccagaccagcagttgttgaaggcgctggacgagaacgcgaagcttacacaacaactggaggaggagaggatccagcatcagcagaaggtgaaggaactggaagagcaactagagaatgagaccctccataaggaaatccacaatctgaagcagcagctggaactgttggaagaggataagaaagaactcgagcttaagtaccagaatagcgaggaaaaggcccgcaacctcaagcactccgttgacgaattgcagaagagggttaatcagtccgagaacagcgtgcccccaccgcctcctccgcctcctcctttgccgccgcctccaccaaaccccatccggtccctcatgtctatgattcgcaagaggtctcatccttctggctcgggggccaagaaagagaaagccactcagcctgagaccaccgaggaagtgacggacctgaaaaggcaggccgtggaagagatgatggacaggatcaagaagggtgtacacctcaggcccgtgaaccagacagctaggcccaagactaaacccgaaagctcgaagggttgtgagtcagctgttgacgagttgaagggcattctcgggaccctaaacaagtctacaagttctcggagtctgaaaagcctggaccccgaaaactctgagacagaactggaaagaatcctgagaagacgtaaggtaacggcagaagccgactcatcctccccgacaggaattctggcaacttctgagtcaaagtctatgcctgtgctgggctctgtttcttccgtgaccaagaccgccctcaacaaaaagactttggaggctgagttcaattccccatcccccccgaccccggagcctggggagggaccaaggaagctggagggctgtacatcatctaaggtgacctttcaatag

SEQ ID NO: 24870 - DNA, 1950 bp, synthetic construct
  source 1..1950: mol_type = other DNA; note = Synthetic coding sequence
atgaacagcagcgacgaggagaagcagctgcagctgatcaccagcctgaaagaacaagcgatcggtgagtatgaggacctccgggctgagaatcagaaaaccaaggagaaatgtgacaaaattcgtcaggaaagagatgaagccgttaaaaaattggaagaatttcagaagatctcacacatggtcatcgaggaggtgaatttcatgcagaatcacctagaaatcgagaaaacatgtcgtgagtctgccgaggccctggccaccaagcttaacaaggagaacaaaactttaaagaggatcagcatgctgtatatggccaaactaggccccgacgttataaccgaagagataaatatcgatgacgaagatagcacaaccgataccgatggcgctgcagagacgtgtgtgagcgtgcagtgtcagaagcagattaaggaactcagagaccagattgtgtctgttcaggaagaaaagaagatcctcgccatcgagctggagaacctgaagtccaaactggtcgaggtgatcgaggaggtgaacaaggtcaaacaggaaaagacggtattaaattcagaagtattggaacagcggaaggttctggagaagtgtaatagggtgtccatgctggctgtggaggagtacgaagagatgcaagtgaacctggagcttgagaaggatctccgaaagaaggcggagagtttcgcacaggagatgtttattgagcagaacaagctcaagcgccagtcacacctactgcttcagagttcgatcccggatcaacagctgcttaaagccctcgacgagaatgccaaactaacccagcagttagaagaggagcgaatccaacaccagcagaaagtgaaggagctagaagagcagctggaaaatgaaaccctccataaagaaatacacaacctgaaacaacaactggaactgctcgaggaagataagaaggaactggaattgaagtaccaaaattccgaggagaaggcccggaacctcaaacactctgtggatgagctgcaaaaaagggtgaaccagagcgaaaacagtgtccccccgccacccccaccacctccccccttacctcccccccctcctaaccccatcaggtctctgatgtctatgatcagaaagcggtcacatccgtccggctcaggggcaaaaaaagagaaagccacccagcccgagacaaccgaagaggtgaccgatttaaaaaggcaagccgtagaggagatgatggaccgaatcaaaaagggcgttcatttacggccagtcaaccaaacagctcgtccgaagaccaaacctgagtcgtccaaggggtgcgaaagtgctgtcgatgagctaaagggcatactggggacattgaataagtcaacctccagccgcagcctgaaatctcttgatccggaaaacagcgaaacagagttggagaggatactgcgccgtaggaaggttacggcagaagctgatagctcatcccctaccggcatcctcgctaccagcgaatcgaagtctatgcccgtgctgggtagcgtcagtagcgtgaccaaaaccgccctgaacaaaaagactctggaagccgagttcaattccccttcccctccaactccagagcctggagaaggtcctagaaagttagaaggctgcaccagctccaaagtgactttccaacctccttccagcattgggtgtcgcaaaaaatatatagatggcgagaaacaagcggaaccggtagtggtgctggatcccgtgtccacccacgaaccgcaaacaaaagaccaagtcgccgaaaaggacccgacccagcataaggaggatgaaggggagatccagccggagaataaggaggactccatcgagaactttttcccctttcatttcgggttcgagggcgttctcccattggcaggtgtgactctttccactaaggcacgagacccaaaatag

SEQ ID NO: 24871 - DNA, 837 bp, synthetic construct
  source 1..837: mol_type = other DNA; note = Synthetic coding sequence
atgggcaagagcagcgagtggtgcgagcggatcgccggcatccagaagtttgtactcgaaaagtggacaaaaaaggccaagcccgaggacaccctcaacttatgccagttactgaataacgacctcgccagcaccgtggtttcgtacccccggaggtttgttggactggggaccctcccaatgcaggcccctgaactggccgttaaagagatggagcgatgcgtgaaggagctcggatttcctggagtgcagataggtacccacgtgaatgagtgggatctaaatgcccaagagctgttcccagtctacgctgccgctgaacggcttaagtgttctttgttcgtccacccttgggacatgcagatggacgggcggatggcaaagtattggctaccctggctggttggtatgcctgcagagaccacgattgccatatgtagtatgattatggggggcgttttcgaaaaattccctaaactgaaggtgtgcttcgcacacggaggaggcgcatttcccttcaccgtcgggaggattagtcatggatttagtatgcggccggacttgtgtgcacaggataatcccatgaaccccaagaagtacttgggctcattttataccgatgctctcgttcacgaccccctgtccttgaaactgttgactgacgttattggcaaggacaaagtaatcctgggcacggactatccatttccgctgggagaactagaaccaggcaaattgattgaatcaatggaagagtttgacgaggaaaccaagaataaactcaaagcagggaacgccctggctttcttggggctcgaacggaaacagttcgagtag

SEQ ID NO: 24872 - DNA, 1368 bp, synthetic construct
  source 1..1368: mol_type = other DNA; note = Synthetic coding sequence
atgttcaccgagggcgaggagatgtacctgcagggcagcaccgtgtggcacccagactgcaaacagtctaccaaaaccgaggagaaattacgactgcccaacattagaagaagttcaagcgactttttttactccaagtctcttattcgtagaacggggcgcagtccctccctccagccgaccaggaccagttctgagtccatctactctcgccctggctccagtatacccggctccccagggcacacaatctacgccaaggtggacaacgagattctggattacaaggacctcgcagccatccctaaggtgaaagctatctacgatatcgagcggcccgacttgataacctacgagccgttctatacctccggctacgacgataagcaagaacgacagagtctgggggagtccccaaggaccctctcacccactccctccgccgaggggtaccaggatgtgagagatcgtatgatccaccggagcacatcccaaggttcaattaacagccccgtttactcccgccattcttatacacctacaacttcaagaagcccccagcactttcaccgtcccgaccagggaataaacatttacaggaagccccccatctacaaacagcacgccgccctcgcagcccaatctaagtctagcgaagatattatcaaattttctaagtttccagcggcccaagcccccgacccctctgaaaccccaaagattgagaccgatcattggccaggacctcctagcttcgccgtcgtggggccagatatgaaaaggagatcgtcaggtcgggaggaggacgacgaggagctcctccgccgccggcaacttcaagaggagcagctgatgaagctcaacagtggcctgggccagttgatacttaaggaggagatggaaaaagaaagcagagagaggagttcgctcttagcatctaggtatgactctcccataaactcagcctctcatattccttcttcaaagacagcaagtttgcctggatacggccgcaacggcctgcataggcccgtgagcacagactttgcccagtacaattcttatggtgacgtatctgggggtgtgcgggactaccaaacacttcctgacggacatatgccagcaatgagaatggatcggggagtgagtatgccaaacatgctggagccaaagatcttcccctatgaaatgctgatggtgacaaaccgcgggcggaacaagatcctcagggaagttgacaggactcggctggagaggcatctggctcccgaggtttttcgagagatatttggaatgagtatacaggagttcgaccgccttccattatggcgcagaaatgacatgaagaagaaggctaaactgttctag

SEQ ID NO: 24873 - DNA, 1959 bp, synthetic construct
  source 1..1959: mol_type = other DNA; note = Synthetic coding sequence
tgaagccacgccttcatcagccagtgggtgtgccggcactggcgggatcctgtggcccatccacaggatccccatcacccttcagagaagcccgtgatccattgccacaagtgcggagaaccatgtaaaggcgaggtcctgagggtgcagaccaaacattttcacatcaagtgctttacctgtaaggtttgcggctgcgatctcgcccagggtggatttttcattaaaaatggcgaatacttgtgcactttggattatcatcccaactgtttcgcctgtacaatctgcaagaggccctttccaccaggagatcgagtgactttcaatggacgcgactgtctgtgccagctttgcgcacagcccatgagctctagcccaaaagagacaacctttagtagtaactgcgctggatgcgggagggatattaagaatggacaggctctgctcgctttagacaaacagtggcatctcggctgtttcaagtgcaagagttgtggcaaagtactgacaggcgaatatatcagtaaagatggggccccatattgtgaaaaagactaccagggcctgttcggcgtaaagtgtgaggcctgccatcagttcatcacggggaaggtgctggaggcaggggacaagcactaccacccatcttgcgctcgatgttctagatgtaatcagatgtttacagaaggcgaggaaatgtatctgcaaggctccaccgtgtggcaccccgattgcaagcagtcaaccaagacagaagagaaactgcgccctacccgcacaagcagcgagagcatatatagcaggccgggcagctcgatacctggctccccaggacacaccatctacgctaaagtagacaacgaaatcttagattacaaagacctagcagctattcccaaggtcaaggcgatctacgatatcgagagaccagacctgataacatatgaaccattttacacttctggttacgacgataagcaggagagacaaagcttaggcgagagtccacggactctgtcccctaccccaagtgctgaaggctaccaagatgtgagagaccggatgatccacaggtccaccagtcaggggtcaatcaatagcccagtgtactcccgccatagctatacccccaccacctctcggtcaccccaacattttcaccgaccagatcaaggtattaacatctatcgtaaaccccccatctataaacagcacgccgccctcgcggcacagagtaagtcttccgaggacattatcaaatttagtaaattccccgcggcacaagcccctgaccccagcgaaactcccaaaattgaaactgatcactggcctggccctccttctttcgccgtagtcggcccagacatgaagcgcaggagcagtggccgggaggaggacgacgaggaactgttaaggcggagacaactgcaggaggagcagctgatgaaactgaactctggactgggacagctgatccttaaagaagagatggagaaggaatcaagagagcgctcatctctcttggcgagccggtacgactcccccatcaattccgcttcacacatcccctctagcaagactgcctcactgccgggctatggccggaacggccttcataggcccgtctcaaccgattttgcccagtataattcctatggcgacgtgtcagggggggtgagggactaccagactttaccagacggtcatatgcccgccatgagaatggaccgtggtgttagcatgcctaacatgctggaacctaagattttcccctatgagatgttaatggtcaccaacagagggaggaacaaaattttaagagaagtggaccgcacccgcctggaaagacacttagcccccgaggtgttcagggaaatctttgggatgagcattcaggaattcgataggctgcccctgtggcggcgcaatgacatgaagaagaaggctaaattgttttag

SEQ ID NO: 24874 - DNA, 837 bp, synthetic construct
  source 1..837: mol_type = other DNA; note = Synthetic coding sequence
atgacccagcagtggcgggaggtgaacgaggaccgggaggccgtggcccaggccagatcctggcagagcctcaatctcggcgaccgcgatatgggggtttcctttatcgaaacagctctcgccttgtcagccgctagagcaagacgccccctccttactagtcacccaccatctaggccgtttcagcctccgaagcacacaccatcaccaccacccgccccgcgtgtgaatagtagacatccaggaagatctgtatccctcagcctgccaagcgctagtcaggccccaccagtccctctggcatccccagaaggaaggccgcacactgtgggagctcctcacgccagcacttggaagcggactcggggacgacagcgagcacggccgcctaaaatcgttaaggaagccgaagtcccacaggccgcactgggagttcctgctcaaggcacaggcgacaacggacatacccccgtggaagaggaggtcggggggattccagtgccagccccgggactgctgcaggtaacggagaggagacagccactgagctctgtctcatccctggaagttcacttcgacctgctggatctcaccgagctcactgatatgtcagatcaggagttagcagaagtatttgcagatagcgacgatgagaacctgaataccgagagtcctgccggtctgcaccctttgccacgggccggctatctgagaagtccgtcatggacaagaactcgtgccgaacaaagccacgagaagcagcctctgggggaccccgagcgacaagccaccgttctagacacatttctgactgtagagcgcccacaggaggactag

SEQ ID NO: 24875 - DNA, 540 bp, synthetic construct
  source 1..540: mol_type = other DNA; note = Synthetic coding sequence
atgaccgacctggtggccgtgtgggacgtggccctgagcgacggcgtgcataaaattgaatttgaacacggcactacatccggcaagcgggtggtgtatgtggatggtaaagaggaaattcgaaaagagtggatgtttaagctagtcggtaaggagactttttacgtgggagcggctaagactaaagcgactatcaatatcgatgccatcagtggcttcgcatacgagtacacactcgaaattaatggcaaaagtttgaagaaatacatggaggatcgttccaagaccaccaatacttgggtgctccacatggacggagagaacttcagaatcgtgctggagaaagatgcaatggatgtctggtgcaacgggaaaaagctagaaactgctggcgagtttgtagacgatggtactgaaacacatttttccattgggaatcacgactgctacattaaggccgttagtagcgggaagcgcaaggagggcattatccacacactgattgtcgacaatcgagagatccctgagattgctagctag

SEQ ID NO: 24876 - DNA, 540 bp, synthetic construct
  source 1..540: mol_type = other DNA; note = Synthetic coding sequence
atgaccgacctggtggccgtgtgggacgtggccctgagcgacggcgtacacaaaatcgagttcgaacatggcaccacttctgggaagcgtgttgtgtacgtggatgggaaggaggaaattaggaaggaatggatgttcaagctggtgggtaaggagaccttctacgtcggagctgcgaagaccaaagccacaattaacatagatgcaatcagtggtttcgcctacgagtacacccttgagatcaacggaaaatccttaaagaagtatatggaggacaggtctaaaactaccaatacctgggtgctacacatggatggcgagaattttaggatcgtgcttgagaaggacgccatggacgtatggtgcaatgggaaaaaattagagaccgctggggaattcgtggatgatgggaccgagactcatttttcaatcgggaaccatgactgctatatcaaagccgtgtcttctggtaagaggaaagagggcataattcataccctgattgtcgataaccgggagatccctgaaattgcaagttag

SEQ ID NO: 24877 - DNA, 1053 bp, synthetic construct
  source 1..1053: mol_type = other DNA; note = Synthetic coding sequence
atgggcccctgcaacctgagcagcgccgccggccccaccgccgagaagtctgtgccgtaccagagaacgcttaaggaaggccaggggacctctgtggtagcgcaaggtccctctcggcctctgccgtccacggccaacgtagttgtcatcggcggagggtccttaggctgtcagacgctctatcacctcgcgaagctgggaatgtcgggtgctgtccttctggaacgagaacgcctgacgtctgggacaacttggcatactgcaggtctgctatggcagctacgcccctccgacgtggaggttgaactgttggctcacactaggagggttgtgagcagggaacttgaagaggaaactggactgcacacaggctggatacaaaatggtggtctttttatagcctccaacagacagaggttagatgagtacaaacgcctgatgtccttgggaaaggcctatggagttgagtcgcacgttctgtctcctgccgagactaagaccctgtatcctctcatgaatgtagacgacttgtacgggacactctacgtgccccacgatggtaccatggacccagccggcacatgcactaccctagcccgagcagcatcagcccggggggcccaggtgattgagaattgtcctgtaactggcattcgagtttggaccgatgattttggggtgcgccgcgtcgctggagtggagacccagcacgggagcatacaaaccccatgtgtagtcaattgcgcgggggtctgggcctcagcagtaggaaggatggccggagtcaaggtccccctggttgccatgcaccacgcatacgtggtgactgagcgcatcgaaggtatccagaatatgcccaatgtccgggatcatgatgcctcagtgtatctccggcttcagggtgatgcactgagcgtaggtggatacgaagccaacccaatattctgggaggaagcagttaaatatagaccacgcgcagcagggggcttatgccttaagacaagtactgaaaaagtgtgtgctgtgtggtcagatgacctcagacgtgcatag

SEQ ID NO: 24878 - DNA, 2001 bp, synthetic construct
  source 1..2001: mol_type = other DNA; note = Synthetic coding sequence
atggcccgggccggcagctgcggcggcgccgccgccggcgccggcaggcccgagccctgggagctgagtcttgaggaggtcctcaaggcatatgagcagcctttaaacgaggagcaagcatgggccgtgtgctttcaggggtgccgggggctcagaggaagtcctggccggcgcctgagggataccggggacctgctccttagaggcgatgggtcagttggtgctagggagccagaggccgctgaaccagcaacaatggtggtgccactcgcatcgtcggaggcacagactgtacaaagcctgggcttcgctatctaccgtgcgctcgactggggtcttgatgagtcggaagaacgtgaactcagccctcaactggagcgtctgatagacctcatggccaataacgattccgaagacagtggctgcggcgccgctgacgagggctacggaggacccgaagaggaagaggaagccgaaggggtgcccaggtcggttcgtacctttgcgcaggccatgagactgtgcgctgccaggctgacagatcctcgcggagcacaggcccattatcaagccgtctgtagagcactgttcgtggaaaccctggagttaagagcttttctggctcgggtgagagaagccaaagaaatgttacagaagctgagagaggatgagccccacctcgagacacctagagcagagctggacagcctcggtcacacagattgggcaaggctgtgggttcagctcatgcgagaactcagaaggggggtcaagcttaagaaggtacaggagcaggaatttaatcctctaccgacagagtttcagctcacaccattcgagatgctgatgcaagatattcgggcccgcaattataagttacgcaaggtcatggtcgacggcgatattccgccaagggtcaagaaggatgcacacgagctcatcctcgactttatcaggagtaggcctccattgaagcaggtaagcgagaggcggcttcggcccctaccacctaaacagcgctcactccatgaaaagatcctggaggaaataaagcaggaacggaggctgaggcccgtcagaggggaaggatgggcagctagaggctttggctcgttaccctgtatcttgaacgcatgtagcggcgatgctaagtctacctcctgcatcaatttgagtgtgacagacgcgggagggagtgcacaacgtccacgtccgcgagtactgcttaaggcccctacactcgccgagatggaagagatgaacacttcagaagaggaggagagtccttgtggtgaggtcacccttaagagggatcgctcttttagtgagcatgatctggctcagcttcggagcgaggtggcgtccgggctgcagagcgccacccaccctcctggtgggacagagcccccgcgcccacgcgccggtagtgcccatgtttggcgacccgggagcagagatcagggcacctgtcccgcctccgtaagcgaccctagccaccctttgctgagcaaccggggatcgtctggagataggcccgaggcatcaatgaccccagatgccaaacatttatggctcgagtttagccaccccgtcgagtcactggccctaactgtcgaggaggtgatggatgttaggcgcgtattggtcaaggcagagatggagaaattcctgcagaacaaggagctattctcctcactgaagaagggaaagatctgctgctgttgtagggccaagtttccactcttcagttggccgcctagctgcctcttctgcaagagatccctccagggcccccagtggcaatctgtggaagaagcctttcctcatatatacagccacggttgcgtgttgaaagacgtgtgttcagaatgtacaagttttgtcgctgacgtagtgaggagctctcgcaaatctgtggacgtcctgaacaccactccgcgacgcagccggcaaacacaatcattgtacataccaaatacacggacactggactttaaatag

SEQ ID NO: 24879 - DNA, 474 bp, synthetic construct
  source 1..474: mol_type = other DNA; note = Synthetic coding sequence
atggagaccctgcagagcgagaccaagacccgggtgctgcccagctggctcacggctcaggtcgccacgaaaaacgtggcacctatgaaggcccctaagcggatgaggatggctgcagtgccagttgccgccgccaggttgccagccacaaggacagtgtattgcatgaacgaagccgaaatcgttgacgtcgccctcggaatccttatcgagtcccggaaacaagagaaggcctgtgagcagcccgcgctcgctggcgcagacaatcctgaacattcgccaccctgttcggtatcaccgcatacgagttctggctcctcgagcgaagaagaggatagtggtaagcaggcacttgctccgggtctcagcccctcacagcgccccggcggatctagtagcgcttgtagtcgcagccccgaagaggaggaggaagaggatgttttgaaatacgtaagagaaatcttcttcagctag

SEQ ID NO: 24880 - DNA, 804 bp, synthetic construct
  source 1..804: mol_type = other DNA; note = Synthetic coding sequence
atggccaactgcgagcggaccttcatcgccatcaagcccgacggcgttcagcgcggtcttgtgggtgagatcatcaagagatttgagcagaagggcttcagacttgtcgggttaaagttcatgcaggcttcggaggacctcctgaaagagcactacgtggacctcaaggaccgcccttttttcgcaggtctcgtaaaatacatgcacagtggcccggtggtggccatggtttgggaggggctcaatgtggtgaagacggggagggtcatgctgggcgagactaatcctgcagattccaagcccggtaccatcagaggtgacttctgtattcaagtagggcgcactatggccaacctcgaacggaccttcatagccatcaagccagacggagtccagcggggacttgtaggcgaaatcatcaaacgattcgaacagaagggatttcggctggtcgctatgaagttcctgcgggcttcagaagagcacctgaaacagcactatatcgatctcaaggatcgcccattcttccctggcctcgtaaaatatatgaactcaggcccagtcgtcgcaatggtctgggagggcctgaatgttgtgaagactgggagagttatgttgggggaaactaatcctgctgactccaaacccggtaccattcggggggatttctgtatccaggtgggccggaacatcattcacgggagtgatagtgtaaagtccgcagagaaggagatttccctttggtttaagcccgaggagctggtggactacaagagctgtgcccacgactgggtttacgagtag

SEQ ID NO: 24881 - DNA, 879 bp, synthetic construct
  source 1..879: mol_type = other DNA; note = Synthetic coding sequence
atggtgctgctgagcaccctgggcatcgtgttccagggcgagggcccccccatctcatcctgcgacaccggaaccatggctaattgcgagagaacatttattgcaatcaaaccggacggagtgcagcgcggcctcgtgggtgagatcattaaaagattcgaacagaaggggtttaggctagtaggtcttaagttcatgcaggcaagtgaggatctgctgaaggagcattatgtcgacttaaaagaccgaccattctttgcgggtctcgtgaagtacatgcattccggccccgtagtcgccatggtgtgggaaggcctgaacgtggtcaagaccgggagagtgatgttgggtgagacaaatccagccgatagcaagccgggaaccattcgaggagacttttgcatccaagtcggaaggaccatggcaaacctggagaggacatttatagcaatcaagcccgatggggtccagaggggtttggttggagaaattatcaaacgcttcgaacagaagggatttcggctagtggccatgaaatttctgagggcttctgaagagcatttgaagcaacactacattgaccttaaggaccgtccctttttccccggactggttaaatacatgaactctggccccgtcgtggccatggtgtgggaaggcttgaatgtggtgaagactggaagagtgatgctgggcgaaaccaaccctgctgacagcaaacccggaaccatcagaggcgacttttgtatccaggtggggagaaacattattcatggctcagactcagtgaaaagcgctgaaaaagaaatatccctttggttcaagccagaggagctggtcgactataagagctgtgcacatgactgggtgtacgagtag

SEQ ID NO: 24882 - DNA, 492 bp, synthetic construct
  source 1..492: mol_type = other DNA; note = Synthetic coding sequence
atgaagagcagccagaccttcgaggagcagaccgagtgcatcgtgaatacactcttaatggacttcctgagtccaactctgcaggtggcatcaagaaatctctgttgtgtcgatgaggtggacagtggagagccttgtagcttcgacgtggctattattgccgggcggttgagaatgctgggcgatcagtttaatggcgagctggaagcctctgctaaaaacgtgatcgctgagacgatcaaaggacagaccggggctattcttcaggatacggtggagagcttgtctaagacctggtgtgcgcaagactcttctttggcttacgaacgggcttttcttgctgtgtccgtgaaactcttggagtatatggcccatatcgcacccgaggtggtggggcaggtagccatccctatgactggcatgatcaatggcaaccaagcaatccgggaatttattcaagggcagggaggctgggaaaacctagaaagctag

SEQ ID NO: 24883 - DNA, 558 bp, synthetic construct
  source 1..558: mol_type = other DNA; note = Synthetic coding sequence
atgggcaagaagcagaacaagaagaaggtggaggaggtgctggaggaggaggaagaggagtacgttgtagagaaggtgttggacagacgagtggtcaaggggaaagtcgaatatcttctcaaatggaaaggattctccgacgaggataacacttgggaaccggaggagaatctcgactgccccgacctgattgccgagtttcttcagtcccaaaagaccgcacacgagactgacaaaagcgagggaggaaaacgtaaagctgacagcgactcggaggacaaaggagaggagtccaaacccaagaaaaaaaaagaagagtccgagaagccgcgcggatttgcacggggcctggaacccgagagaatcataggcgccaccgactccagcggggagctgatgttcctcatgaagtggaagaacagtgatgaagccgacctggtccctgcaaaggaagccaacgttaagtgtccccaggtcgtgatctcattctacgaagagaggctgacttggcactcttatccttctgaagacgatgacaagaaggatgataagaactag

SEQ ID NO: 24884 - DNA, 1350 bp, synthetic construct
  source 1..1350: mol_type = other DNA; note = Synthetic coding sequence
atgatgctgggcaccgagggcggcgagggcttcgtggtgaaggtgcggggactcccatggagctgttccgctgacgaggtgcagcgattcttctccgattgcaaaattcagaatggcgcccaaggcatcaggtttatatacaccagagagggacgcccctccggtgaagcctttgtcgaactggaatccgaagacgaagttaaactggcactgaagaaggacagagagaccatgggacaccggtacgtagaagtgtttaaatctaacaacgtggaaatggactgggtgctgaaacatacgggacctaactctcccgacaccgccaatgatggctttgtgcgcctgcgcggcctgcctttcgggtgctccaaggaggagattgtgcagttttttagtggcttggaaatagtccctaacgggatcaccctgccagttgactttcaaggacggtcaacaggtgaagcgttcgtgcagttcgcatctcaagagatagctgaaaaggctctgaaaaagcacaaggaacgaatcgggcatagatatattgaaattttcaagtcaagcagagctgaggtaagaacccattatgatcccccgcgcaaacttatggctatgcaaagacctggcccctacgataggccgggtgccggaagaggctacaatagtattggcagaggtgcaggttttgagaggatgcggaggggcgcgtacggcggcgggtacggcggttacgacgattataacgggtacaatgatggctacgggttcgggtcagatcgctttggccgagacctgaactactgtttttctggaatgtccgatcaccggtacggcgacggcgggtctaccttccagtcaacaaccggccattgtgtgcatatgaggggcctgccctatcgggccaccgaaaacgatatctacaatttcttttcgcccctgaatcctgtgagggtgcacattgaaatcggacccgatggaagagtaactggtgaggctgacgtcgagttcgccacccacgaggatgctgtcgccgcaatgtcaaaagacaaagcgaatatgcaacataggtacgtcgagctcttcttgaattccactgccggagcgtccggcggcgcgtacgaacaccggtacgttgaactctttcttaactcaacagcaggggcgtccgggggggcgtatggatcacagatgatgggaggcatgggactatcaaatcagtcctcttatgggggccctgcatcacagcagctgagtggcggatatgggggagggtatggaggacaatcatctatgtccggctatgatcaggttttgcaggagaactcttccgacttccagtctaacattgcctag

SEQ ID NO: 24885 - DNA, 741 bp, synthetic construct
  source 1..741: mol_type = other DNA; note = Synthetic coding sequence
atgagcggcgccggcgaggccctggcccccggccccgtgggcccccaaagggtcgccgaagctggcggaggacagctgggatccaccgcccagggcaagtgcgacaaagacaacacggaaaaagacatcacacaggctaccaatagccacttcacccacggagagatgcaagatcaaagcatttgggggaatcccagcgacggcgagttgatcaggacacagccacagcgcttaccacagctccagacatcagctcaagtgccgtctggcgaagaaatcggcaaaatcaagaatggccacaccgggctctccaacggaaatggcattcatcacggtgctaaacacggcagtgcagataataggaagctgtccgcgcctgtgagtcagaaaatgcatcgcaagatacagtctagcctttcagtcaattctgacataagcaagaagtccaaagttaacgcagtgttttctcaaaagactggtagctcgcccgaggactgttgtgtgcactgcatcctcgcctgcttattctgtgagttccttaccctgtgcaacatagtgcttggtcaagcttcgtgcggtatctgtacctcggaggcatgttgttgctgttgcggggatgaaatgggagatgattgcaattgtccgtgtgacatggattgtggcataatggacgcatgctgcgaaagttctgactgtcttgaaatctgtatggagtgctgcggaatatgctttcccagctag

SEQ ID NO: 24886 - DNA, 30 bp, synthetic construct
  source 1..30: mol_type = other DNA; note = Synthetic coding sequence
atgagctactaccagcggcccttcagctag

SEQ ID NO: 24887 - DNA, 2001 bp, synthetic construct
  source 1..2001: mol_type = other DNA; note = Synthetic coding sequence
atgaacaccggccgggacagccagagccccgacagcgccaagggcttccgctcggtgaggccaaatttgcaggacaagaggtctcctactcaaagtcagatcaccgtaaatggcaactctggtggcgctgtatcaccaatgagctattatcagcgaccgttctcgccttctgcctactctctaccagcgagcctgaactctagtatcgtgatgcagcacggcacctccctcgatagtaccgacacttatccgcagcacgctcagtccctggatggcacaaccagcagtagcattccgctgtacaggagttccgaagaagagaagagagtgactgtcatcaaagccccccactaccccggcattggaccagtcgatgaatctggaatccccaccgccatcaggacgaccgttgatagacctaaggactggtataagaccatgttcaaacagatacacatggtgcacaaaccggacgacgataccgacatgtataataccccttacacctacaatgctgggctatacaatccaccgtactcagctcagtctcatcctgctgcaaagacccagacatataggcccttaagcaagtctcatagtgacaacagtcctaacgcgttcaaggatgcctcctcacccgttccaccaccccatgtgcctccaccagtacctccacttcgcccaagagatagaagttcgactgaaaaacacgattgggatccccctgaccggaaagtggacacacgcaaattcagatccgagccccggtcaatctttgaatacgagcctggtaaatcttcaatcttacagcacgaacgacctacagatagaatcaatccagacgacattgatctcgaaaacgagccctggtacaaatttttctcagaacttgaatttggtcgacctccacctaaaaaacccttggactacgtgcaggaccactcctccggggtgtttaacgaggcaagtctgtatcagagcagcattgatagaagtctggagagacccatgagcagcgcgtccatggcctctgacttccgcaaacggcgcaagagcgaacccgctgtagggcctcccagagggttaggggaccaatccgcatcgcgtaccagtccagggagggtggacttaccaggaagttcaaccaccttaaccaagagcttcacgtcctctagcccttctagtccatcccgtgcaaaagatcgcgagagccctcggtcttattcttccaccctaacagacatgggacgctccgcaccccgtgaaaggcgggggacgcccgaaaaggagaaattgcccgccaaagcagtgtacgatttcaaggcccaaacatctaaggaactaagcttcaagaagggcgataccgtgtatatcctcaggaagattgatcagaactggtacgaaggtgaacaccacggacgcgtaggaattttccccatctcttacgtagagaaactgacccctccagaaaaggcacagccagcccgacctccaccacccgcccagccaggtgaaatcggtgaagcaattgccaaatacaatttcaatgctgatacaaatgtagagttgagcttaaggaagggagatagagtgatcctactgaaaagagtggatcagaactggtatgaagggaagattccaggtaccaatcggcaagggatttttcccgtgtcctatgtggaggttgtaaagaagaacaccaagggggctgaagactatccagatccacccatcccccattcctacagttctgataggatacactcactatcatccaataagcctcaaagaccagtgtttacacatgagaatattcagggcgggggagagcctttccaggccttgtacaactatacaccaaggaatgaggacgaattggagctccgggagagtgatgtgatcgatgtgatggagaaatgcgatgacggttggtttgtcggcacatctcggagaaccaagttttttgggacttttcccggaaattatgtaaaacggctgtag

SEQ ID NO: 24888 - DNA, 2472 bp, synthetic construct
  source 1..2472: mol_type = other DNA; note = Synthetic coding sequence
atgaccctgctgagcagccagagcagcagcctggtggcccccagcggatcggtctccgccgagaacccagagcagaggatgctggaaaagcgcgcaaaggtgattgaggaactactccagacagaaagagattatataagagatttggagatgtgtattgagcgtatcatggtgcccatgcagcaagcccaggtgccaaatatagatttcgaagggttatttggcaacatgcaaatggtcataaaggtgagtaagcaactgttagctgccctcgagataagcgacgccgtgggccctgtgtttctgggacatagagatgagttagaagggacctataaaatttactgtcagaaccacgatgaggctattgccctgctcgagatttatgaaaaggacgagaagatccagaaacatctccaggacagcctcgccgatttgaactctctagtgttgaagaagggatgtaccaattacataaacttgggttcttttttaatcaaacctgttcagcgcgtgatgcggtatccactgctgttaatggaactgctgaattcaactcctgagtcacacccagacaaggtcccactcaccaatgccgtcttagcagtgaaagaaatcaacgtgaatataaacgagtacaaacggcgcaaagacttggtgctcaagtatcgcaaaggggatgaagattctctgatggagaagatttctaaactgaatatccattccattattaagaagagcaatagagtgagttcccaccttaagcatctgaccgggttcgcaccacagatcaaagatgaggttttcgaagaaactgagaagaattttcggatgcaagaaagactgatcaagtcctttattcgagacctgtctctgtatctccagcacattcgagaaagtgcctgcgtgaaggtcgtggccgcagtctccatgtgggatgtctgcatggagcggggccatagggatctcgaacagttcgaacgcgtccatagatatatttccgatcagctttttaccaacttcaaggaacgaactgagcggctggtaatttctcctctgaaccagctcctgtccatgttcaccggaccccataagctggtgcagaaaagatttgacaaactactggacttctacaattgcacagagagagcagaaaagctgaaggacaaaaagactctcgaggagctacagagcgcccgaaacaattatgaagcacttaatgcccagttactcgacgagctgccgaagtttcaccaatatgcgcaaggcctgtttacaaactgcgtgcatggatatgccgaggcacactgtgacttcgtgcatcaagctttggaacaactgaaaccgctcctgtccctcctgaaagtcgccggtcgggaaggcaacctcattgcaatctttcacgaagagcactcccgggtgctccagcagctgcaggtgtttaccttcttcccggaaagcctccctgctacaaagaaaccatttgagaggaaaacaatagatcggcagagtgcacgtaaacccttgcttggccttcctagttacatgctgcagagtgaagaactgagagcatcgttgctcgcacggtatcctcctgaaaagctcttccaggcggagagaaactttaacgccgcacaggacctggacgtctccctgttggagggcgatctggttggtgtcataaaaaagaaggatcccatgggatcccagaatcgctggctcatcgataacggagtgaccaagggcttcgtctacagttctttcctgaagccttacaatccaagacgctcccactctgatgcttcggtgggcagccacagtagtacagaaagcgaacatggaagcagtagtccgagatttcccaggcaaaattcggggtctacactgaccttcaatccaagctcaatggccgttagttttacttctgggtcatgccagaagcagccccaggatgcctcacctcctccgaaggagtgtgaccagggaactctgagcgctagcctgaacccttcaaactctgaatcctccccaagtcgttgcccctcagatcctgactccacaagccagccaagatccggggattcggcggacgtcgctagagatgttaaacagcctaccgcaacgccacggagttatcggaatttcagacaccctgagatcgtcggctactccgttccggggagaaatggccagtcacaggacctggtgaaaggatgcgcccgcacggctcaagccccggaggatcgttctacagaaccggatggtagtgaagcagaaggaaaccaggtgtattttgcagtttacacctttaaggcccggaatcctaacgagctgtctgttagtgccaaccaaaagcttaaaattttggagttcaaggatgttactggtaatacagagtggtggttggctgaagtgaacggaaagaaagggtatgtgccctccaactatatccggaaaaccgaatatacatag

SEQ ID NO: 24889 - DNA, 2964 bp, synthetic construct
  source 1..2964: mol_type = other DNA; note = Synthetic coding sequence
atggccgagagcagcagcgagagcgaccacttccggtgccgggaccggctgagtccctgggccgcccgtagtacccatcggggcaccaggagtctacctaccgtggaggtgaccgaaaaggtcaataccatcacttcaacgctacaggatacttcccggaaccttagacaggttgaccagatgctgggccggtatagggagtactcaaatggccaagccggggccatcgagcacttgaaggaaagtctggagcaatctatagatcagctgcgaagtcagagactgctgagaaatagtgggggacgcagcatctccgtgaccagcctgtcagcttccgatctcgatggcgggaccggttccgagctacaccatttcccccccactagccctcttaaagactacggggacccccaaggaatcaaacgaatgaggtctcggaccggcgttagattcgtacaggagacagacgacatgacacagctgcacggcttccatcagtcacttagggacctctcttctgagcagattaggcttggcgatgacttcaatagagagctgtcacgccgctctaggagtgacgctgagactaaacgcgccctggaggaactgaccgaaaaacttaacgaggcccagaaacaggaagtagtatccgaccgggtggagagaaggttacaggaactggaacgcgagatgaggacagaaagagaactagtagaaagacggcaagatcaactcggcctgatgtcgctccagctccaggaggccctaaaaaagcaagaggcgaaagcggatgaacacgagggggctataaagaataaactgaggcagaccgaaaccgaaaaaaatcagctcgagcaggaactcgagctatcacgtaggttgctcaaccagtccgaagggtcccgcgaaaccctactccatcaagtagaagaactcagaacccagctcacaaaggcagaaggcgaccggaaaggccttcaacaccaggtgtctcaaattagcaaacagcaatcgaactatcaggacgaacagggcgaggactggaggtttcgtcggggggtggaacgggagaaacaggatctggagaaacaaatgagcgaccttcgtgtgcagcttaatttttcagcaatggctagcgagctggaggaggttaagcgctgcatggagcgcaaagacaaggagaaggcccaccttgcttcccaagtggaaaatttgaccagagagctggagaacggcgagaaacagcagctccaaatgcttgaccgcttgaaagagattcaaaaccactttgatacgtgcgaggcggagagaaaacacgccgacctgcaaatttccgaactaacccggcatgccgaggatgccaccaaacaggccgagaggtatctcagcgaacttcagcaatctgaggcactgaaggaggaggctgagaagagacgggaggatttgaagctgaaagctcaggagtcaatcagacagtggaaattaaaacacaagaaacttgagagagccttggagaagcagtctgaaacagttgatgaactgaccggcaagaataaccagatactgaaggagaaggacgagcttaagacccagctgtacgcagctctccagcaaattgagaatctacgaaaggaactgaatgatgtactgaccaaaagagccttgcaggaggaagagcttcactctaaagaggagaagctacgggacatcaagagccaccaggctgacttagagctggaagtcaaaaacagccttgacaccatccatagactggagtctgaacttaagaaacagtccaaaattcagtcacagatgaaagtggagaaggctcacttagaggaggagatcgcggaactcaagaagagtcaggctcaggacaaggctaagctacttgagatgcaagagtccatcaaggacctctctgcaatacgggcagatctggccaacaaactcgccgaggaggagcgcgccaaaaaagccgtccttaaggatctgagcgacctcactgcccaggccaagtctcgagacgaagagaccgcaacgataatcacccagctgaagctggagagagatgtgcatcagcgtgaattgaaggacctcacctcctccctacagagcgtgaaaacgaaacacgaacaaaatattcaagagctgatgaaacatttcaagaaggagaaatccgaagcagaaaatcacatccggacacttaaggcagaatcactcgaagagaagaatatggctaagatacaccgcggccagctggagaaactgaaatcacagtgcgatcgtttgacagaagagctgacccagaacgagaatgaaaataagaaattgaagcttaaataccagtgtctgaaagaccagttggaggaaagggagaaacacattagtatcgaagaggagcacctccggcgaatggaagaggctcgattgcagcttaaggaccagcttctgtgtctcgaaacagaacaggaatccattttgggggtgatagggaaagagatagacgctgcatgcaagacattctctaaagactctgtggaaaaactgaaagttttttcctccggaccagacatacattacgatccccaccgatggctggcagaatccaaaaccaaattgcagtggctgtgtgaggagctgaaggaacgtgagaaccgcgaaaaaaatttgcggcaccagctgatgctgtgtagacagcagctgcgaaatctgacagaaaacaaggagtccgagctccaatgcctgttccaacaaattgagcgccaggagcagctgctcgatgagatccatcgcgaaaagcgcgacctgctggaagaaactcagaggaaagacgaggagatggggagtcttcaggacagggtgattgccctggagaccagcacacaggtcgctctcgatcaccttgagtccgttccagagaagcttagccttctggaagacttcaaagattttagacgatag

SEQ ID NO: 24890 - DNA, 5157 bp, synthetic construct
  source 1..5157: mol_type = other DNA; note = Synthetic coding sequence
atgagcggcaccagcagccccgaggccgtgaagaagctgctggagaatatgcagtcagatctgcgggcgctctccttggagtgcaagaaaaaatttccccccgtcaaggaggcggcagagagcggcattataaaggttaaaactattgccgcccggaacaccgagatactggccgccctgaaagagaacagtagtgaggtagtccaaccattcctcatgggatgtggcacaaaggaaccaaaaatcactcaactatgtctggctgctattcagcgcctcatgagtcatgaggttgtgagcgaaactgcagctgggaacataatcaacatgctgtggcagctgatggagaactccctcgaagagctgaaactccttcagactgtattagttctgcttaccacgaataccgtggtgcacgacgaagccctctctaaagcaatcgttctctgctttagactgcacttcacaaaagataatatcacaaacaacacagccgccgctactgtgcggcaggtcgtgacagttgttttcgaaaggatggtggcggaggacgaacgccaccgggatatcattgagcagcccgtgctagtgcagggtaatagcaaccgaaggagcgtgtctactcttaaaccatgtgccaaagatgcctacatgctcttccaagatctgtgccagttagtaaacgcggatgccccctactggctcgtggggatgactgaaatgacgaggacctttggcttagagttactggaatcagtgctgaatgatttcccccaggtcttcttacagcatcaggaattcagttttttgttgaaggaacgcgtctgccccctggtgatcaaattattcagcccaaacatcaagttccgtcagggatcttctacatcctcgtcacctgcaccagtcgagaagccatacttccctatctgtatgagactgctgagggtcgtgagcgtcctgatcaaacagttttacagcctgttggtcaccgaatgcgagatattcttgtctcttcttgtgaaattcctagacgccgacaagccgcagtggttgagggctgtggctgtggaatctatccatcgtttctgcgtccagccacagctgcttagatctttttgccagtcttatgatatgaagcaacatagcaccaaagtttttcgggatattgttaatgccctaggtagcttcatacagtctctgttcctcgttccccctacaggaaacccagccacgtccaatcaagctggcaacaacaatctgggcggttctgtctccgcccccgcaaattcgggcatggtgggcatcggtggcggggtaacactcctgcctgccttcgaatatcgcggcacctggatccctatcctgaccatcacagtgcaggggtcggcaaaggctacttatttggagatgctggacaaggttgaaccacctaccatccccgaagggtatgctatgtctgtcgcctttcactgtcttctggacctggtgaggggcattacaagtatgatcgagggggagctcggggagcttgagacagaatgccagaccacgactgaagagggctccagtcctacccagtccacagagcagcaggatttgcagtctacgtccgaccagatggataaagagatagtgagtagagccgtgtgggaggaaatggtaaatgcctgctggtgcggcctactagccgctctgtccctgctcctggacgcctcaacagacgaggccgctaccgagaatatattaaaagcagagcttacgatggcagcgctgtgcggacgtctgggcctcgtgacctctcgggacgctttcatcaccgccatctgcaaggggtctttgcccccacactatgccctcacagtgcttaacaccactaccgccgctaccctgagtaacaagtcatactccgttcagggtcagtccgtgatgatgatctctcccagctctgagtcccatcagcaggtcgtggccgtggggcagcctctggcagtgcagccacagggcacagtcatgcttacaagcaaaaacattcaatgtatgcgaacattactgaatctggcccactgtcatggcgccgtactcggcacctcctggcaactggttctggccactctccagcatctagtatggatcctgggactaaaaccctccagcggcggggccctgaaaccgggtcgggccgtggaggggcccagtactgtgttgactacagcggtgatgaccgatctgcctgtcatatcgaacatcctttcaaggttgttcgagagcagccagtatctggatgatgtctccctgcatcacttgattaatgctctctgttcattaagccttgaggcgatggacatggcctacggtaacaataaagaaccttcgctgtttgcagtggccaagctcctggagactggactggtgaacatgcaccgcatagagatcctctggagaccccttactggacacctgctggagaaggtttgccagcatcccaatagtcggatgcgtgaatggggggctgaggctctgaccagcttgattaaggccggcctgacgtttaatcatgaccctcccctcagccaaaaccagcggttgcagctgcttctattgaacccactgaaggaaatgagtaacatcaatcatcccgatattcgcctgaagcagcttgaatgtgtgttgcagattttgcagtctcagggtgattcactgggccctggctggccactggtccttggggtgatgggcgcaatccgtaatgaccaaggagagtcgctgataagaacagcatttcagtgtcttcagctggtggtcaccgattttctccctactatgccttgcacctgtctgcaaatcgttgtggacgtggctggctcgtttgggctccataaccaggagttaaatatcagccttaccagtatcggtttgctctggaatatttccgactacttcttccagagaggagagaccattgaaaaggagctgaacaaagaagaggctgcacagcagaaacaggctgaggagaaaggagtcgtattgaatcgccctttccaccccgccccccccttcgactgcctgtggctgtgcctttacgctaagcttggcgagctttgtgtcgacccccgcccggctgttaggaagtcagccggtcagaccctcttttcaacaattggggctcacggcaccttattgcagcactctacttggcacactgtcatttggaaggtcctttttcatctgctggaccgcgtcagagaatcgtcgacaaccgccgataaggagaagatcgagagcgggggtggcaacattcttatccatcatagcagagacactgcagaaaaacagtgggctgagacttgggtgcttacactggcgggcgtggcccggatcttcaacacaaggaggtacctgcttcagccactgggggatttcagccgtgcctgggacgtgttgctggatcacatccagagcgcagccctgtccaaaaataatgaagtctcacttgcggcgctgaaaagtttccaagaaatcctccagattgtctccccggtgcgggacagtgataagccagagacaccaccggttgtgaacgttccggttcccgtcttaatcggaccaatcagcgggatgagccgaccctttgtgcgcacggacagtataggcgaaaagctcggccggtattcctcaagcgaacccccaattgtgaccgacgagctagaggatctcaacctgtggtgggccgcctggaacacgtggtacaggatcgggagtgaaagtaccaaacccccgattacattcgataagctgaccttcattcccagtcaaccctttctcacagcactgatacagatcttccccgcactgtaccagcacattaaaacagggtttaacatggacgatttacagaagctgggagtgatcctacactctgctatcagtgtgccaatctcctctgatgccagcccctttatattgccaagctacactgaggccgtgctgacgtcactgcaagaagcagtcttaaccgcgctggatgtcttacaaaaggctatttgtgtggggcctgaaaatatgcaaatcatgtatcccgccattttcgatcaactgctcgcctttgtggaattcagctgcaagccacctcaatacggccagctggagacgaagcatatcgccaatgctaagtacaaccagattcagcttttcgccccggctgagtgggtggccctcaactatgtaccctttgctgagcgcagcctggaagtggtagtcgacctgtaccaaaagacagcgtgtcataaagctgtggtaaacgaaaaagtgcttcagaacatcatcaaaactctcagagtgcctctcagcctgaagtacagctgtcctagtgagtccacttggaaattggctgtctctagcctcctccgagtgctgagtataggcctgcccgttgctcggcagcatgccagctccggtaaattcgattctatgtggcctgagctggccaataccttcgaagactttttattcaccaaatctattcctcccgacaacctgtccattcaggaattccagaggaatgagaatatcgacgtggaagttgttcagctcatctctaacgaaatcctgccctatgcaaactttatcccaaaagagttcgtgggtcaaataatgaccatgcttaataagggctccattcactcacagtcttctagttttactgaggctgagattgatatccgattacgcgaggagttctccaagatgtgtttcgaaacactcttgcagtttagcttttccaacaaggtgaccaccccccaggaaggctatatctctcggatggccctctcggtcctgcttaaacgcagccaggatgtcctacatagatatattgaagacgaacgtctcagtggtaagtgtcctctgccaaggcaacaggttactgaaattatcttcgtgttaaaggcagtgtcgaccttgatagactcccttaagaagacccaaccagagaacgtggacggtaatacgtgggcacaggtgatcgcgctgtatcccacactcgtggaatgtataacttgctcctccagtgaggtctgtagcgccctgaaggaagctctcgtgccatttaaggactttatgcagccccctgccagtcgggttcagaacggcgagtcctag

SEQ ID NO: 24891 - DNA, 2100 bp, synthetic construct
  source 1..2100: mol_type = other DNA; note = Synthetic coding sequence
atgagcagccggaaggtgctggccatccaggcccggaagcggcggcctaagcgagagaagcaccctaagaaaccggagccccagcagaaagcgccactcgtgcctcctcccccacctcctcctccacctcctcctccgcccttgcccgatccgacgccccctgagccagaggaggagatactaggaagcgacgacgaagagcaggaggatcctgcggactattgtaaaggtggctatcaccccgtgaagataggcgacttgtttaacggtagataccatgtgatcaggaagttgggctggggccatttcagcactgtttggctgtgctgggatatgcagggtaaacgatttgtcgccatgaaggtggtgaagtccgcacagcactatactgagactgctctagacgaaatcaagctgctcaagtgcgttagagaaagcgatccaagcgatccgaacaaagacatggtcgttcagcttatcgacgacttcaagatcagcggaatgaatggaatccatgtctgcatggtgtttgaagtgctcgggcatcacctgctgaaatggataataaagtcaaattaccaaggcttgcctgtgcggtgcgtcaagagcatcattaggcaagtgctgcagggcctggattatctgcactcaaaatgtaaaatcatccacaccgacatcaaacccgaaaacatcctcatgtgcgtggacgatgcctacgttcggagaatggccgcagaggctactgaatggcagaaagctggagcacctcctccaagtgggagtgctgtgtccactgccccccagcagaagcctatcggcaaaatatctaaaaataagaaaaagaagttgaaaaagaaacaaaagagacaggcggagctccttgagaaacgattacaagagatcgaagagctcgagagggaggcagaacgcaagattattgaggagaacattaccagcgctgcaccctctaatgaccaggatggggaatattgcccagaggtgaagctgaaaactaccggcctagaagaagccgcagaggctgagacagccaaagataacggggaggccgaggatcaggaggagaaagaggacgctgaaaaagaaaatatcgagaaagatgaggatgacgtggaccaggagctcgccaatatcgaccccacctggatcgagtctcctaagacaaacgggcatattgagaatggacccttttccctggaacagcagcttgacgacgaagatgacgatgaggaggactgccctaatcctgaggaatataacctggacgaaccaaatgctgaatcagactatacctattccagctcctatgagcagtttaacggcgagttgcccaatggtcggcacaagatcccagagagccagtttccagagttttcaacatccctgttctccggcagtctggaacctgttgcttgtggatcggtgctctccgaggggtcacctttgactgaacaggaagaaagctctccttcccatgaccgatccaggaccgttagcgccagtagtactggtgacctcccaaaagccaagactcgggcggctgacctgctggttaatccgctggatcccaggaatgcagataaaatccgggttaagattgccgatctcggcaacgcatgttgggtgcacaaacacttcaccgaggatatccagacccggcagtaccgctccatcgaagtgctgatcggtgccggatactctacaccagcagacatttggtccacagcttgtatggcattcgaactggccaccggggactatctcttcgaaccacattcaggtgaggactattctagagacgaggaccatatagcccacattatcgaattgttagggtctattccacgacattttgcattgagcggaaagtactctagagaatttttcaacaggaggggagagttgcggcacatcactaaactgaagccctggtcactcttcgacgtcctcgtggagaagtacggttggccgcacgaagatgctgcacagttcactgactttttgatccccatgctcgagatggtacctgagaagagagcttccgccggagagtgcctgcgccatccttggttgaacagctag

SEQ ID NO: 24892 - DNA, 1113 bp, synthetic construct
  source 1..1113: mol_type = other DNA; note = Synthetic coding sequence
atgggcttcaaccggcccagcaagatccaggagaacgccctgcccctcatgcttgccgaaccacctcagaatctaatagctcagtctcagagtggaacaggcaagaccgcagctttcgtgttagccatgctaagtcaggttgaacctgcaaacaaataccctcagtgcctctgcctgtccccgacctatgagctggccctgcaaaccggaaaagtgatcgaacaaatgggaaaattttaccctgaactgaaattagcctacgcggttagaggtaataaactcgagcgcgggcagaaaattagcgaacagattgtgatagggacaccaggtacagtgttagactggtgctcgaagctcaagttcatagatccaaagaaaataaaggtgtttgtgctcgatgaggctgacgtgatgatagccacgcagggacatcaggaccagagcattcgcatacagcgcatgttaccgaggaactgtcagatgcttctctttagtgccaccttcgaggacagcgtgtggaaattcgctcagaaggttgtgcccgacccaaacgtaattaaattgaaaagagaggaggaaacgctcgatactattaaacaatactatgtgttgtgctccagcagagatgagaaatttcaggccctgtgtaatctatatggggctattacaattgcgcaagcgatgattttctgccacacaaggaagacggcaagctggctggctgctgagctgtctaaagagggccatcaggttgcactcttatccggggaaatgatggtggagcagcgggcagcggtgatagagaggtttcgagagggcaaagaaaaggtgctcgtgacaaccaacgtatgtgccagaggaattgacgtcgagcaagtttccgttgtgattaattttgatcttccggtggacaaggatggaaacccggataatgagacctatctgcataggatcggccgaaccggcagattcggtaagcggggactggccgttaacatggttgattccaagcactccatgaatatcctgaaccgaatacaggagcacttcaataagaagatcgagcgtctggacactgacgacttggacgaaattgagaaaatcgccaattag

SEQ ID NO: 24893 - DNA, 2640 bp, synthetic construct
  source 1..2640: mol_type = other DNA; note = Synthetic coding sequence
atgttctggaagttcgacctgcacagcagcagccacatcgacacccttcttgaacgcgaggacgtgaccctgaaggaactgatggacgaggaagacgtgctgcaggagtgcaaggcccagaaccgcaaactgatcgaatttcttctgaaagcggaatgtttggaggatttagtgtcctttattatcgaagagccgcctcaggacatggacgagaagatccgctacaagtatccaaatattagctgcgaactcttaacaagtgatgtttcacagatgaatgatcgattgggtgaagatgagagcttactcatgaagctctattcattcttacttaacgacagcccactgaatcccctactcgctagttttttcagcaaggtgttaagcattctgattagcagaaaacccgagcagatcgtagacttcctgaagaaaaagcacgattttgtagacctcatcataaaacacattggaacctccgcaattatggatctgctgctgcgtctcctcacctgtatcgagcccccccagcctaggcaggatgtgctcaactggctgaacgaagagaaaatcattcaaaggctcgtcgaaatagtgcaccccagtcaggaggaggacaggcactcaaacgcctcacagagcctgtgtgagatcgttcgcctgtcgcgggatcagatgctgcagatacagaattccaccgagccagacccattgctggccacactggaaaaacaggagatcattgaacagctacttagtaatatcttccacaaagaaaaaaacgaaagcgcaatcgtgagcgcaatccagatcttgttgactcttctcgaaacgaggcgcccaaccttcgagggacacatagagatttgtccgcctggcatgagccattctgcctgttccgtgaacaagagcgtcctggaagccattcgagggcgcttaggctcatttcacgagctactccttgaaccgcctaagaaaagtgtgatgaaaaccacttggggcgttctcgatcccccggttgggaacaccagattgaacgtgatcagattaatctcgtccctgttacaaaccaatacctcctcaattaatggagaccttatggaattgaatagcatcggcgtgatactgaatatgttctttaagtacacatggaacaactttcttcacactcaagtcgagatctgcatcgcactaattttggcgagccctttcgagaacaccgagaatgctactattacagaccaggactccaccggagacaatctgttacttaaacatctgttccagaagtgtcagctcatagaaagaatccttgaggcctgggagatgaacgagaagaaacaggctgagggggggagaagacacggctacatgggccatctgacacgcatagctaactgcatcgtccactccaccgataagggacccaactccgcgctagtccaacaattgatcaaggaccttcccgatgaagttcgggagcggtgggaaacattttgtactagttcccttggagaaaccaacaaacgcaatacagtggatctcgtgacaacctgtcatatccactcttccagcgatgacgaaattgacttcaaggagactgggttctctcaggacagcagcctgcagcaagcgttctctgactaccagatgcagcagatgacaagcaactttattgatcagtttgggttcaacgatgagaagttcgccgatcaggatgatatcggaaatgtatctttcgaccgggtgagcgatataaacttcaccctcaatacaaatgaatctggaaacatcgctctgttcgaagcctgttgcaaggagaggatacagcagttcgatgatgggggttctgatgaagaggacatctgggaggaaaagcacatcgccttcacaccagagagccagcgtcgctcatcatccggctctaccgactcagaggagagtaccgatagtgaagaagaagacggcgctaagcaagacctcttcgagccaagtagtgccaacacagaagacaaaatggaagtcgacctttctgagcctccaaactggtctgctaattttgatgtgccaatggaaaccacccacggtgcaccgctggattccgtgggttccgacgtttggtctactgaggagcccatgcctaccaaagaaaccgggtgggcctctttttcagagtttacatcatctcttagcaccaaggatagcctgcgtagtaactcacccgtggaaatggagacaagcactgaaccaatggaccccctcactccctctgcggcagctctcgcggtccagcccgaggcagccggctcagtggccatggaggccagcagcgacggtgaggaagatgcggaaagcaccgataaagttaccgaaactgttatgaacggaggaatgaaggaaactttgtccctgacggtggatgccaaaacggaaaccgctgtgtttaagagactcctcggcggctgcagtgaagagggcaagctgtctaccagccaagatgccgcgtgcaaggacgccgaggagtgtccggagaccgcagaagccaagtgcgcagctcctcgtcccccaagtagcagtcccgagcagagaactggacagccatcggctccaggagatactagcgtgaatggccccgtgtag

SEQ ID NO: 24894 - DNA, 2622 bp, synthetic construct
  source 1..2622: mol_type = other DNA; note = Synthetic coding sequence
atgttctggaagttcgacctgcacagcagcagccacatcgacaccttgctcgagcgtgaggacgttaccttgaaggaactgatggacgaagaggacgtgcttcaggaatgcaaagctcagaatagaaaactaatagaattccttctgaaggctgagtgtctggaagatcttgtgtcatttattatcgaagaacccccccaggacatggatgagaagatccgctataagtaccccaacatttcttgcgaactgctgacctccgacgtgagtcagatgaatgaccggcttggcgaagacgagagcctcctgatgaaactgtactcttttctgctgaatgacagccctttgaatcctctgctggcttccttcttctccaaagttctgagcatccttataagccgcaagccagagcaaattgttgacttccttaagaagaaacatgattttgtcgacctcatcattaaacatattgggaccagcgcaatcatggatttgctcctgagacttctgacatgcattgagcccccacaaccccgccaagacgtgttgaactggttgaacgaagagaagattatccagcgcctagtcgagatcgtgcacccttcacaggaagaagacaggcacagtaacgcgtcccaaagcctctgcgagattgtccgcctgtctcgcgaccaaatgttgcaaatccagaatagtacagagcccgatccccttctcgctactttagaaaagcaggaaattattgagcaactgctgtcgaatatttttcacaaagaaaaaaacgagagcgccattgtaagcgctatccagatcctgttgacactgctagaaacccgcagacctacctttgagggacacatcgagatctgtcctccaggaatgagccacagcgcatgctctgtgaataagtcagtgctagaggcgatcaggggacgattgggctcattccatgaactgttgttggagcctccaaagaaaagcgtaatgaaaaccacgtggggcgtactggaccccccggttggcaataccagactgaacgtgatccgcttaatttcaagtctgctgcagaccaatacttcttctatcaacggggacctcatggagctgaacagtatcggcgtgatattgaacatgttcttcaagtatacatggaacaatttccttcatacgcaggtggagatatgtatcgcactcattctggcgagccctttcgagaataccgaaaacgcaaccattacagaccaagatagtacaggtgataacctcctactgaagcacctgttccagaagtgccagctcattgagcgaatcctcgaggcctgggaaatgaacgagaagaaacaggcagaaggagggcgccggcacggctacatgggccacctgaccaggatcgcaaactgtatcgtccattcaacggacaagggaccaaactctgccctcgtccagcagctgatcaaggacttgccagatgaggtgcgggagcgctgggagaccttttgcacgagcagtttgggggagaccaacaaacgtaataccgtagatcttgtgactacttgccacatccactcatcttcagatgatgagatcgactttaaagaaaccggcttctcccaggactcatccctacagcaggccttcagcgactatcagatgcagcagatgacttccaattttatcgaccagtttgggttcaacgatgagaaattcgctgatcaggacgacatcggaaacgtgtcttttgatcgggttagtgatatcaattttaccctcaacactaatgagtccggtaacattgctctctttgaagcgtgctgcaaggagcgcattcagcaattcgatgacggagggagcgatgaggaagatatctgggaagagaagcacatcgcatttacaccagagagccagcggagatctagcagtggctccactgactccgaagaaagcacagatagcgaggaagaggatggagccaagcaggacctgttcgagccttcttcagcgaacaccgaggataaaatggaggtcgatctctcagaacccccaaactggtctgccaacttcgatgtccccatggagactacacatggcgctcccttagactcagtcggttcggacgtgtggagcactgaagaacccatgcccacaaaggaaactggctgggcgtccttctccgagttcacctcgtccctctcaactaaggactccctgcgctcaaatagccctgtcgaaatggaaacaagtacagagccaatggaccctctgacgccaagcgcagctgccctcgccgtccagcccgaggctgccggttctgtggcaatggaggcttcatccgatggggaggaagatgcggaatcaaccgataaagtgaccgagaccgtcatgaatggaggaatgaaggaaactttgtctcttaccgtcgacgctaagacagagacagccgtctttaagtctgaggaaggcaaactgagcactagtcaggatgctgcatgcaaagatgctgaggagtgccccgagacagcagaggctaagtgtgcagccccacgtcccccctctagctcccctgagcaacggaccggacaaccatccgcccctggcgacacctccgtgaatggtcccgtgtag

SEQ ID NO: 24895 - DNA, 2640 bp, synthetic construct
  source 1..2640: mol_type = other DNA; note = Synthetic coding sequence
atgttctggaagttcgacctgcacagcagcagccacatcgacaccctcctggagcgagaagacgtgactttaaaggagctgatggacgaggaagatgttcttcaggaatgtaaagcacaaaaccgtaaactcatagaattcctgctcaaagccgagtgtctggaagaccttgtctcttttattatcgaggagccccctcaggacatggacgaaaaaatccgatataaatacccaaacatttcctgcgagctgctgacttcagacgtttctcagatgaacgatagactcggggaagatgagtctctgctgatgaaattgtactcttttctgctcaatgactcacccctcaacccattgttggcttccttcttcagcaaggtgctgagtatcctgatctctcggaaaccggaacagattgtcgatttcctgaaaaaaaagcatgattttgtggacctgatcatcaaacatattggcactagtgctataatggatctcctcctccgactcctgacatgtattgagccacctcagccaaggcaggacgtcctaaattggctgaatgaggagaagattattcaacgactcgtggagatcgtccatccgagccaagaagaggacaggcattcaaacgccagccagtctctctgtgagattgtacgcttgtccagagaccaaatgctgcaaattcagaattcgaccgaacctgatccgctgctcgcgactctcgagaagcaggagatcatcgagcagttactgtcgaacatttttcataaagagaagaacgaaagcgccattgttagcgcaatccagatactgctgaccttattggagacccggcgaccaactttcgaagggcatattgaaatatgtccccccggcatgtctcacagtgcctgcagcgttaacaaaagcgtccttgaggccatacggggccgcctcggctcctttcatgagctgctgctggaaccgccgaaaaagagtgtgatgaagaccacctggggagtcttggatccccccgtgggaaatactcggctcaatgtgatcaggcttatatccagtctgcttcagaccaacacaagctctatcaacggcgacctgatggaacttaattcaattggcgttattctcaatatgtttttcaaatacacctggaataactttctgcacacccaggtcgaaatttgcattgctctgattctcgctagcccctttgagaatacggaaaatgccacgatcactgaccaggactccacaggcgacaacctgctcttaaagcatctgtttcagaagtgtcaactgattgaacgtatcctggaagcatgggagatgaacgagaaaaaacaggctgaggggggtagacgccacggctacatggggcatctgacacgtattgcgaactgcatcgttcattcaacggataaaggccctaattccgccctcgttcagcagctcattaaggatttgcctgatgaggtacgcgaaaggtgggagactttctgcacatctagcctgggggagactaacaagcgaaacaccgtcgatctggtgacaacctgccatatccattcgagcagcgacgatgaaattgacttcaaggagaccgggttcagccaagacagctccctccaacaagcttttagcgactaccagatgcaacagatgacctcaaacttcattgatcaattcggttttaatgacgagaaatttgccgatcaggacgacattgggaatgtgtcctttgaccgggtgtctgatattaattttacgttgaatacaaacgagtccgggaatattgccttattcgaggcttgttgcaaggaacggatccagcagtttgacgacggagggtccgatgaagaggacatctgggaggaaaaacacatagctttcacacccgagtctcagagaagatctagcagcggttcaacagacagcgaggagagtacagattcggaagaggaggacggcgctaagcaggatctatttgagccttcatcagccaacaccgaagacaagatggaggtcgatctgagcgagcctccgaattggtccgccaatttcgatgtgcctatggaaacaactcatggcgcgccactggattcagtgggcagtgacgtgtggtccaccgaagaacctatgccaaccaaagaaaccggctgggccagcttctctgagtttacctcatcactgtctactaaggactcccttcgcagcaactctccagtggagatggagacctctacggagccaatggatccattgactccatccgccgccgccctggccgtccaacccgaagcggcgggttcagttgccatggaagcctcttctgacggcgaagaagacgcagagtcaactgacaaggtgactgagaccgtcatgaacgggggcatgaaggagacactttctttaacggtagacgccaagacggagacagccgtgttcaaaagagttctgaagtcgtatagggaggaaggcaaactgtccacctctcaggacgccgcatgcaaagacgccgaagagtgtccagaaaccgctgaagccaagtgtgcagccccacgccccccatcctcctctcctgagcagcgcactggccagcccagcgccccaggggacacaagtgtaaatgggccagtgtag

SEQ ID NO: 24896 - DNA, 1134 bp, synthetic construct
  source 1..1134: mol_type = other DNA; note = Synthetic coding sequence
atgagcgacgaggtgttcagcaccaccctggcctacaccaagagccctaaggtgacaaagaggactacttttcaagacgaacttatccgggctatcaccgctcggtccgcacgacagcgctcctccgagtactcagatgacttcgatagcgacgaaatcgtgagcctcggtgatttctcagacaccagtgccgatgagaactccgtaaataagaaaatgaacgacttccatattagcgatgacgaggaaaaaaacccgtcaaaactgctcttcctcaagacaaataagagtaatggaaatatcaccaaggatgagcccgtatgtgctataaaaaatgaggaggagatggctcccgatgggtgtgaggacatcgtcgtgaaaagcttttcagaaagccagaacaaggatgaggaatttgagaaggacaaaattaagatgaagccgaagccgcgaatcctgtcaattaaatcgacgtctagcgcggagaacaattccctcgatactgacgatcactttaagcctagtcctagaccacgcagcatgttaaaaaaaaagagccacatggaggaaaaggacggtctggaggacaaagagacagcgctttctgaggaactggagctgcactctgcaccttcaagcctacctaccccaaacggtattcaattggaggcagagaagaaggctttcagcgaaaacctggaccccgaagacagctgcctcacaagcctggcttcaagctccctgaagcaaatattgggggattcattttcacctggatctgaggggaatgcatctgggaaagatcccaatgaggagattaccgaaaaccacaacagcctgaagagcgatgaaaataaggagaacagctttagcgccgatcacgtcacgacagcagtcgaaaagtccaaagagtcccaagtgacagcagacgatctggaggaggagaaagcaaaagctgaattaataatggatgatgacagaacagtggaccccctactctccaagtcccaaagcattctgatctccaccagcgctaccgccagctccaagaagaccattgaagatagaaacattaaaaataagaaatctacgaataatcgagcatcgtcggcgagcgcctcgaaggcctcttag

SEQ ID NO: 24897 - DNA, 576 bp, synthetic construct
  source 1..576: mol_type = other DNA; note = Synthetic coding sequence
atgggcaagagctgcaaggtggtggtgtgcggccaggccagcgtgggaaaaacctcaatcctggagcagcttttgtatggaaatcacgtggtaggaagtgaaatgatcgagacacaagaggacatttatgtggggtcgattgagaccgaccggggcgtgcgggaacaggtaagattctatgatactagaggactaagggatggagccgagctgccacgccactgtttctcatgcaccgacgggtatgtccttgtatattctaccgattccagggaaagcttccagcgggttgaactcttaaagaaggagatcgataagagtaaggacaagaaggaggtgacgatagtcgtcctggggaacaaatgtgaccttcaagagcagcgccgagtcgaccccgatgtggcacagcactgggctaagtcagagaaagtgaagttgtgggaggtttccgtggcagatcgaagaagccttctagaaccttttgtctacctcgcctcaaaaatgactcagcctcagtccaagagcgccttccccctctccagaaagaataaggggtccggctctctcgatggatag

SEQ ID NO: 24898 - DNA, 576 bp, synthetic construct
  source 1..576: mol_type = other DNA; note = Synthetic coding sequence
atgggcaagagctgcaaggtggtggtgtgcggccaggccagcgtgggaaagacctccattcttgagcagttattgtacggaaaccatgtggtgggctcggagatgatcgagactcaagaagacatctacgtgggctcgatcgagactgaccggggagtgagagagcaggtccggttctatgacactcgggggcttagagacggcgcggagctgccgagacattgcttcagctgtactgacggatacgtcctcgtttacagcaccgactcccgtgaatcctttcagcgggtggagctcctcaaaaaagagattgacaagtcaaaggacaagaaggaggtgaccattgtagtgctgggtaacaaatgcgatctgcaggaacagagacgagttgacccagatgtggcccagcactgggccaagagtgagaaagtgaagttgtgggaagttagtgtggccgatagaaggtctctgctggaacccttcgtgtacctggcgagtaagatgacccagccacaatccaagagtgccttccccctgtctaggaaaaacaaaggctcgggaagtcttgacggctag

SEQ ID NO: 24899 - DNA, 570 bp, synthetic construct
  source 1..570: mol_type = other DNA; note = Synthetic coding sequence
atgggcaagagctgcaaggtggtggtgtgcggccaggccagcgtgggaaagactagcattctcgagcaattgttgtacggaaaccacgttgtcgcaatgatcgaaacacaggaagatatctatgtcggctcaatagagaccgaccgcggggttcgtgaacaggtgcggttttacgatacacggggattgagagatggagcagaactgccccgccactgcttctcgtgtacggacggatacgtcttagtctattcgacagactcccgcgaatcctttcagagggtggagctgctgaagaaagaaatagataagtctaaagacaaaaaggaggtcaccatcgttgtgcttggaaataaatgcgatctccaggaacagaggagggtggaccccgatgtggcacagcattgggcaaaatcagaaaaggtcaagctgtgggaggtgagtgtggccgataggaggagcctgctagagccattcgtttacctggccagcaaaatgacccagccgcagtccaagtctgcttttcccctgtccaggaagaacaaaggctcaggctccctggacggctag

SEQ ID NO: 24900 - DNA, 576 bp, synthetic construct
  source 1..576: mol_type = other DNA; note = Synthetic coding sequence
atgggcaagagctgcaaggtggtggtgtgcggccaggccagcgtgggtaagacaagtattctggagcaactcttatatggcaaccacgttgtcggaagcgagatgatagagacacaggaggatatttacgtgggatcaattgagactgacagaggtgttcgggagcaggtgcggttctatgatacgaggggcctccgagacggtgcggagcttccgcgtcactgcttttcatgcaccgacgggtatgtgttggtttacagtacagattctcgcgagtccttccagagagtagagttattaaaaaaggagatcgacaagagcaaggacaaaaaagaggtgacaattgtcgtgttaggcaacaagtgcgacctgcaagagcaaagacgcgtcgaccccgatgtggctcaacactgggccaagtccgagaaagtcaaactctgggaggtgtcagttgccgaccggaggtcactgcttgaacccttcgtctatctggcctcaaagatgacccagcctcagtctaagagtgcctttcctctctctagaaaaaataaaggctccggctcattggatggctag

SEQ ID NO: 24901 - DNA, 1005 bp, synthetic construct
  source 1..1005: mol_type = other DNA; note = Synthetic coding sequence
atggccgaggaggtgcggcgggaggaggccagcggcgtgggccgggcacggacacccacacctggagctttgcgggcgccccagttggtgaccgaggcccctccactgcatcctgggcatactctgatgaaagcgacagtgctgatgagacagccgggccgagtgcaagagattgtcggtgccttgaggaagggaggaggcgacagactccaggtaatatcagatttcgatatgaccctgtcaagatttgcatataatggtaaacgatgtccctccagttacaacatcttggataactcgaaaatcatctctgaggaatgccgcaaggagttgaccgctcttctacaccattattaccccatagagatcgatcctcaccgaaccgtgaaagaaaagctgcctcacatggttgaatggtggacaaaagctcacaacctgctgtgtcagcagaagatccagaaatttcagatagcccaggttgtaagggaatccaacgcaatgctgagagaagggtacaaaactttcttcaatacactctatcataacaacatcccgctcttcatctttagtgctggcatcggtgacattttggaggaaataatcaggcagatgaaagtgttccaccccaacattcatattgtcagcaattacatggacttcaacgaagatggctttctgcagggctttaagggccagctgatccatacatataataagaattccagcgcctgcgaaaatagcggttactttcagcagctcgaggggaaaactaacgtgattctcctgggagattccattggtgatctgacaatggccgatggggtccctggtgtgcagaacatccttaagattggcttcctcaatgacaaggtagaggaacgacgagaacggtacatggactcctatgacatagttttggagaaggacgagacattagatgtcgttaatggactactacaacacatcctgtgccaaggggtgcaattggaaatgcagggcccatag

SEQ ID NO: 24902 - DNA, 531 bp, synthetic construct
  source 1..531: mol_type = other DNA; note = Synthetic coding sequence
atggccgccagcaccgacatggccggcctggaggagagcttccggaagttcgcaattcacggcgatcctaaagcctcaggccaggagatgaacggcaaaaactgggccaagctgtgcaaggattgtaaagtcgccgacggaaaatctgtgacgggcacagatgtagatattgtgttctcgaaggttaaaggcaagtctgccagggtgatcaactatgaagagttcaagaaggctctcgaggagttagccaccaagagattcaagggaaaaagtaaagaagaagctttcgacgccatttgtcagttggttgcgggaaaggaacccgccaatgttggagtgactaaggccaaaacaggcggagccgtggataggctgaccgatacttcccgatataccggctcacacaaagagagattcgacgaatccgggaagggcaaaggtatagctggccgccaggacatcttggacgattctgggtatgtgtccgcttataagaacgcaggtacttacgacgctaaagtcaaaaaatag

SEQ ID NO: 24903 - DNA, 912 bp, synthetic construct
  source 1..912: mol_type = other DNA; note = Synthetic coding sequence
atggacagcctgcccgacgagttcttcgtgcggcaccccgccgtggaggatcagagaaaggaagagaccgagaataaactggagaagtcatcaggccaactgaacaagcaggagaacgacatccctactgatttggtcccggtcaacctgctcttagaggtgaaaaagcttctgaacgccatcaataccctcccaaaaggcgttgtcccacatattaagaagttcctgcaggaggatttcagtttccagaccatgcaacgggaggtggccgctaactcacagaatggtgaggagattgtacctgctttaactttgcgatttctaattacacagttggaagctgccctgcgaaatatacaagcaggtaactatacagcccaccaaataaacataggctactacctgacactcttgttcctttacggggtcgcgctgaccgagagggggaagaaggaggactacacggaggctgagaacaagttccttgtcatgaaaatgatgatacaggaaaatgagatctgcgagaatttcatgtccctcgtctatttcgggagagggttgctgcgctgtgcccagaagcgatataacggcggcctcttggagtttcacaagtctctccaggagatcggtgataaaaatgaccactggttcgacattgaccctactgaggatgaagatctgcctaccactttcaaagacctcctgaataatttcataaaaacaaccgagtcgaatattatgaagcagaccatatgttcttatttggactgtgaacgtagttgcgaggcagacatcctgaaaaacacaagctataaaggattcttccagttgatgtgttccaaaagttgttgtgtttatttccacaagatctgttggaaaaagttcaagaacttgaaatatccaggtttctag

SEQ ID NO: 24904 - DNA, 1869 bp, synthetic construct
  source 1..1869: mol_type = other DNA; note = Synthetic coding sequence
atggacctgctgacccgggagaacgtggccctgaaggtggagagcgcccagcaaccaaagcaggtgctcaagatggaggtcgccgtcctaaaaaagctccaggggaaggaccacgtgtgcaggttcatcggctgtgggcggaatgaaaaattcaattatgtggtaatgcagttgcagggcaggaacctggctgacctgcggagatcccagccgaggggaacgttcacactcagtactacactgcgactcggcaaacaaatcctcgaaagtattgaagctatccattccgtgggattccttcaccgggatatcaaacctagtaattttgctatggggcgcttgccttctacatacaggaaatgttacatgttggactttggcttagctagacagtataccaacactacaggcgacgtgcggccaccccgcaacgtcgcagggtttagagggaccgtgcggtatgcctctgtgaatgctcataaaaatcgggaaatgggacgccatgacgacttatggtccttattctatatgctagtggaatttgccgttggccaattaccctggaggaaaattaaggataaggagcaggtgggaatgattaaagagaagtacgaacataggatgttgcttaagcacatgccttccgagtttcatctatttctcgaccatatcgcctcactggattacttcactaagccggactaccagttaatcatgagtgtgtttgagaatagtatgaaagaaaggggcatcgctgaaaatgaggcttttgattgggagaaggctggcacagacgccttgctgtcaaccagtactagtacccctccacagcagaacacaaggcagaccgctgccatgtttggcgtggttaacgtgacacctgtccccggtgacctcctgcgggagaacaccgaggacgtcctgcagggggaacacctgagtgatcaggagaacgcccccccaatactgcctggccggccctctgaagggctgggtccatcccctcatcttgtgcctcaccccggtggcccggaagccgaggtctgggaggagactgatgtgaataggaacaaacttcgcatcaacatcgggaagtccccgtgcgtggaggaagagcagtctcggggaatgggcgtcccctcgagcccagtgcgtgcgcctcccgattctcctacaacacccgttcggagcctcaggtaccgcagagtgaattctccagagagcgagcgtctgtctacagccgacggtagagtcgaattacctgagaggaggtctaggatggaccttcctggcagcccttctagacaggcatgtagcagccagcccgcacagatgctgtccgttgatactggccacgccgataggcaggcaagcggccgtatggatgtatctgcctctgtggagcaggaagcactatccaacgcattcagaagcgtgccgctggcagaggaggaggactttgactccaaagagtgggtgataatcgacaaagagacagaactaaaagacttcccccctggcgccgagcctagcacatctggcacgacagacgaagagcccgaggaattgcggcctctgccagaagagggtgaagaacgccgacgcttaggcgccgagccgccatttccgttgacgccagcactggggactccaccctctacggagcgcgtagggccacacaggcccacagaaactgtcgggggtggccagaccctcggcgcacttccgcccgccgttcagccccctgccactactggagtgctgcgcgtcctcctccttcatgccggtgacggcgccttaccgtccccacggcgcaggcggctattgggtctcctgaggttccctcactctgctcagccactgggatag

SEQ ID NO: 24905 - DNA, 447 bp, synthetic construct
  source 1..447: mol_type = other DNA; note = Synthetic coding sequence
atggccgccgccatggtgcccggccggagcgagagctgggagcggggagaaccaggccgcccagcgctctatttttgcggctccattaggggcggacgcgaggaccgcactttgtacgagcgcattgtgtctaggctccgccgctttggtacggtcctcactgagcacgtggctgccgccgaactgggggccaggggcgaagaggccgccggaggcgaccggctaattcacgagcaggacttggaatggttacagcaagcggatgtcgtcgtggctgaagtcacacagcccagtttaggtgtcgggtatgaactcggaagagccgtggcattcaacaaacggatcctgtgcctttttcgaccacagagcggtaggggagaacaccccaagcccccaagctggctatctatggaccctgcactaagcagctttccaggaggactgtag

SEQ ID NO: 24906 - DNA, 606 bp, synthetic construct
  source 1..606: mol_type = other DNA; note = Synthetic coding sequence
atggtgaacagctgctgcggcagcgtgtgcagcgaccagggctgcggtctcgagaactgttgcagaccatcctgctgccaaacaacctgttgtcggaccacctgctgcaggccatcttgctgtgtcagctcttgctgtcggcctcaatgttgccagtctgtttgttgtcaaccgacatgctgtagaccttcttgctgtcagactacctgctgcagaactacatgctgcaggccctcctgctgtgtgagtagctgctgtcgccctcaatgctgccagtctgtgtgctgccaacccacatgctgccgccccagctgctgtcaaacgacatgttgccgcaccacctgctgtaggcctagctgctgcgtgagctcttgttgtcggccccagtgttgtcagagtgtgtgctgccaacccacatgctgtaggccaagctgttgtatatcgagctcatgttgcccatcctgctgtgaaagcagttgttgccggccatgttgctgccttcggccggtgtgcggtcgcgtctcgtgtcatactacctgctatcggccaacgtgcgtcatcagcacatgtcctagaccattgtgttgtgcctctagctgttgttag

SEQ ID NO: 24907 - DNA, 387 bp, synthetic construct
  source 1..387: mol_type = other DNA; note = Synthetic coding sequence
atgaccggcagctgctgcggcagcaccctgagcagcctgagctacggcggtgggtgttgccaaccctgctgctgtcgagacccctgttgttgtcgtcctgtaacatgccagacaaccgtgtgtcgcccggtgacatgtgtgccacgatgtacccgtccgatttgtgagccatgcaggcgccccgtgtgctgcgatccgtgttctctgcaggaaggttgctgtcgcccaatcacttgctgcccctcttcatgtactgccgtcgtatgtcgaccttgctgctgggccactacctgttgtcagccagtatccgtgcagtctccatgttgccgccccccatgcggccagcctaccccttgtagcaccacgtgccgcacttcttcctgttag

SEQ ID NO: 24908 - DNA, 1140 bp, synthetic construct
  source 1..1140: mol_type = other DNA; note = Synthetic coding sequence
atgagcctgcggctgagcagcgccagccggcggagctgcccccggcccacaacgggaagtctccggctatatggaggtggaacaagtttcggtacaggcaactcctgcggcatctctggaatcggatctggcttctcgtcagccttcgggggctcttcatccggaggcaataccggtgggggaaatccttgcgccggattcaccgtgaacgagcggggcctgctgagcggcaatgagaaagtcactatgcagaaccttaatgatcgcttggcctcttatttggatagtgtacatgccctcgaggaggccaacgccgatctggagcagaaaattaagggttggtatgaaaagttcgggccagggagttgccgagggctggatcacgactacagtcgctactttcctattatcgacgatctgaagaatcagattattgcctctacaacctctaatgcaaacgcggtgttgcaaatcgataacgctcgcctaactgcagatgatttccggctgaaatatgagaacgagctggccctgcatcagtcggtagaagcagatgtgaatggactccgtcgcgtgcttgatgagattacactctgtcggacagacctcgagatccagtatgaaaccttgagcgaggagatgacgtaccttaagaaaaatcacaaggaagaaatgcaggttctgcagtgtgcagccggaggcaacgtaaatgtggagatcgagcttcagagcctgctggcaaccaaacattcacttgagtgttctctgaccgaaacagaaagcaactattgtgctcagttggcccagatccaggcacagattggagctctggaagagcagctgcaccaagtgcgcaccgaaacagagggacagaagctcgagtacgagcaattactggacataaagctccaccttgaaaaggaaattgagacctattgcttgctaattggtggcgacgacggcgcttgtaaatcgggaggctataaaagcaaggattacggctccgggaacgtgggttctcaagtgaaggacccagctaaagcaatcgttgtgaaaaaggtactcgaggaggtcgaccagagaagcaagatcctgactactcgattacactcacttgaggaaaagtcccagtcgaactag

SEQ ID NO: 24909 - DNA, 768 bp, synthetic construct
  source 1..768: mol_type = other DNA; note = Synthetic coding sequence
atggacaaggacgaggaggccctgaaggccgcccaggccgagctgaaggaagcgaggaggcagtggcaccatctccaggtggaaatagagtccctgcatgcggtagaacgcggtttggaaaattccctgcacgccagtgagcagcactaccagatgcagctacaggacttagaaaccgtaattgaaggtctggagaaggaactgcaggaagtgcggcgcggtatcgagaagcagctgcaggagcacgaaatgctgctgaacacaaagatgcgactggagcaggaaatcgctacctaccgccacctgctcgagaaggaagagattagatattacggctgtattcagggtgggaagaaggataaaaagccaaccactagccgtgtcggattcgttttgcccagcgcaataatcaacgagatctcttttacgactaaggttccacagaaatatgagaatgaaaacgtggagacggtcactaaacaggccatcttaaacggcagcatcgtcaaagagtcaactgaggctcacggaacaatacagaccgagaaggtcgacgaagttattaaggagtgggagggatccttctttaaggacaaccctagacttagaaaaaaaagcgtctctctccgctttgacctgcacctggccgccactgacgaaggctgtctggaaactaaacaggacaaccttcccgacattgaagtgagactgattatgaggaggtcctgttctattccaagcattaaaccccccagcacagcaaattag

SEQ ID NO: 24910 - DNA, 888 bp, synthetic construct
  source 1..888: mol_type = other DNA; note = Synthetic coding sequence
atggagctgagccagctgctgaacgagatccgggccaactacgagaaaattctaactagaaatcagatcgaaaccgtcctaagcactcgtatccagcttgaggaggatatctccaaaaagatggacaaggatgaagaggcactgaaagccgcacaggcggaactgaaagaggcccgtcggcagtggcaccacctccaggtcgaaatcgagtctctgcatgctgtcgaacgggggctggaaaacagcttgcatgccagtgagcagcactatcagatgcagctacaggacctggaaacagtgatagaaggattggagaaagagctgcaagaagtcaggcggggaatcgaaaagcagttgcaagagcatgagatgctgctcaatacaaaaatgcggctcgaacaagaaatcgcaacctacaggcatctgctagaaaaagaagaaataagatattatgggtgtatccaggggggaaagaaagataagaaaccaactacaagccgcgtggggttcgtgctcccatccgctataatcaacgaaatttcattcactactaaagtgccgcagaagtatgagaacgaaaacgtcgagacagttaccaagcaagctattctaaatgggtctatagtcaaggagagcactgaagctcacggcaccatccagacagagaaagtggatgaagttataaaggaatgggaaggttctttttttaaagacaatccaaggcttcgaaaaaaaagcgttagcctccgattcgatttacatctagccgcaaccgatgaaggatgcctggaaacaaaacaggataacttgccggatatcgaggtccgtctaataatgagacgttcctgctctatcccttctatcaagcctccgagcacagccaactag

SEQ ID NO: 24911 - DNA, 1860 bp, synthetic construct
  source 1..1860: mol_type = other DNA; note = Synthetic coding sequence
atgagcggcctggtgctgggccagcgggacgagcccgccggccacaggctgtcacaggaggaaatcttggggtccacccgacttgtttcgcaaggactcgaggcccttcgatcagagcatcaagcagtgctgcagtccctgtcacaaactatcgagtgtctgcagcaggggggccacgaggaggggcttgtgcacgagaaagcccgccagctcaggcggtccatggagaacattgagctgggcctgagcgaagctcaagtcatgctggctctggcctcccacctgtccacagtcgagagcgagaagcaaaagctacgcgcacaagtcagacggttatgccaagaaaatcaatggctaagggacgagctggctggtacacagcagcgactacagcggtcggaacaggccgtggctcaactcgaggaagagaagaaacacctcgagttcctcggacaactcagacagtatgatgaagatggccacacctctgaagaaaaagaaggggatgcaaccaaagattcactggatgacctgttccccaatgaggaggaggaggacccttccaacggcctgagcagagggcagggtgccaccgcagcccaacaaggtggttacgagattcccgcaaggctgcgcacgcttcacaacctcgtcatccaatatgctgcccaggggcgttatgaggtggccgtcccgctctgtaaacaggctctcgaggacctcgagcgaacctcaggtcggggccaccctgatgtcgctacaatgctcaacatcctagctctagtatatcgcgatcagaacaagtacaaagaggccgcccacctgctcaacgatgcactgtctattcgggagagcacactcggtcctgaccacccggccgttgccgctaccctgaacaacttagctgtgctgtatggcaagaggggaaaatataaagaagccgagcctttgtgtcagcgagcgttagaaattcgggagaaggttctcggtacgaatcatccagatgtcgccaagcaactgaataatctggccctcctttgccaaaaccagggcaaatacgaggccgtggaacgctactatcagcgggccctggcgatttacgaaggccagctggggccagacaaccccaacgtggcccgaaccaagaacaacctagcgtcatgttacctgaagcagggaaagtatgccgaggctgagacactgtataaagagattctgacgagggcccacgtgcaggagttcggtagcgtggacgacgaccacaagcccatatggatgcacgccgaggaacgcgaggagatgtcgaaaagccgtcaccatgaaggcggtacgccatatgccgagtacgggggctggtacaaggcatgtaaggttagttcgccaaccgtcaacactaccctgaggaatctgggggccttataccggcgacaaggcaaactggaggcagctgagactctggaagaatgtgcgcttcggtcacggagacagggcacagacccgatcagccaaactaaggtcgctgaactgctgggagaaagcgacggtcgaagaacatcacaggagggccccggcgacagcgtaaaatttgaaggcggcgaagacgcttccgtcgcagtggagtggagcggcgacggttccggcacgctgcagaggtcaggaagcctggggaagataagagatgtgctgcgccgatcctcagagttgcttgtaagaaaattgcaaggtacagagccccggccttcttcctccaatatgaagcgggccgcatctctaaattatttgaatcagccttctgcagccccgctgcaagtgtcacgggggttaagtgcgtctaccatggacctttcatctagcagctag

SEQ ID NO: 24912 - DNA, 1860 bp, synthetic construct
  source 1..1860: mol_type = other DNA; note = Synthetic coding sequence
atgagcggcctggtgctgggccagcgggacgagcccgccggccacaggctcagccaggaggaaattctggggtctacgcggctcgtcagccagggcttagaagcactgaggagcgagcatcaggcagtcctccagtcattgagccagaccattgagtgcctccagcaaggtgggcatgaggaaggcctggttcatgagaaagcaaggcagctacgacgatctatggagaatatcgagttggggttaagcgaagcgcaggttatgttggctctggcctctcacttgagtaccgttgagtctgagaaacagaaattacgcgcccaggtaagaagattatgtcaggaaaaccagtggcttcgcgacgaactggccggcacccagcagcggcttcagcgctccgagcaggcggtggctcagctagaagaggaaaaaaagcacctggaatttctaggtcagctgagacagtacgatgaagacggccacacatcagaggagaaggaaggtgatgctacaaaggactcactcgatgacctgttccctaacgaagaggaggaagatccctccaatggattatcacggggacagggcgctacagccgcacaacagggcggttatgagatacccgctaggcttcgcactctgcacaacctcgtgatccagtatgctgcgcaaggaagatacgaggttgcagtgcctctttgtaaacaggctctcgaggacttggagcgaacatccggccgcggacatcctgatgttgccacaatgttgaacattcttgccctagtgtaccgtgatcagaataaatataaggaggccgctcatctcctgaacgatgccctgagcatccgagagagcacgctgggaccggaccaccccgccgtagctgccacccttaacaacttagcagtgctttacggaaagagaggcaagtataaggaggcggagccactctgccaaagagccctagaaatccgcgaaaaagttctggggaccaaccaccccgatgtggctaagcagctgaacaacttggcactgctgtgccagaaccagggcaaatacgaggctgttgaaagatactatcagagggcgttagcaatttatgaaggacaacttgggcctgataatccaaacgtggcccgtacgaagaacaacctggcctcatgttatctgaagcagggcaaatacgccgaagcggagacactgtataaggagatcttaacccgagctcatgtacaagagttcgggtccgtcgacgatgaccataaacctatctggatgcatgctgaggagcgagaagagatgtcaaagagcagacatcacgagggagggactccgtatgcagagtatggtggctggtataaagcttgcaaagtaagttctcctacggtgaatacgaccctcaggaacctgggtgccctctatcggcggcaggggaaactggaggctgctgagaccctcgaggagtgtgctttgagaagcagaaggcagggcactgacccaatttcacagactaaggttgccgagttgctgggtgagtctgacggccggagaacgtcacaggaagggcctggggacagcgtcaagtttgaggggggagaggacgccagcgtcgctgtcgagtggagtggggacggctccgggacactccagaggtcaggcagtctcggcaagatccgggacgtgcttaggcgttctagcgagctcctggttcgcaagctccagggaaccgaacccaggcctagcagtagcaacatgaaacgcgcagcatctctcaactatctcaaccaaccatcggccgccccactccaggtaagcagaggactaagtgcctctaccatggatctgagctcaagcagctag

SEQ ID NO: 24913 - DNA, 1170 bp, synthetic construct
  source 1..1170: mol_type = other DNA; note = Synthetic coding sequence
atgctgcggtggaccgtgcacctggagggcggcccccggcgggtgaaccacgccgccgtcgcagtgggccacagagtctactcgtttgggggctactgttcaggagaagattacgaaacactcagacagattgacgtgcacattttcaatgccgtaagtttgaggtggaccaaactgccaccagtaaagtccgcaatccgggggcaggccccagttgtcccatatatgagatacggtcattcaactgttctgattgatgatacagtacttctctggggaggccgcaacgacacagaaggcgcttgcaatgtactctacgccttcgatgttaatactcataaatggttcacgcctagagtgagtggtactgtccctggcgcgcgggacggccactctgcatgcgtcctcggtaagatcatgtatatcttcggaggatatgaacaacaggctgattgtttctctaacgacatccacaaacttgacacttccaccatgacatggacactgatttgcactaagggttctccagcacgatggcgggactttcactctgcgaccatgctcggcagtcacatgtacgtattcggtggaagggccgaccggttcggaccattccatagcaacaatgagatttactgcaaccggattcgcgttttcgataccaggactgaggcatggctggactgtccacccaccccagttttgcccgagggtaggagatcacactccgcgttcgggtataatggcgagctgtatatattcggcggatataatgccagactcaaccgccactttcacgatctatggaagtttaatcctgtatctttcacttggaagaaaattgaacccaagggcaaaggcccctgccctcgcagacggcagtgctgttgcatagtgggggataagattgtgctgttcggaggtacttctccatctcccgaagaggggttgggggacgaattcgacctgatagaccattcagatctgcacattctagatttcagcccgtcacttaagacactctgcaagctcgccgttatccaatataacctagaccaaagttgtctgccccacgacatcaggtgggaattaaacgccatgacaacaaactccaatatctcaaggcctatcgtatcctctccctttgcatacccactgccatcagcctag

SEQ ID NO: 24914 - DNA, 549 bp, synthetic construct
  source 1..549: mol_type = other DNA; note = Synthetic coding sequence
atgcccatcccccccccccccccccccccccccggccccccccccccgccaacatttcatcaggccaacaccgaacagcctaaactgtcacgtgacgagcagcggggtcgtggggcgctgttacaagatatctgcaagggaaccaagctgaagaaggtgacaaacataaacgacagatcagccccaattttggaaacgccaccaccacctccacctgtgatccggaacggggctcgagacgcccccccccctccgccaccttaccgtatgcacggttctgaaccaccaagcagggggaagccaccgcccccaccctctcgcacaccggccggccctccaccgccaccgcccccaccactgcgcaacgggcacagggactctattaccacggtcaggtcatttctcgatgacttcgagagcaaatacagtttccatcccgtggaggatttccctgccccggaggaatacaagcatttccagcgtatctatccttcaaaaactaatcgcgccgctagaggggctccccccctgcctcccatcctacggtag

SEQ ID NO: 24915 - DNA, 831 bp, synthetic construct
  source 1..831: mol_type = other DNA; note = Synthetic coding sequence
atgaccagcttccggctggccctgatccagctgcagatcagcagcatcaagagtgataacgtaacgcgcgcatgctccttcataagggaggcagccacacagggagcaaaaatagtctctttacctgagtgttttaattcaccttatggcgccaaatacttccccgaatatgcagaaaaaatacccggagagtctacccagaaactctctgaggttgctaaagaatgctcaatatatctgattggaggtagcattcctgaagaggacgccggcaaactttacaatacttgcgcggtcttcggacccgatggaaccctgctggctaagtacagaaaaatacacttgtttgacattgacgtacccgggaagataactttccaggagtcaaaaacactatccccgggagattccttcagcactttcgacaccccttattgccgcgtcggcctcgggatctgctatgatatgcgttttgccgagctcgcccaaatctatgctcaacgaggatgccagctgctagtttatccaggagccttcaacctgaccacagggccagctcactgggaactgctccagcgcagcagggctgtggacaaccaggtgtatgtcgcaacagcaagtccggcacgggatgacaaggctagctacgttgcatgggggcacagcaccgttgtgaatccgtggggggaggtgctggcaaaggccgggacagaagaggccatagtttattctgacattgacctgaagaagctggctgagatacgccagcagatccctgttttccggcaaaagcgaagcgatctgtacgctgtcgagatgaaaaaaccttag

SEQ ID NO: 24916 - DNA, 1476 bp, synthetic construct
  source 1..1476: mol_type = other DNA; note = Synthetic coding sequence
atggaggagatccccgcccaggaggccgccggcagcccccgggtgcagttccagagtttggagacacaatccgaatgtctttctcctgagccgcaatttgttcaagatacagacatggagcagggacttacgggcgacggagagacccgagaagagaacaagctcctgataccgaaacagaaaatctctgaggaggtgcatagctacaaagtgagagtcgggcgcttgaaacatgatataacccaggtgccagaaaccagggaagtttataagagcgaagaccgcctagagcgactgcaggaaatcctgaggaagttcctatacctcgaacgcgaattccgccagatcacaatctcgaaggagacatttacatcggaaaagaacaatgagtgccatgagcctgagaagagtttctcactcgactctaccatcgatgctgatcaacgagttctcagaatccagaacaccgacgataacgataagtacgacatgtcctttaaccagaattccgcttcaggcaagcacgaacacctcaatttgacggaggacttccagagttcggagtgtaaagagagcctgatggatcttagccacctcaataaatgggagtctattcctaatactgagaaatcttataaatgcgacgtgtgtggtaagatttttcatcagtcaagcgccctcacccggcaccagcggattcatactagagagaaaccatacaaatgcaaggagtgcgaaaaaagttttagccaatccagcagcctgtcaagacataaaagaatccatactcgggaaaaaccatacaaatgtgaagcctccgacaagtcatgtgaggccagcgacaagagctgttcacctagctcaggaatcattcagcataagaaaattcacacccgagccaagagctacaagtgttcctcatgcgagagagtgttctcaaggtccgtgcaccttacccagcatcagaagatacacaaggagatgccatgcaagtgcacggtgtgcggctccgacttttgtcataccagctacttacttgaacatcaacgagtgcaccatgaagaaaaggcatacgaatatgacgaatatgggttggcgtatatcaagcagcagggcattcatttccgcgaaaagccctatacgtgcagcgaatgcggcaaagacttccggctcaattcccacctcatccagcaccaacgcatacacactggagagaaggcgcacgaatgcaatgaatgcggaaaggcttttagtcagacttcctgcctcattcagcaccataagatgcatcggaaagaaaaatcttatgaatgcaacgagtacgagggcagcttttcacactctagtgacctgatccttcagcaagaggtgttaacaaggcaaaaagcattcgactgcgacgtctgggaaaagaatagcagccagagggctcacctggtgcagcatcagagtatccacacgaaagagaacagttag

SEQ ID NO: 24917 - DNA, 1089 bp, synthetic construct
  source 1..1089: mol_type = other DNA; note = Synthetic coding sequence
atggcccacagcagcttcttccccgacgagtacttcacctgcagctcactttgtctgtcttgcggcgtgggatgcaagaagagtatgaatcacggcaaagaaggggtgccgcatgaggccaaatcaagatgtcgttattcacaccagtacgacaatagagtatacacctgtaaggcttgctacgagcggggcgaggaggtgagcgtggtgcctaagacctccgcatccacggactctccttggatgggactggccaaatatgcctggtctggctacgtgattgagtgtcccaattgcggtgttgtgtaccgttcccggcaatattggtttggtaaccaggacccagttgatactgtggtgcgcactgaaatcgtacacgtgtggcccgggactgacgggtttttaaaggacaataacaatgcagcccagcgactgctggacggtatgaactttatggcccagtcagtgtccgagttaagtcttggcccgacaaaagcagttacgtcctggctcactgaccaaatcgcccctgcttattggcgtccaaattcacagatcctgtcatgcaataaatgcgcgacctcatttaaggacaatgacactaaacatcactgtcgcgcttgtggagaagggttttgtgactcttgctccagtaaaactcgacccgtgcctgagaggggatggggacccgcccccgtgcgcgtctgcgataattgttacgaggcaaggaacgtgcagctggcggttactgaagctcaggtggatgatgaaggaggcactctgatcgctcggaaggttggagaggccgtccagaacactcttggtgcagtggtgacagcaatcgatattcccctcggcttagtgaaagatgcagccagacctgcctattgggtgcctgatcatgagatcctgcattgtcacaactgtcgtaaggagttcagcataaaactgagcaaacaccactgtcgggcctgcgggcagggtttctgcgacgaatgcagccacgatcgcagggccgtgccatcaagaggctgggaccatcctgttagggtgtgtttcaactgtaataagaaaccaggcgatttgtag

SEQ ID NO: 24918 - DNA, 348 bp, synthetic construct
  source 1..348: mol_type = other DNA; note = Synthetic coding sequence
atgagcggcgagcccggccagaccagcgtggcccccccccccgaggaggttgagcccggctctggcgtccgaattgtggtcgagtactgcgaaccctgtggattcgaagcaacctaccttgagctggcatctgccgttaaagaacaatatcctggaatcgaaattgaatccagactgggcgggacaggcgctttcgagatcgagattaacggccagttggtgttttcaaagttggaaaacggcggctttccttatgaaaaggaccttattgaggctatccgaagagccagtaacggcgagacccttgaaaagattacgaatagccgccccccatgcgttatcctctag

SEQ ID NO: 24919 - DNA, 507 bp, synthetic construct
  source 1..507: mol_type = other DNA; note = Synthetic coding sequence
atgctgttccggctgagcgagcacagcagccccgaggaggaggccagcccgcatcagagagcctccggagaggggcaccacctgaagagcaaaaggccgaatccatgtgcttacacgccacctagtctgaaagcagtccagcgcattgcagaaagccatctccaaagcatctccaacttgaacgagaatcaggctagcgaggaggaagatgagttgggtgagttgcgcgagctaggctatccaagggaggaggatgaggaggaggaggaggatgacgaggaagaggaagaggaggaagatagccaggcagaggtgcttaaggttattcgtcaatccgccgggcagaagacgacctgtggccagggtctggagggaccttgggaaaggccgcctcccttagatgagtcagaaagggacggcgggtccgaagaccaggtggaagatcccgctctgtccgagccaggggaggaaccccagaggcccagtccaagcgagcccgggacatag

SEQ ID NO: 24920 - DNA, 507 bp, synthetic construct
  source 1..507: mol_type = other DNA; note = Synthetic coding sequence
atgctgttccggctgagcgagcacagcagccccgaggaggaggcctcgccgcaccagagagcctcaggcgagggccaccaccttaagagtaagagaccaaatccgtgtgcctacaccccgccatcactgaaagcggtgcagagaatcgctgagtcccatctgcagtctattagtaatctcaacgaaaaccaagcctctgaagaggaagacgagctcggcgaacttcgcgaattaggataccccagggaggaggatgaggaggaagaggaagacgatgaagaagaggaagaggaagaggactcccaggctgaggtgctgaaagtcatcagacaatctgctggacagaaaactacttgtgggcaaggtctcgaggggccctgggagcggccacctcctttggacgagtccgaaagagacgggggttccgaggatcaggtggaggatccggcacttagcgaaccgggcgaagagccgcagcggccctcacccagtgagcccggcacctag

SEQ ID NO: 24921 - DNA, 648 bp, synthetic construct
  source 1..648: mol_type = other DNA; note = Synthetic coding sequence
atggaccccaaggaccggaagaagatccagttcagcgtgcccgccccaccctctcagctggatcctagacaggttgagatgattcgcagacgtcggcctactcccgccatgctgtttaggctctcagagcactcttccccagaagaggaggcctccccacaccaagtgacacctttgacctggcatttcccttggcagagggccagcggagagggtcatcatctcaagtccaagaggcctaacccgtgtgcctatacacctccatccttgaaggcggttcagcgtatagccgagtcccaccttcagagtatttccaacttaaacgagaaccaggcaagtgaggaagaagacgagctgggcgaactgagggagttaggatatccccgggaagaggatgaggaggaggaggaggacgatgaagaagaagaagaagaggaagattcccaggccgaggtactgaaggtgatccgccagagtgctggccagaagacgacctgtgggcagggtttggagggtccctgggagcgtcccccacctctcgacgagagcgagcgcgatggaggcagtgaagaccaggtcgaagacccagctctttccgaacccggtgaggaaccgcagagaccatctcctagtgaaccaggaacctag

SEQ ID NO: 24922 - DNA, 5169 bp, synthetic construct
  source 1..5169: mol_type = other DNA; note = Synthetic coding sequence
atggagagcaacttcaaccaggagggcgtgccccggcccagctacgtgttctctgctgatccaatcgctcgcccttctgaaataaacttcgacggaattaaattggacctgtcacacgaattttccttggtggcccccaataccgaggctaacagctttgagtctaaagactacctgcaggtgtgcctgaggattagacccttcacacagagcgagaaagagctcgaatcagaggggtgcgtgcacatactggacagtcagacagtggtgctgaaggagcctcaatgtatcctggggaggctctcagaaaaatcttccggccaaatggcgcagaagttctcctttagtaaggtgttcggtcctgctactacccagaaggagtttttccaggggtgtataatgcaaccagtaaaagacttgcttaagggacagtctcgccttatttttacttacggacttacaaacagtggcaagacatacacgtttcagggaaccgaggagaatattggcatactgccgcggactttaaatgtcctcttcgactcgctgcaggagcgtctttataccaaaatgaacctgaaacctcaccgctcaagagagtacctaagactcagcagcgagcaggaaaaagaggaaatagcttccaagtcagctttacttcgccagatcaaggaggtaaccgtgcacaacgactcggatgataccctttatggctctttaactaattctctgaatatctctgaatttgaggagtcaatcaaggattacgagcaagccaacttgaacatggcgaatagtataaagttctcagtctgggtctctttcttcgaaatctataatgagtacatctacgacctgtttgtacccgtcagtagcaagttccagaagagaaagatgcttcgcttatcccaggacgtgaaaggctactcttttattaaagacctgcagtggatacaggtgtctgacagcaaggaggcgtaccggctacttaaattagggatcaagcatcagtccgttgcatttacaaagttgaacaatgcatcttctcgttcacatagcatctttaccgtgaagatcctacagattgaagattccgaaatgtcgcgggtgattcgagtgtccgagctgagcctgtgcgacctggcaggtagtgagcggaccatgaagacccagaacgaaggagagaggttacgggagaccgggaatatcaatacttctctgctaaccctaggaaagtgtattaacgttctcaagaatagcgagaaatctaaattccagcaacacgtgccattccgcgaatcaaaacttacccactactttcagtctttctttaatggaaaggggaagatatgtatgattgtcaatatttctcagtgctatctagcctatgacgaaactctcaatgtgctgaagttttctgctatcgcccagaaggtctgcgtccccgacaccctcaactcgtctcaggaaaaattgttcggcccagtgaaatcctctcaggatgtctctctcgacagcaacagtaattctaagattctgaatgtgaagcgcgcaaccatcagctgggagaactcgttggaggatctcatggaggatgaagatctcgtggaggaattagagaacgccgaggaaacccaaaacgttgaaaccaagctgcttgatgaagatctggacaagactctcgaagaaaataaggcatttatttctcatgaggagaaacggaaactgctggatctgatcgaagatcttaagaagaaactgattaacgaaaagaaggagaagctcactctggagttcaaaatacgcgaagaggtgacccaggaatttacccaatattgggcccaaagggaagcagacttcaaggaaacccttctccaggaaagggagatcttggaagagaacgctgagcgccgtctggccatcttcaaggacctcgtagggaaatgcgataccagggaggaggctgctaaagatatttgtgctaccaaggtcgaaactgaagaaacacacaactatgttgggtttgaggacatcatcgattcacttcaggacaacgtggccgacatcaagaaacaggcagagattgcacatctgtacattgcctcactcccagatcctcaggaggctaccgcttgtctggaactgaaatttaaccagatcaaagcagaactggccaagacaaagggagaactgatcaaaaccaaggaggaactcaagaagagggagaatgagtccgattctctcatccaagagctagagaccagcaataagaaaatcattactcagaatcagcgtataaaggagctcataaatatcattgatcagaaggaggataccataaacgaatttcagaatctgaagtcccatatggagaacactttcaagtgtaatgacaaggccgacacttctagcttaatcatcaacaacaagttgatctgtaatgaaacagtagaggttccgaaggactcaaaaagtaaaatttgttcagagaggaagcgcgttaatgaaaacgagctccagcaggacgagccaccagcaaaaaagggttctattcacgtctccagcgcgattactgaggaccagaaaaagtctgaagaagtgcgtcccaacattgctgagattgaggatatacgggtcctacaggagaacaatgaaggcctgagagccttcctgctgaccattgaaaatgagctgaagaatgaaaaggaggagaaagctgaactcaataagcaaattgtgcactttcaacaggagctgtccttaagtgaaaaaaagaacctcacattaagcaaggaagtccagcagatccagagtaattacgatatcgcgattgctgagctccacgtgcagaagtctaaaaaccaggaacaagaggagaaaattatgaagctgtcgaatgagatagagacagcaacacggtctataacaaacaatgtttcacagattaaactgatgcatacgaaaatcgatgaacttaggaccttggattccgtgtctcaaatctctaacatcgaccttcttaaccttagagatctgagtaacggatcagaagaagacaacctccccaatacccagctggacctcctcggaaatgattatctggtgtcaaaacaggtaaaggaatataggatccaggagcccaaccgtgaaaacagcttccattcctcaatagaagctatttgggaggagtgtaaggaaatcgtcaaagcttcatcaaagaaatctcatcagattgaggaactggagcagcaaatcgaaaaactgcaggctgaggtgaaggggtataaggacgaaaataatcgtttgaaagaaaaagaacacaagaaccaggacgacttactcaaagagaaggaaacccttatccagcagctcaaagaggaactgcaggaaaaaaacgtgaccctagatgtacaaatccagcatgtggtagaagggaaacgcgctctatcggagctcacccagggagtgacgtgttacaaagcgaagatcaaagagctcgaaactattcttgagacacagaaggtggaatgcagccatagcgccaagctcgaacaggatattctggaaaaggagtcaattatcctgaagctggagcgcaatcttaaagagtttcaggagcatcttcaggacagcgtgaagaacaccaaggatctgaacgtcaaagaactgaaacttaaggaagaaattacccagctgacaaataatttgcaggacatgaagcaccttcttcagcttaaagaggaagaggaggagacaaatcgacaggaaactgaaaaactgaaagaagagctctctgcttcaagtgcacggacacagaacctgaaggccgatctacagaggaaggaagaggactacgcggacctgaaggaaaaactgacagacgccaagaagcagattaagcaggttcagaaagaagtgagtgtaatgagagacgaggataagctcctgcgaatcaagattaatgaactggaaaaaaaaaaaaatcagtgctcccaggaactggacatgaaacagagaacgatccagcagttgaaagaacagctcaataaccaaaaggtggaggaagcgattcaacaatacgaaagagcttgtaaggatctgaacgtgaaggagaagatcatcgaggatatgcggatgacattagaggagcaggagcagacccaagttgagcaggaccaggtgctcgaagccaaactggaagaagtggagagactggccacagaacttgagaaatggaaagagaagtgtaacgaccttgaaacgaagaacaatcagcgcagtaacaaagagcatgaaaacaacacagacgtgttgggcaagttgacgaacctgcaagatgagctgcaggagtcggagcaaaaatataacgccgacaggaagaagtggctggaggaaaaaatgatgctcattacacaggcaaaggaagcggagaatatccgcaataaggaaatgaagaagtacgcagaggaccgagagaggttttttaaacagcaaaacgaaatggaaattttaacagctcaactcacagagaaggacagcgatctgcagaaatggcgagaggagagagaccagctagtggccgcgcttgaaattcagcttaaagccctgatctcctctaacgtgcaaaaagataatgagatcgaacagttgaagcggatcatttccgagacatcaaagatcgagactcagattatggatattaagccgaaacgcatatctagtgctgatccggataaacttcagacagagcccctttcaacatccttcgagatttccaggaataagatcgaggacggcagcgtagtgctggattcctgtgaggtctctactgagaatgatcaatccacacggtttccgaagccggagctggagatccagtttacaccactacagcccaacaagatggcggtcaagcatccaggctgcacaacacctgtgactgtcaagattcccaaagctcgcaaaagaaaaagtaacgaaatggaggagtccgcctctcctcctccaaaggaatgctcctccagtccagccatggaacagtcctggaaagagaatgacttcgacaagttgcgcgaggagggctttaggaggagtaattatagcgagctacaggaagaaatccagaccaagggcaaggaggtggagaacttcgaaaagaacctggactag

SEQ ID NO: 24923 - DNA, 1215 bp, synthetic construct
  source 1..1215: mol_type = other DNA; note = Synthetic coding sequence
atgcggcgggacgtgaacggcgtgaccaagagccggttcgagatgtttagcaatagcgacgaggcggtgatcaataagaagcttccaaaagaattactgctaaggatattcagtttcttagacgttgtaaccctctgtcggtgcgcccaggtcagcagagcatggaacgtgctggctctcgacggttcaaactggcagcgtatcgacttgtttgactttcagcgcgatattgaggggagagtagtggaaaacatttctaagagatgcggtggtttcctgaggaagctgtctctacggggctgtcttggagtcggggataacgcactgcgaacttttgcccagaattgccgcaatattgaagtcctgaacttaaacggatgcacaaagactactgacgcagaaggatgtccactcctcgagcaactgaacatcagctggtgtgatcaggtcacaaaagacggaatccaggccttggtgcgcggctgcggcggtctcaaagccctatttctgaagggctgcacacagttggaggacgaagctctcaagtacatcggcgcccactgccccgagctggtgaccctgaacctccaaacgtgccttcagattaccgatgaaggcttaatcactatttgtcgtggttgccacaaactccaaagcttgtgtgcctcagggtgcagcaatatcactgacgccattctgaacgctctgggccagaactgccctaggctcagaatcttagaagttgcaaggtgctctcaattgaccgatgttggctttacaactctggccaggaactgccacgagttggagaagatggacctcgaagagtgcgtgcaaatcaccgatagcacactcatacagttgtcaatccattgccctcgactgcaggtgctgagtctaagccattgcgagttgatcactgacgatggaataaggcacttggggaacggcgcttgcgctcatgatcaactggaggtgatcgagctggataattgtccactgattaccgatgcctcacttgagcatctgaaaagctgtcatagccttgagaggatcgagctctacgactgccagcagatcactcgagctggcattaaacgcctgcggacacatttgccaaatattaaagtacacgcttatttcgcgcccgttacaccgcccccgtccgttggcgggagccgccagcgtttttgccgctgttgtattatcctgtag

SEQ ID NO: 24924 - DNA, 1251 bp, synthetic construct
  source 1..1251: mol_type = other DNA; note = Synthetic coding sequence
atggcccacagccccgtggccgtgcaggtgcccggcatgcagaacaatattgccgacccagaggagcttttcaccaaattggagaggatcggtaaaggctcatttggagaggtgttcaagggcattgacaacaggacccagcaagtggttgctatcaaaataattgacctggaagaagctgaggatgaaattgaggacatccagcaggagattacagtgctcagccagtgtgactcctcttatgtgactaagtactacggctcctacttgaaaggcagcaagctgtggattatcatggagtacttggggggcggctccgccttggatctgttacgggccgggccctttgatgagtttcagatagccaccatgctgaaggagatcttaaagggactggactatctccatagcgaaaagaagatccacagagacatcaaagccgctaacgtgctgttatccgaacagggggacgtaaagctggcggactttggagttgccgggcagctcactgacactcaaatcaagagaaataccttcgttgggacccctttctggatggctccagaggtgatccagcagtctgcctacgattccaaagcagacatttggagcctgggtattactgctattgagttagcaaaaggtgagcctcccaactctgacatgcatcccatgcgggtcctgtttctaatccccaaaaataaccccccaaccctcgtaggagattttacaaaatcttttaaggagtttatcgacgcttgcctgaataaggacccctcatttcgccctacagctaaggaactcctcaaacataaattcatagttaaaaacagcaaaaagacttcttatctaaccgagctgattgatagatttaaacgatggaaagcggagggacacagcgacgacgaaagcgattcagaaggctccgattccgagagcacatccagagagaataacacacacccagaatggtcgttcacaactgtgagaaagaagcctgatcctaaaaaggttcaaaatggagcagagcaggatctggtccaaacccttagttgtctctcgatgatcattacccctgcatttgccgaattaaaacagcaggatgaaaacaatgcctcacgcaatcaggcaatcgaggaattggagaagtcaatagcagtcgctgaggctgcgtgccctggcatcaccgataagatggttaaaaagctcattgagaaatttcagaaatgtagcgccgatgagtccccctag

SEQ ID NO: 24925 - DNA, 1020 bp, synthetic construct
  source 1..1020: mol_type = other DNA; note = Synthetic coding sequence
atggcccacagccccgtggccgtgcaggtgcccggcatgcagggcagcaagttgtggatcattatggagtaccttggaggaggtagcgcgctcgacctcctccgggccggccccttcgacgaatttcagatagctacaatgctgaaagagattctgaaaggccttgactacctgcattcagagaaaaaaatccacagagatattaaggccgctaacgtcctactatctgagcagggagacgtcaaactggctgactttggcgtggctgggcagctcaccgatacccaaataaagcggaataccttcgtgggaaccccattttggatggcccccgaggtgatccagcaaagtgcctatgattctaaagcagacatctggtccttgggtattaccgcaatcgaacttgccaagggggagccacccaacagcgatatgcatcccatgcgagtgctgtttctgatcccaaaaaacaatccacccaccctggttggagattttaccaagtcctttaaagaatttattgatgcctgcctcaataaggacccctccttccgacccacagcaaaagagctcctcaaacataagttcatcgtgaaaaacagcaaaaagaccagctacttgaccgagctgattgaccgatttaaacgctggaaggcggaaggacacagtgatgatgagtcagacagtgaaggtagtgactcggagagcacatcaagggagaataacacccacccagagtggtccttcacgaccgtgaggaaaaaaccggaccctaaaaaggttcagaacggcgcggaacaggatttggtgcagactctctcttgtctgtcgatgatcattactccggccttcgcagaactgaaacagcaggatgagaataatgcatcaagaaaccaggccatcgaagagctagagaagagcatcgcagtcgccgaagctgcatgcccaggtattacagataaaatggtaaaaaagcttatcgaaaagttccagaagtgcagtgccgatgaatcaccttag

SEQ ID NO: 24926 - DNA, 2625 bp, synthetic construct
  source 1..2625: mol_type = other DNA; note = Synthetic coding sequence
atggaggtgctgcgggagaaggtggaggaggaggaggaggccgagagggaagaagccgccgaatgggctgagtgggccagaatggaaaaaatgatgcggccagtggaagtgaggaaggaggaaatcaccctgaaacaggagacgctccgagacctcgaaaagaagctgagcgaaatacaaatcacggtgtccgcggagctccccgcgtttaccaaggacaccatcgacattagtaagctgccgatttcttataagacaaatacccctaaggaagaacatctcctacaggttgcagacaacttctcgagacaatatagccacctatgccctgatcgtgttcccctttttctccaccccttgaacgagtgcgaggtgccgaagttcgtaagcacaactctgcggcctacattgatgccctatccagaactctacaactgggatagctgcgcccagtttgttagcgacttcctcacaatggtgcccctccctgatcccttgaagcccccctctcacctttatagcagcacaacagtgctgaagtatcagaaaggaaactgttttgacttcagcacacttctttgttccatgctgatcggatccggctacgatgcctactgcgtcaatggctatggttcattggacctgtgtcatatggatttgacaagagaggtatgtcctctaacagtgaagcccaaagaaaccatcaagaaggaggaaaaggttttgccaaagaagtataccatcaagcctccacgcgatctgtgttcgagatttgagcaagagcaggaagtgaagaaacagcaggaaattagagcccaggaaaagaagcggcttcgggaggaagaagagagattgatggaggcggagaaggcgaagcctgatgctctgcacggactgagagtgcactcttgggtcctggtcctgtccggcaaaagagaagtccccgagaacttctttattgacccgttcactggccattcctactctacccaggacgagcatttcttggggatcgagagcctgtggaaccataaaaattactggatcaatatgcaggactgttggaattgctgtaaagacttgatctttgacttgggcgaccccgtccggtgggaatacatgctgctgggaacagacaagagccaactttcgttgacagaagaggatgacagcggaataaatgatgaagacgatgtggagaatttagggaaggaggacgaggacaagtcattcgatatgcctcactcctgggtggaacagatcgaaatatcccctgaggccttcgagacccgctgcccgaatggaaagaaggtgattcagtataagagggcaaagctcgaaaaatgggcgccctacctaaactctaacggcttggtctcacggcttaccacgtacgaggatcttcagtgcaccaatatattagagataaaagagtggtaccagaatcgtgaggatatgctggaactgaagcatatcaataagaccaccgatctgaaaaccgattactttaagccgggccacccacaggccctcagggtgcattcttacaaaagcatgcagcccgaaatggatagggttatcgaattctacgaaacggcacgggtagatggactaatgaaacgtgaagaaaccccaagaacgatgactgaatactaccagggtcgtcctgacttcctgagctatcgccatgcttcttttggtccccgagtaaagaaactcaccctttcatctgctgaaagcaacccaagacccattgttaaaattaccgaaagattctttcggaatccagccaagcctgcagaggaggacgtcgcggaacgggttttcctcgtggcagaggaaaggattcagctgaggtaccactgtagggaagaccacattaccgccagtaagcgagagttcctgcggcggaccgaggttgactctaagggtaacaagatcattatgacaccagatatgtgcatatctttcgaagtggagcccatggaacacacaaagaagctgctctaccaatatgaggctatgatgcacctcaaaagggaagagaaattgtccaggcatcaggtgtgggaatctgagctggaggtgctggagatcctgaagttgagagaagaggaagaggccgcccatacattgacaatttcgatctacgatactaaaaggaacgagaagagcaaagaatacagagaagccatggaacgaatgatgcacgaagagcatctcagacaagtggagactcagttagattacctggcgcctttcctagctcaattgcctcccggagagaaattgacgtgctggcaagccgtgaggctgaaagacgaatgccttagtgatttcaaacaaaggttaattaacaaagcaaatcttattcaagcgaggtttgaaaaggagacccaggagctccagaaaaagcagcagtggtatcaagagaatcaggtgactctgacccctgaggatgaagatttatacctgagctattgcagccaggcgatgtttcggatccggatcctggaacaaagactgaatcgtcacaaagagttagccccgttgaaatatttggccctagaagagaaactctacaaggacccacggctcggggagctgcagaaaatcttcgcgtag

SEQ ID NO: 24927 - DNA, 1449 bp, synthetic construct
  source 1..1449: mol_type = other DNA; note = Synthetic coding sequence
atggagcagagcaacctggagaagctggagctgaacgtgcggaagcttcaacaggagctggaccagctaaacagggataaactttcactgcacaatgatatatctgccatgcaacaacagctacaggagaagcgtgaagctgttaattccctccaggaagagttagccaatgtgcaggaccatctgaacctggccaaacaggacctgctgcataccaccaagcatcaggacgtgttgctgtccgaacagacccggctgcagaaggatattagtgaatgggccaatagattcgaagactgccagaaggaggaggagaccaaacaacagcagctacaggttttacagaatgaaattgaagagaacaagttgaaattagtgcagcaggaaatgatgttccagcgattacaaaaggagagagaaagtgagaagagcaagctcgatcaggtcctcagcaaagtcctcgcagccgaggagagagtgcgtaccctccaggaggaggagagatggtgcgaaagcctcgaaaagactttgagtcagacaaagcgccaactctcggagcgggagcagcagctggttgaaaaaagcggggagctgttggccctccaaaaggaggcagactctatgcgtgccgatttcagtcttttgcgcaaccaattcctgacagagcgcaagaaggctgaaaaacaggtggcctctctgaaggaagccctgaaaatccagaggtcccagcttgagaaaaatcttctggaacagaagcaggagaattcttgcatacagaaagagatggcaaccatcgaacttgtcgcccaagacaaccatgagcgggctcgccggttgatgaaagagctgaatcaaatgcagtatgaatatacagaactgaagaaacagatggccaaccaaaaggatctggaaaggaggcagatggagattagcgatgccatgagaacactgaagagcgaggtgaaggacgaaatccgcaccagcctgaaaaatcttaaccaattcctaccagaactgccggccgacctggaggccatactggaacggaacgagaacctagaaggcgagctcgagtctctcaaagagaatcttccgttcaccatgaacgagggtcccttcgaggaaaagctgaacttttcccaagtacacattatggacgagcactggagaggtgaggccttgcgagagaaactgcggcatagggaagaccgtctgaaagcccaactccggcattgcatgtctaagcaagcagaggttctgataaaaggaaagcggcagacggagggaacccttcactcactgcgccgacaggtggacgcactcggggaactagtgacctctaccagtgctgacagcgctagttcaccatcccttagccagctggaatcttcgctcaccgaggatagtcagctaggacagaaccaggaaaaaaatgcatccgcaaggtag

SEQ ID NO: 24928 - DNA, 3780 bp, synthetic construct
  source 1..3780: mol_type = other DNA; note = Synthetic coding sequence
atggccctgcggcccggcgccggcagcggcggcggcggcgccgccggggctggagccggcagtgctggtggtggcggctttatgttcccggtggccggtggaatcagaccaccgcaggcggggctgatgccgatgcaacagcagggtttcccgatggtgagtgtcatgcaaccaaatatgcagggaataatgggaatgaactactcgagtcagatgagccaagggcccattgcaatgcaggccggcatccccatgggccctatgccagctgctgggatgccctacctgggacaggctccgttcttggggatgaggccacccggccctcagtatacccccgatatgcagaaacagttcgctgaggagcagcagaaaaggttcgagcagcagcaaaaactacttgaagaagaacgaaagaggagacaatttgaagagcagaagcagaaactgcggctgctcagcagtgtcaagcccaagacaggcgaaaaatcccgcgatgacgctctcgaagctataaagggcaacttagatggattttcaagagatgctaagatgcacccgaccccagccagtcacccaaaaaaacctggagtgggcgtgttccccagccaagacccagcccagccgaggatgccaccatggatctacaacgaatccctcgttccagatgcctacaagaagatcctcgagactacaatgaccccaacagggatcgatactgcgaagctgtatccaatactcatgtcctctggcctgccaagggaaacattggggcagatctgggcattggccaatcgaacaacgcccggaaagctgaccaaggaggagctgtacaccgtcctagccatgatcgccgtaacacagagaggggtgccagctatgtctccggacgctttaaatcaattcccggcagcccccatccctaccttgtcagggttctctatgacgctgcctacacctgtgagccaacctacagtgattcccagcggtccagctgggagcatgccactgtccctcggccagccggtaatgggtattaacttggtcggaccggtgggaggcgccgcagctcaggcctcgtcagggtttatacccacttatcctgcgaatcaggttgttaaaccagaagaagacgattttcaggattttcaggatgctagcaagtctggatcccttgatgatagtttctctgactttcaggagctgcccgcttcaagcaagacttctaattcccagcacgggaattctgctccaagcctactcatgccgctgcccggcacaaaggcccttcccagcatggacaagtacgctgtcttcaagggcatcgccgctgacaaaagttcggagaacaccgtgccacccggggaccctggggataaatattcagcctttcgcgagttagagcagactgccgaaaataagcccctcggcgagtccttcgctgagttcaggtccgccggtacagacgatggctttaccgacttcaaaacagcagattctgtttcccctctggagccacctacaaaagacaagacatttcctccaagttttccatcagggacaattcaacaaaagcagcagacccaggtgaaaaatccccttaacctggctgatttggacatgttcagcagcgtaaactgttcttccgagaagcccctgagcttttcagccgtgttcagcacatccaagtccgtgagcacaccccagagtaccggaagtgcagcgactatgaccgcactagcggctaccaaaacctcaagtttagcagatgattttggtgagttcagcctgttcggcgaatactcgggactcgcccccgtaggtgaacaagacgactttgcggacttcatggccttctctaatagcagtattagcagtgaacagaaacctgatgataaatacgacgcccttaaggaagaggccagcccagtgcctctgacttctaacgtgggctctacagttaagggcggccaaaattcaactgcagctagcaccaagtatgacgtctttcgccagctgtccttagaagggtcgggtcttggggtggaagatttgaaggacaacacacccagcggaaagagcgatgacgacttcgccgactttcactccagcaaattctcatccattaactccgacaagagcctgggggagaaagccgtggctttccggcacaccaaagaagactcagctagtgtgaagtctctcgatctgccatcgataggtggcagcagcgtgggcaaagaagacagcgaggacgccctgtctgtgcagtttgacatgaagctggctgacgttggaggtgacctgaaacacgtgatgagtgattcgagtttggatctgcccaccgtgtccggacagcacccccctgccgcagacatcgaagatctaaagtatgcagccttcggcagctactcaagcaactttgccgtgagcactctcacctcatacgactggtctgaccgggacgacgccacacagggcaggaaactttcaccattcgtgctgtctgcgggcagcggaagcccaagtgcaacgtctatcctgcagaagaaggagactagttttggcagttccgagaacataactatgactagtcttagtaaggtaactacatttgtgagtgaggacgcattaccagagacaactttccctgcccttgcgagttttaaggatacgataccccaaacttcagagcagaaggagtacgagaaccgggattataaggacttcaccaagcaggacctgcctacagccgagcgcagccaagaggccacatgtccaagcccagctagcagcggcgcctcccaggaaacccctaatgagtgttccgacgatttcggtgaattccagtcagagaagcctaaaatttcaaaattcgatttcctggtagcaaccagtcagagcaaaatgaaatcttcagaagagatgatcaagagtgaacttgccacattcgacctgtccgtacagggatctcataagagaagcttgtccctgggggataaagaaatttcgcgcagttcgccttcgccagccttggaacagccattcagagatcgttcaaacaccttgaatgaaaagcccgctctcccggtcatcagggacaagtataaagacctgaccggcgaggtggaggagaacgagcgctatgcctatgaatggcaacgctgcttgggttcggccctgaatgtcattaagaaggctaacgacaccctcaatggcattagcagcagttctgtgtgtactgaggtgattcagagcgcccaaggaatggaatatttgctcggtgtagttgaggtgtatagggtgacgaaacgtgttgaactaggcatcaaagccaccgcggtctgttctgaaaagctccagcaactgttaaaagacatcgacaaggtgtggaacaatttgattggctttatgtcactggccactctgacctgttgttgggaaaaaatgaccgtgatcacaaagcacctttccccctatcacgaacttctggaggaaaaacctgacgagaatagtctcgatttctcttcgtgtatgcttaggcctgggattaagaatgctcaggagctcgcctgtggggtttgcctgctcaacgtggattccaggagtcggaaggaagaaaagcccgctgaggagcaccctaaaaaagcgttcaacagcgaaaccgattctttcaagctggcctacggtggacaccagtaccacgcttcatgtgctaacttctggattaactgcgtggagcccaagccccccggattagtccttccagatctcctctag

SEQ ID NO: 24929 - DNA, 1158 bp, synthetic construct
  source 1..1158: mol_type = other DNA; note = Synthetic coding sequence
atggccctgcggcccggcgccggcagcggcggcggcggcgccgccggcgccggtgccggcagcgcaggcggtggagggttcatgttccccgtagccgggggtatcagacccccccaagcaggtttaatgcccatgcagcaacagggcttccctatggtgagtgtcatgcagcctaatatgcagggcataatgggcatgaactacagcagtcaaatgtctcagggtccaatcgcgatgcaagctggtattcctatgggcccgatgcccgcagcaggcatgccatatctcggtcaggcccccttcctcggtatgcggcctcctggcccacagtacactccagacatgcagaagcaattcgcagaggagcagcaaaaaaggttcgagcagcagcagaaattgctggaagaagagaggaagcgccgacagttcgaagaacagaagcagaaactgcgcctgctctccagcgtgaagccaaagactggcgagaaaagtcgggatgacgctctggaagcaatcaagggcaacctggacggcttctctagagatgccaaaatgcaccccaccccagcatcacatcccaaaaagcccgattgcccaacgtcatcccactctacaaagaccgttagtccttctcccgccttcctcgatgaggaggaattttctgacttcatgcagggtccagtggaagtccctccatgtggcccgtccagtacttctcaacccttccagtcattccatcccagcaccccactcggacagttgcatactcagaaagccggaacacaaccccttcctccaagtcaatccccagtgccctttgcactgcacggcgtacctggtcaaattccatacttctccaccgcctcggctagccacagcgtccccgaagccggcccgtccctagaggaaaagttcctcgtctcttgtgacatctccacgtctgggcaggagcagatcaagctgaatacatcagaagtgggacacaaggcactggggcccggctcctctaaaaagtacccctccttgatggccagcaatggcgtagcggtggacggatgcgtgtgggagtactttcctcatcgcatactgctaagcccggaatgcttactgggttttaccatgagggtgtggtttcagatgcctatccgtaagtcctag

SEQ ID NO: 24930 - DNA, 939 bp, synthetic construct
  source 1..939: mol_type = other DNA; note = Synthetic coding sequence
atggccgacttcggcatcagcgccggccagttcgtggccgtggtgtgggacaagagcagccctgtcgaagccctcaaaggattggtggacaagctccaggctctcaccggaaatgaaggccgagtctcagtagagaatattaagcagctgctgcagtctgcccataaggagagtagctttgatattatactgtccggcctcgtgcccggtagcaccacgctgcattcggccgaaatcctcgctgagatcgcgcggatcttaagaccaggcggatgcctgttcctgaaagagcccgttgagactgccgtcgataataacagcaaggttaagactgcctctaaattatgcagcgccctcacattatccggactcgtggaagtgaaagagcttcagcgagagcccctgactcccgaggaagttcagagcgtgcgcgaacatttagggcatgagtccgataacttgctgttcgttcagattacagggaaaaagcccaatttcgaggtgggttcctctagacagctaaaattaagcataacgaagaagtccagccccagtgtgaagcccgctgtggaccccgccgctgcaaagctatggactctgagcgcaaatgacatggaggatgactctatggacctgatcgatagcgacgagttactcgatccggaagacctgaaaaaaccggacccagccagcttacgcgccgcctcatgtggcgagggtaaaaagaggaaggcgtgcaagaactgcacctgtggactagctgaggagttggaaaaagagaagtctagggagcagatgtccagccaacctaagtccgcctgtggaaattgttatttgggggacgccttccggtgcgcaagttgcccttatctcggcatgcccgcctttaagccgggggagaaagtgctcttgagcgactcaaacctgcacgatgcctag

SEQ ID NO: 24931 - DNA, 1056 bp, synthetic construct
  source 1..1056: mol_type = other DNA; note = Synthetic coding sequence
atgaacgagagcaacgacagcaccaactacgacatggccccctactacgaggccctgtgtaaatccctcgactggcagattgatgtggacctactcaataagatgaaaaaggctaatgaagacgaacttaaaaggctcgacgaggaactggaagatgccgagaaaaatctgggagaatcggagattagagacgcgatgatggccaaagcggaatatctttgccgcatcggcgacaaagagggcgccctcaccgccttccgaaagacatatgacaagaccgtggccctcggacataggctcgacatcgtcttctacctcttacgaatcggactcttttatatggataacgacctaattaccagaaacacggagaaggccaagtctttaattgaagaaggaggtgactgggatcggcgcaataggctcaaggtctaccagggactgtattgcgtcgctatacgggatttcaagcaggctgcggagctgtttctcgataccgtgtccacctttaccagttacgaactaatggattacaaaaccttcgttacctacacagtttacgtatccatgatagcactagaacgacctgatctcagggaaaaagtcattaagggcgcagagatcttagaggtgctgcatagcctgccagccgtcaggcagtaccttttctctctgtacgaatgcagatactccgtgtttttccaatcactagcggtggtcgaacaagaaatgaagaaagattggctctttgctccccactacaggtattacgtacgcgaaatgcgcattcacgcctactcccagcttcttgagagttatcgctcccttacgctgggatacatggctgaggctttcggggttggcgtagaatttattgatcaggagttgtctcgcttcatagctgctggtcggctgcattgcaaaatcgacaaggtgaacgaaatcgtggagaccaaccgtccagactctaaaaactggcagtatcaggaaactatcaagaagggtgacctgctcctcaaccgcgttcagaagctcagtagagtgatcaacatgtag

SEQ ID NO: 24932 - DNA, 414 bp, synthetic construct
  source 1..414: mol_type = other DNA; note = Synthetic coding sequence
atgatcctgcccaccaaggccatggccacccaggagctgaccgtgaaacgcaaactgtccggtaacacgctgcaggtccaggcttccagtcccgttgctctgggagtcaggatacctaccgttgctttgcatatgatggaactgtttgatactaccgtcgagcagttatacagcatttttaccgtgaaggagctgacaaacaagaaaatcattatgaaatggcgctgtggtaattggccagaggagcattatgcaatggtcgccctgaactttgtgcctacccttggtcaaacagaactgcagctcaaggagttcctctctatctgcaaagaagagaatatgaagttttgttggcagaaacagcactttgaagagattaaggggtctctacagctcactccccttaacggatag

SEQ ID NO: 24933 - DNA, 2796 bp, synthetic construct
  source 1..2796: mol_type = other DNA; note = Synthetic coding sequence
atggccgaggtggaggccgtgcagctgaaggaggagggcaaccggcatttccaactgcaagattacaaagcggccactaacagctactcgcaggctctgaagttgactaaagacaaggcgctgctggctaccctctaccggaatagagcagcatgtggtcttaaaaccgaaagttacgtccaggctgcaagcgacgcatctcgtgcaatagacattaactcgtctgatatcaaagcattgtatcgaaggtgtcaagccttggaacacttgggaaaacttgaccaggccttcaaagatgtccagaggtgtgctacccttgagcccaggaatcagaatttccaggaaatgttgcgaaggctgaacacctccattcaagaaaaattacgtgtacaattttccacagatagcagagtacaaaagatgtttgagattttactagacgagaacagtgaagctgacaaacgtgagaaggccgcaaacaatctgattgttttgggacgcgaggaagccggtgctgagaaaattttccagaataacggggtcgctctgctgctgcagctgctggacaccaaaaaaccagagttggttctggcagccgtgagaacactcagtgggatgtgtagcggccaccaggccagagctactgttatattgcacgctgtgcgcatagatcgaatttgttccttgatggccgttgagaacgaggagatgtcgttggccgtgtgcaacctgttgcaggctatcatagactcattatctggcgaagataagcgcgagcacagagggaaagaagaggccctcgtgttagatacaaagaaggacctgaagcagattacatcccatttgctggacatgctggtcagcaagaaggtctcaggacagggcagagaccaagccctaaacctgctaaacaaaaacgtcccccggaaggatttagcgatacatgacaacagcaggacaatctacgttgtcgataacggcctgaggaaaatcctcaaggttgtcgggcaggtaccggatctccccagctgtttgcctttgaccgacaatacccgcatgctcgcctccattctaattaataaactgtacgacgatctgaggtgtgatcctgagagagatcacttccggaagatctgcgaagaatacatcactggtaagtttgacccacaggacatggacaaaaacctgaacgcgatccagacagtctcaggaatcctgcaggggccttttgatcttggaaaccagctccttggtttgaaaggagtgatggagatgatggttgcactgtgtggatcggaacgggaaacggaccagctggtggccgtggaagcccttattcacgccagcaccaaactgagtagggcgacattcattattacaaatggagtgtctctgctaaagcagatctataagacaacaaagaatgagaaaatcaaaatcaggaccctcgtggggctttgtaaactgggcagtgcaggaggcactgattatggcctcagacaatttgcggaaggtagtacggagaagctggctaaacagtgccgaaaatggctgtgcaatatgtccatcgatacccggacacggcggtgggcagtggaaggattagcctacctgacactggatgcagacgtcaaggatgacttcgtgcaggatgtgccagccttgcaagccatgtttgagctcgcaaaagctggaacgagcgataaaactatcctgtattccgtggcaacaacccttgttaactgcaccaactcatacgacgtgaaggaagtcatccccgagttagtgcagttggcgaagttttccaagcaacacgtccctgaagaacaccctaaagacaaaaaggactttatcgacatgcgggttaagaggctgctgaaagctggcgtgatctcagcgctggcctgcatggttaaggcagacagcgccatactaaccgaccagactaaagaactcttggcccgagttttcttggccctctgtgacaaccctaaagacagagggaccatcgttgcccagggaggtgggaaggcacttatcccattggccctggaagggaccgatgtgggcaaagttaaggcagcccatgccctggccaagattgccgctgtttccaacccagacatcgcatttccaggggaacgcgtgtatgaagtcgtgcgaccgttggtgcgacttctcgatacacaaagggatggtcttcagaactacgaagctctcctcggacttactaacctgagcggcaggagtgacaaacttaggcagaaaatcttcaaagagcgcgcactacccgacatcgagaattacatgttcgagaaccatgatcaactccgtcaggctgccactgagtgcatgtgtaatatggtactgcataaggaagtgcaagagagattcctggctgatggaaacgatcgcctcaaactggttgtgctgctgtgtggagaggacgacgacaaggtgcagaacgcagccgcaggggcccttgccatgctgacagcagcacacaagaagctatgtttaaagatgacccaggtcacaacacaatggctcgagatcttacagaggctgtgcctgcacgatcaactgagtgttcagcatcgcggcttagtcatcgcttacaacctgctcgctgcagacgccgagctcgcaaaaaagttagtggaaagtgaattgttggaaatcctgactgtggtcggcaaacaggagccagacgaaaagaaggcggaggtggttcagactgcccgagagtgcctcatcaagtgtatggactatggctttatcaaaccggtaagctag

SEQ ID NO: 24934 - DNA, 318 bp, synthetic construct
  source 1..318: mol_type = other DNA; note = Synthetic coding sequence
atggccctgcggtaccccatggccgtgggcctgaacaagggccacaaggtgaccaaaaatgttagcaaacctcgacacagtcgccgcagaggccgactcacaaagcatacgaagtttgtgcgtgacatgatcagggaggtctgcggctttgctccatatgaaaggcgcgccatggagttgttgaaggtttcaaaagacaagcgggcactcaagttcataaagaagcgagttggtactcatattcgtgccaagcgtaagagggaggaattatcgaatgtgctggctgccatgcggaaagcagctgcgaagaaagactag

SEQ ID NO: 24935 - DNA, 663 bp, synthetic construct
  source 1..663: mol_type = other DNA; note = Synthetic coding sequence
atgaacagcatggaccggcacatccagcagaccaacgaccggctgcagtgtattaagcagcatcttcagaacccagccaacttccataacgctgccaccgaattgctggattggtgtggagaccctcgcgcctttcaacggccctttgagcagtctttaatggggtgtctaaccgtggtaagccgagtggccgcgcagcaaggctttgacctggatctgggttaccgcttgcttgctgtctgtgccgcgaatcgtgacaagttcactcctaagtccgccgcactgctgtcctcttggtgcgaagagctcggcaggctgctcctgctcaggcatcagaaaagccggcaaagcgacccgccaggaaagctcccaatgcagcctcctctttcaagtatgtcaagcatgaaacccacactgtcccatagcgacggctcattcccatacgacagcgtaccctggcttcccgcttaccctgcatgtactccaccaccgtcacaatctcacccaaattcttgcagcttgaagcagaaacaacctcttgcatttcccccccccctgtgctccatctggctcacaaccctgcagggacttctcggatccctcagctgtgttcactttgtgagcggatggagtgtgccaagagaaccccacggcttaggctag

SEQ ID NO: 24936 - DNA, 354 bp, synthetic construct
  source 1..354: mol_type = other DNA; note = Synthetic coding sequence
atggtgcagcggctgacctaccggcggcggctgagctacaacaccgcaagcaataagacacgtctgtcccggacccccggcaaccgcattgtctacttgtacactaagaaagtgggaaaagcgccaaaaagcgcgtgtggggtgtgccctgggcgtctgcggggggtgagagccgtcaggccaaaggtattgatgcggctgagcaaaaccaaaaagcatgtttcacgcgcatacggcggttccatgtgcgcgaaatgtgttcgggacaggatcaagcgcgcatttcttattgaagaacaaaaaatagtggttaaggtgctaaaagcgcaggcccagtcacagaaggccaagtag

SEQ ID NO: 24937 - DNA, 354 bp, synthetic construct
  source 1..354: mol_type = other DNA; note = Synthetic coding sequence
atggtgcagcggctgacctaccggcggcggctgagctacaacaccgcatccaacaaaaccaggctgtctcgcaccccaggaaatagaatagtgtacttgtatacaaaaaaggtggggaaggcgcccaagagcgcttgtggcgtctgcccaggccggttacgtggggttcgcgctgtgcggcctaaagtgttgatgaggttatccaagacgaagaaacatgtctctcgcgcctatgggggttcaatgtgtgccaagtgtgtgagagatcggataaaacgagcgttcctgatcgaagagcagaagatcgtggtcaaggtgctgaaggcacaagcccagagtcagaaagctaagtag

SEQ ID NO: 24938 - DNA, 354 bp, synthetic construct
  source 1..354: mol_type = other DNA; note = Synthetic coding sequence
atggtgcagcggctgacctaccggcggcggctgagctacaacaccgcaagcaataaaacaaggctgtctcggaccccaggcaacaggatcgtgtatctatacaccaagaaagtggggaaggcccccaaatccgcttgcggagtgtgcccaggacgtctgcgcggagtgcgcgcagtcagacccaaggtcctaatgcgactgtcaaagacaaagaagcatgtaagccgagcttatggcggtagcatgtgtgcaaaatgtgtccgggatcgcatcaagagggcattcttgattgaagaacagaagatcgtggtgaaggtgcttaaagctcaggcccagtcacagaaggctaagtag

SEQ ID NO: 24939 - DNA, 1902 bp, synthetic construct
  source 1..1902: mol_type = other DNA; note = Synthetic coding sequence
atgaaggccatcaagaagagcctgaccgaggaggagtacctgtacctggacttctcacaccagacagagggctgtatcttcccactccacacaagtgtgaccctgttcttactgagctattgcgactgtaagattttcaaaatctgtttagtggtgacaaaagaagtaagccgggatagctcgctactgcgcgatgatcttatccaagacgtagagatccagatcatttcgcgacaagaactcccaccaatagttcagaactgttgcctgccggctgtggtggagaggagcgataatttctgcagagccggcttggctgtggtcctgagacacataatccagaagagttacgaagcggatcccttgaagaaagaactgctggagctgcttggatttaaaaagacatgcctgaaagcctgcgcggaggtatcacaatggacaagactgtgtgaattaacaatccctctggcaatcgaaaatttcttacgggaatcttctgaccagccaccaactattcccgtcgaaattctgcagctggaaaagaagcttagcgagcccgtcagagtccacaatgacgataagcttaggagacagaaacttaaacagcaaaaggccgatggggtgggtccccccctgaccaagggaaaagccaaatctaaggtgcacacacaagagacctcagagggactggactcatcctcgaagagcctcgagctgaaggttgcgttttcaaagttgactgtgcaggaggaacccgcaacaacgaatcgtgagccctctcatataagaaaagcaaaagcctcagatctgcccccactggagcacgtgttcgcagaaggtctatacttcacccttgcagatatagtgctgctcccatgtatccatcacttccttgtgatcatcagccgtaagtttagtgaaaaactcgttgagtttcctttgctcgcttcttggtaccagcgcattcaggaagtccccggagtgaagaccgccgcaagtaagtgtggcatccagttcttgcatctcccaaagctcctgaccactagcaccgagcagcaccctaatctctgcgaagtgcccggagtggaagagcagtccgacccattgttcatcggaggacctcggcccactatggccaagttaatggaaaaggggattgaggttatgttcagccctcatccgtgcccgacatggactctggactggaacgtactgccggcggccgtttccccaaaagaaggcaaaatgtctagcgatagggctttgcgtaaacagcagcagttgaataaccttgtatacgtagtgacaaaccaagccaagcccggcgaccgcattgtggacttctgcagcgggggcgggcatgttggtattgtgcttgctcatatgttgccttcctgccaggtcacactgattgaaaacaaggaattgtccttaattcgcgcaaaaaaacgaagcgatgaattagggttgtccaatatatggttcattcaggcaaacatggagtactttacaggaatgtttaacattggcgttgccctgcatgcttgtggcgtagccacagacatggtgattgagcactgtatcaaaaccagggcatcattcgtcacctgtccatgctgctatggcttcatccaaaatacctctaaattcaatttccccaagagcgaacaattcaaaaagaccctgagttacaaggagcacatgattttgtgtaggtttgcagatcaaactgccgttcagctgcctcctcagaggcgcctcattgggaagcagtgtatgtgtctcgtggacttagatcgagctcgcgccgcagaggaatgcggctactctgtacaagttatttctatggagcccgaatcctgctcccctaagaacaacatgattgtgggcgttccaatttag

SEQ ID NO: 24940 - DNA, 1641 bp, synthetic construct
  source 1..1641: mol_type = other DNA; note = Synthetic coding sequence
atgaaggccatcaagaagagcctgaccgaggaggagtacctgtacctcgacttctcccatcagacagaagggtgcatttttcctctccacaccagcgtgacactgtttttactgagttactgcgactgtaaaattttcaaaatctgtctagtcgtaactaaagaagtgtcccagtggactcgcctgtgtgaactgactatacccttggccatcgagaacttcttgcgggagagctccgaccagcctcccacgatccccgtggagatcctccagctggagaagaaactctccgagcccgtgcgggtgcataatgatgacaagttaagaagacagaaactcaaacaacagaaggcagacggcgtgggaccacctctgacaaagggaaaagctaaatcaaaagttcacacccaggaaacttctgaaggattggatagttcatcaaagtccttagagctgaaggttgctttcagtaagctgactgtgcaggaggagccagccaccacaaaccgagaaccctcacatattaggaaggccaaagctagtgatctgcccccattggagcacgtgttcgccgaaggtctctactttactcttgctgatatcgtcctgctgccgtgcattcaccatttcctggtcataatctcccggaagtttagcgaaaagctggtcgagtttccacttctggcatcctggtatcagcgtatacaggaagtgcccggtgtgaagacagctgccagcaagtgtgggatccaattcttgcacttaccaaagctgctcacaaccagcaccgagcaacacccaaatctttgcgaggttcctggcgtagaggagcagagtgaccccctctttatcggaggacctcgtcccacaatggcgaaattgatggagaaaggaatagaagtgatgttctcaccgcacccatgccctacctggacactggactggaacgtcctaccagccgccgtgtcaccgaaagagggcaagatgtcttctgaccgggctctgcggaagcagcagcaactgaataatctggtctatgtggtaaccaatcaggctaagcctggagatcgtattgtcgacttctgttccggaggaggccatgttggtattgttctggcacacatgctgcccagctgccaggtcacattgattgagaataaggagttgtccctaatccgagcgaaaaagcgcagtgatgaactcggactctccaatatttggtttatacaggctaatatggagtattttacgggcatgtttaacattggcgtcgctctgcatgcctgcggagtcgcaaccgacatggtgatcgagcattgcataaaaactcgggcgagttttgtgacgtgcccttgttgctatggattcatccagaatacatctaagtttaacttccctaaatcagaacagttcaaaaaaacattgtcatacaaagagcatatgatcctttgtagattcgcagaccagacagctgtgcaactgcctccccaacggcgactcatcggaaaacagtgtatgtgcctggtcgatctggaccgtgccagggcagccgaagagtgtggatactctgtacaagtaatctctatggagcctgaatcttgcagcccaaagaacaatatgatcgtcggagtcccaatctag

SEQ ID NO: 24941 - DNA, 1542 bp, synthetic construct
  source 1..1542: mol_type = other DNA; note = Synthetic coding sequence
atgctgctggagaacctgaccgacaacgagagcgagaacaccaacctaaaaaagaaagtctttgaaaaagaggcgcacattcaggaactctcatgtcttttccaatcagagaaggccaacaccctcaaagccaaccggttcagccaaagcgtcaaggtcgtgcacgagcggctgcagatacagatccataaacgcgaagccgaaaacgacaagctgaaggagtacgtaaagtctcttgagacaaagatagctaagtggaatctacaaagtaggatgaacaagaacgaggctatagttatgaaggaggcgagccggcagaagacagtcgccctaaaaaaggcttccaaggtgtacaagcagcgccttgaccactttacaggcgctatcgagaagctgacatcacagatcagagatcaggaagcaaaattgtctgagactatcagcgcgtccaacgcttggaaaagccactacgaaaaaatcgttatcgaaaagactgaattggaggtgcagattgagactatgaagaaacagattattaatttactggaggatttgaagaaaatggaagatcatgggaagaattcctgcgaagagattctccggaaagtacacagcattgagtatgagaacgaaacactcaaccttgagaataccaaactgaagaccactctagcggcactcaaggacgaggtggtgtcagtggaaaacgagctctcagagctccaggaggttgaaaagaagcaaaagaccctgattgagatgtataagacacaggttcagaaactacaggaagctgccgaaattgtcaagtccagatgtgaaaacctgttgcataagaacaatcagattactaaaacaaaaaataagaacgtggaaaaaatgcgcgggcagatggaatcccacctgaaagaactcgagcgcgtgtgtgactcactaacagccgcggagcggcgacttcatgagtgccaggaatcactgcaatgctgcaaaggaaaatgcgctgatcaagagcacaccatccgagagcttcagggccaagtggatggaaatcataatctgcttaccaagttgtctctggaagaggaaaactgcctgatccagctgaagtgtgagaatctccagcaaaaactggaacaaatggatgcagaaaataaagagcttgaaaagaaactggccaatcaagaggagtgtctgaagcacagtaatcttaagtttaaggaaaagtctgccgagtacaccgcccttgcaaggcagctcgaagccgccctggaagaagggaggcaaaaggtcgctgaggaaatagagaagatgtcatcaagagaaagtgctttgcaaattaagatactggacctagagacggaactccgaaaaaagaacgaggagcaaaaccagttggtctgcaagatgaactcaaaggcgcagcaccaggaggtgtgcctgaaggaggtacagaactccctcgagaaatcggagaatcaaaatgaatccattaaaaattatctccagttcctgaagacgagttatgtgaccatgttcgagtag

SEQ ID NO: 24942 - DNA, 1167 bp, synthetic construct
  source 1..1167: mol_type = other DNA; note = Synthetic coding sequence
atggccgccgccgccgccctggcccggctggagcagaagcagagccgggcgtggggcccgacaagccaggatacaatccgaaatcaggtaagaaaggagctccaagctgaagctaccgtgtcaggcagccctgaggctcctggaaccaatgtcgtgtcagaaccacgcgaagagggctcagcccatctcgctgttccaggggtgtatttcacctgccctctgacaggcgcaactctgcgcaaagaccagagggacgcatgtatcaaggaagcaattctacttcacttttccactgaccccgtagccgcaagcattatgaagatttacaccttcaataaggatcaggatcgtgtgaagctgggagtagacaccatagccaagtatctagacaacattcacctccatcccgaggaagagaagtacaggaagattaagctgcagaacaaagtgttccaggagcgtataaattgtttggaggggacccacgagttcttcgaggccatcggcttccaaaaggttttgctgcctgcacaggaccaggaggaccccgaggaattctacgtattaagtgaaacaaccttagcacagccccagagcctcgagaggcacaaggagcagctgttggcagccgaacccgtacgggccaagcttgaccggcagcggcgtgtgtttcagccgagtcctctggcgagccagtttgaactgcccggggacttttttaacctgaccgccgaagaaatcaaaagagaacagcgcctgaggagcgaggccgtggagagactgtcagtgctgaggactaaagccatgcgcgaaaaagaggaacagcgcgggctgagaaagtataattatacactgcttcgcgttcgcttgcccgacggctgccttttacaagggaccttctacgcaagagaaagactgggtgcggtatacggcttcgtgagagaggcccttcagtcagattggcttccattcgaacttctggcatccggaggacagaagctgagcgaggatgaaaacctggccctcaatgagtgcggtctggtgccttcagccctcctgaccttctcatgggatatggcggtactggaggacataaaagccgccggagcagagcccgatagcattctgaagccagaactgctgtcagcgatcgaaaaacttttgtag

SEQ ID NO: 24943 - DNA, 2691 bp, synthetic construct
  source 1..2691: mol_type = other DNA; note = Synthetic coding sequence
atggacggcgccgccggccccggcgacggccccgcccgggaggccctgcagtcattgtctcagagattgcgcgtgcaggagcaggaaatggaactcgtgaaagcggccctggccgaggccctgaggttgctgcgactgcaggtgccaccgagctccctgcagggcagtggaacccccgctccccctggggactccctggccgccccccccggcctgcctcccacatgcaccccttccctcgtgagtcggggaacacagacagagaccgaggtggagctgaagagcagcccaggaccacccggtctgagcaacgggcctccagcaccccaaggggcctctgaagagccatcgggcacacagtccgaaggcgggggcagctcctcgtcaggggccggctcccccggtcccccgggcattttacgtcctctgcaacccccccaacgagcagacacacccagacgcaattcttcttcctcatctagtccatcggagaggcccagacagaaactgagcaggaaggcaattagctccgccaacctcctcgtccggtcagggtccactgaatccagaggggggaaggatcccctgtcttcccctggagggcctggatctagacggagcaattataatttggaaggtatttccgtaaagatgttcctccggggcaggccgataacaatgtacattcctagcggtattcgttcactcgaagagctgccaagtggccctccccctgagactctttccctagattgggtatacggataccgcggcagggactctcgtagcaacctctttgtactgagaagtggagaggttgtctatttcattgcatgtgtggtcgtcctatataggcctggcgggggcccaggagggccaggcgggggcggacaacgacactatagagggcataccgattgcgtacgatgtctggcagtgcaccctgacggcgtgagggtagccagcggtcagacagccggcgtggacaaggatgggaaacccctgcagcccgtggtgcatatttgggatagtgagaccctcctgaagcttcaggagattgggctgggtgcttttgaacgtggagtaggggccctcgccttcagcgcggcagaccaaggagctttcttgtgcgtggtggacgactcaaatgaacatatgttgtcggtctgggactgcagccggggcatgaagctcgcggaaattaagagcacaaatgattcagtgctggcagtggggttcaatcctagagactcttcgtgtattgttacttcgggcaagtcccatgtccatttttggaactggtctgggggggtgggcgttcctggcaacggcacactgacgcgcaagcagggggtgtttgggaagtacaagaaaccaaagttcattccatgtttcgtgtttttacccgatggagacatcctgacaggggattccgagggtaacatactgacatggggaaggagtccttcggactctaagactcctgggcgaggaggagccaaagaaacctacgggatcgtggcccaggcccacgcccacgagggatcaatattcgccctgtgccttcggagggacggaaccgtgctgtcgggtggaggacgggacaggcgtctagtgcagtggggcccaggcttggtggccttgcaggaggctgaaatccccgagcattttggcgctgtgcgcgcgatcgctgagggactgggaagcgaacttcttgttgggacaacaaagaacgctttgctgcgtggtgatcttgcccagggctttagcccagtgatccaaggacacacagatgaactctggggactgtgcacccatcccagccagaatcggtttctgacttgcggccacgaccggcaattgtgcctgtgggatggcgaatctcacgccctggcctggagcatcgacctgaaggaaaccggcctgtgcgccgacttccaccctagcggcgcagtggtcgctgtcggcctgaacaccggccggtggctagtgcttgacaccgaaacacgcgagatcgtttccgatgtgatcgacggtaacgagcagctgtctgtagtccggtactccccagacggactgtaccttgccattgggagccacgacaacgttatttatatctactcggtcagctctgacggggccaagtcgagtcgctttggccggtgcatgggccactcaagctttattacccacctcgactggtccaaggacggaaactttataatgtctaactccggcgattacgaaatattgtactgggacgttgctgggggttgtaagcaactcaaaaatagatacgagagcagagacagggagtgggcaacttatacttgtgtattaggcttccatgtctatggggtctggcccgacggcagcgacggcacagacataaactccctttgtcgcagtcacaatgaacgggttgtcgccgttgcggatgatttttgcaaagtgcacctttttcaatacccgtgtgcaagagcaaaagctccatcacgcatgtacggcggccacggatcacatgtgacaagtgtgaggttcacgcatgacgatagtcaccttgtatcccttggcggaaaggatgcctccatctttcagtggagggtcttgggagccggaggtgctggacctgcccccgctacgccctctagaacccctagcctgtcccctgcctcgtcattagatgtctag

SEQ ID NO: 24944 - DNA, 2934 bp, synthetic construct
  source 1..2934: mol_type = other DNA; note = Synthetic coding sequence
atgggcgccgaggaggaggtgctggtgaccctgagcggcggcgccccttgggggttccgacttcatggaggcgccgaacaacggaagcccttgcaggtgtctaagatacgccgccggtcccaggccggaagggctgggctgcgggaaagagatcagctgctggctataaacggtgtcagttgtaccaacttatctcatgcttctgccatgtcccttatcgatgcgtccggaaaccagctggtactcacagtccagagattagccgacgaaggccctgtccaatctccctcgccccatgaattgcaagtgcttagccccttgagccccctcagtccggagccaccaggcgctccagttccgcaacctctgcagccaggcagcctgcggtcccctccggacagtgaagcatactatggagagaccgattccgatgcagacggacctgccacacaggagaagccgcgtcggccccgacgacgcggacccactcgtcctacccctccgggagctccgcctgatgaggtgtacctgagcgactcacccgcagagccagctcctacgattccaggccccccaagccagggcgattcacgtgtgtcctcaccttcatgggaagacggcgccgcactgcagccccctcctgctgaagccttgttgctccctcatggacctctgaggccagggccccatctcattcctatggtgggacccgtcccacaccctgtggctgaggatttaaccaccacatacactcagaaagccaaacaggccaagttgcagagagccgaatccctacaggaaaagtctataaaagaggccaagaccaagtgccggactatcgcttcccttctcacagccgctccgaaccctcacagcaaaggcgtcctcatgttcaagaagcgacgtcaacgcgccaaaaagtacactctcgtgagtttcggcgccgcagctggcaccggggcggaagaagaggacggagtgcctcccacatccgaaagtgagctagatgaagaggcgtttagcgacgcccgctctctgacaaatcaatccgattgggattccccatacctggatatggagctggcccgggccggatcgcgagccagtgaaggccaggggagcgggttggggggccagctgtctgaagtgagtggaagaggggtgcagctgttcgaacagcagcgccagcgggctgactcaagtactcaggagctggccagggtggagcctgccgctatgttgaatggggaagggctgcaatcccctccgcgagctcagtctgcgccccccgaagcggcagtgctgcctccaagtccactccctgcccccgtggcatctcctcggccattccagcctggtggcggagctccaacacctgccccttctatctttaacagatctgccagaccgttcacacctggtctccaagggcagcgccccacaacaacttcagtgattttcagacctctggccccaaagagagctaacgactcgctgggagggctctcgcccgcccctccccccttcttgagctcgcaggggccaacccctctgccaagttttaccagcggtgtcccatcacatgctccggtgagcggcagccccagcacacccagatcctccggaccagtgactgcaacatcttctctgtatatccccgctccttcccgcccagtcaccccgggaggggcacctgaaccgcctgcccctcccagtgccgctgctatgacctcaacagcatcaattttcctcagcgctccccttcgcccttctgctagacccgaggcaccggcccctggcccaggagctccggagccgccatccgcaagagaacagagaatcagtgttcctgccgcacggaccggcatccttcaggaagccaggcgacgcggtacgcgcaaacagatgtttaggccagggaaggaagaaaccaagaactcaccgaaccccgaacttctttcgcttgtacaaaaccttgacgagaagccacgtgctgggggagccgaaagcgggcccgaggaggatgccttaagtctcggggcagaagcttgcaactttatgcaacccgtgggagcccgcagttacaagactctgcctcacgtgacaccaaaaacacctccccctatggcacctaagactcccccaccaatgacccctaagactccacctcccgtggcaccaaagccaccaagcaggggacttttggacgggctggtgaatggcgccgcctcgtccgctggcataccagaaccacctagacttcagggccgaggtggcgagctattcgcaaaaagacaatcaagagcggatagatacgtggtggaaggcacccctgggccggggctgggcccccgtcctagaagcccgtcccccacaccctcgttgccacctagctggaaatatagccctaacatcagggctcctcctccaatcgcctataatccactcctgagtcctttttttccccaggccgcccgtacccttcccaaggcacagtctcagggccctagggccacacctaagcagggcatcaaggccctcgacttcatgcggcaccagccttatcagttaaaaaccgccatgttttgtttcgatgaagtcccccctacacctggcccgatcgcttctggaagtcccaagactgctcgggtacaggagattcgacggtttagcacgccagcgccacagccaaccgccgagccactcgctccaaccgtgttagccccacgcgccgccactactctggacgaacccatctggaggacagaacttgcctctgcccctgtgccttcgcctgccccgcctcctgaggcgcctaggggtctgggtgcatcgccttcatcatgcggatttcaggtggccaggcctcggttcagtgcaacaagaacagggttgcaggcacacgtgtggcgccccggggcgggccatcagtag

SEQ ID NO: 24945 - DNA, 2757 bp, synthetic construct
  source 1..2757: mol_type = other DNA; note = Synthetic coding sequence
atgggcaccaccgcccccggccccatccacctgctggagctgtgcgaccagaaattaatggaatttttgtgtaacatggacaataaagaccttgtttggctggaggaaatccaggaagaggctgaaagaatgtttactcgcgaattctcaaaggagcctgagcttatgccgaagaccccctctcagaagaaccggcggaagaaacgcagaattagctacgtccaagacgagaatagagacccaattaggcgaaggctgtcccggcgtaagtctcgctcaagccaactctcatcacgcagactgaggtccaaagatagtgtggaaaaacttgcaactgtcgtcggcgaaaacggctctgtccttcggcgggtcacacgcgccgctgctgccgccgctgctgcaactatggctctcgctgccccaagctccccgacacccgagtccccgacaatgctgacaaaaaagcccgaggataaccatacccagtgccaactggtgccggtcgtagagattggtatttcggagcgccaaaatgccgagcagcatgtgacgcaattgatgtccaccgagccattaccaagaactctcagccctactcccgcctccgcgacggcacccacgtcacagggcattcctacatcagatgaggagagtacccccaaaaagtccaaggctcgaatccttgaaagcattactgtgagtagcctcatggccactccacaggatccgaagggccagggtgtggggacggggcgcagtgctagcaaacttaggatcgcgcaagtgtcgcctggacctcgcgattctcctgcattccccgattctccatggagagagcgggtcctggcgccgatactgcctgataacttttccacaccaactgggagtcggactgatagccagagcgtgcgacactcccctatagcccccagttcacccagcccccaagttctggctcaaaaatatagcctagtagccaagcaggaatccgtcgtgaggagggcaagcaggcgtctcgccaagaaaacggccgaagagcctgcagcctccggcaggattatctgccatagttacctcgaacggcttttgaacgtggaggttccccaaaaggtcgggagcgaacaaaaggagcctccggaggaggcggagcccgtggccgcggctgagccggaggtccctgagaataacgggaacaatagttggccccacaacgatacagagatcgccaattcaacccctaatcctaagcctgccgcctcttctccggagacgccctctgctggtcagcaggaagccaagaccgatcaggcagacggacctcgagagcctcctcagtcggctcggcgtaagcgatcctacaagcaggccgtgtccgagctggatgaagagcagcacctggaggacgaggagctgcaacctcccaggtccaaaactccatcatctccctgtccggctagtaaggtggtgaggcccctgcgtacttttctccacaccgtacaacgtaaccagatgctgatgacccctaccagtgccccaagatcagttatgaaatcatttataaaacgcaacacgccgcttaggatggaccccaagtgtagttttgtcgagaaggaacgccagcggctcgagaatctgcggcgtaaagaagaggccgagcagctacggcgtcagaaggtcgaagaggacaagcgacgccggctagaggaggtgaaactgaagcgggaggagcgattgagaaaggtcctgcaggccagggaacgcgtggagcagatgaaggaagagaaaaagaaacagatcgagcagaagttcgcccaaattgacgagaaaacagagaaagccaaggaggagcgtcttgccgaagaaaaagccaagaaaaaggccgcagccaaaaaaatggaggaggtcgaagcccggagaaagcaggaggaagaagcacgccgactgagatggctccagcaggaagaagaagagcgccgacaccaggagctgttacagaagaagaaggaggaagaacaggaacgtcttcgaaaagccgccgaggcgaagcggcttgctgagcagagagagcaggagagacgggaacaggaacgtcgggaacaagagcgacgtgaacaggagaggagggaacaggagcggcgcgagcaggaacgccagctcgctgaacaggaacgtcgcagagagcaagaaagactgcaggctgagcgtgaattgcaggagcgagagaaagccttgagactacagaaggaacaactgcagagggaattagaagaaaaaaagaagaaggaggagcaacagagactcgccgagaggcagctgcaggaagagcaggagaagaaggcaaaggaggcagcgggagcgtccaaggccttaaatgtcactgttgatgtgcagtcaccggcctgcacttcatatcaaatgacaccgcaaggccaccgtgctccacctaagatcaatcccgacaactacgggatggacttaaattccgacgactccacggatgatgaagcccacccaaggaagcccattcccacctgggcaaggggtacgcccctgagccaggcgatcattcatcagtactatcatccccctaatctgctggagctgtttgggacaatactgccgttggacctggaggatatcttcaagaaaagcaaaccaagataccacaagcgtacgagctcagccgtttggaacagcccacccctgcagggggcccgggttccatccagcctggcctactccctcaaaaagcactag

SEQ ID NO: 24946 - DNA, 1728 bp, synthetic construct
  source 1..1728: mol_type = other DNA; note = Synthetic coding sequence
atgaccagcaagaagctggtgaacagcgtggccggctgcgccgacgacgcgctcgccggacttgtcgcatgcaatccaaacttgcagctcctgcaggggcacagggtcgccctccgaagtgatctggactccctgaagggaagagtagctctgctcagtgggggcggatctggacacgagccagcccacgcggggtttattgggaagggaatgctgactggcgtcatcgccggtgccgttttcacatctcccgccgtgggatctattctggccgctattagagcggtggctcaggccggcacggtaggaacactgctaatcgtgaaaaactacacgggagatcggcttaacttcggcctggccagagaacaggctagggctgaggggatcccggtggagatggttgtcatcggcgacgactccgcttttacagtgctcaaaaaagcgggaaggagggggttgtgtggaaccgttctgatccataaagtagccggcgcactggcggaagctggtgttgggctggaggagatcgctaagcaggtgaatgtagtggccaaggccatgggaacgctgggggtttcactgtcctcatgtagcgtccctggttcgaaacctacttttgagctctctgctgatgaggtggaattggggctaggcattcatggagaagcaggggtccgtcgcatcaagatggccacagccgacgagatcgtgaagctgatgctggaccacatgaccaacacaaccaatgcttcacacgtccccgtgcaacccggaagtagtgtggttatgatggtgaataatttaggagggttgagctttctggaactggggatcatcgccgacgccaccgttcggagcctggagggtcggggagtgaagatagccagagctttggtcgggacctttatgtcggctctcgagatgccgggcatttcccttactcttctgcttgttgacgagcccctactgaaacttatcgacgcggagacaacggccgccgcatggccgaatgtcgcagccgtcagtatcacaggcaggaagcgatcccgagttgccccagcggagccacaagaggcccccgattccacggctgctggtggcagtgcttctaaaagaatggctttggttctggagcgggtgtgttctacattattaggcctggaagagcacctcaacgcgctcgatcgggctgcaggtgatggtgattgtggaactacacattctagagcagcccgcgcaattcaagaatggcttaaggaagggcccccacccgcttcccccgcacagctgttgtccaagctgtccgtcctactcctcgagaagatgggtggttctagcggggccctgtatgggctgttcctgaccgctgccgcacagcctctcaaggctaaaacttcgctgccagcctggtctgcagccatggacgctggactggaagccatgcagaaatatggcaaagccgcgcccggagacagaaccatgctggattctctttgggccgcaggccaggagctccaggcttggaagtcccccggtgcagacttactacaagtgctgacgaaggctgtgaagtccgcagaagcggctgcagaggctacaaaaaacatggaggcgggtgccggcagggcgtcctacatttcttcagcaagactagagcagcctgaccctggcgctgtcgctgccgccgcaatactccgagctatcctcgaagtgctgcagtcctag

SEQ ID NO: 24947 - DNA, 1080 bp, synthetic construct
  source 1..1080: mol_type = other DNA; note = Synthetic coding sequence
atggccgccccctgcgccgaggaccccagcctggagcggcacttcaagggccaccgggatgcagtaacttgtgtagacttctctatcaatactaagcagctcgcttctggttccatggacagctgtttgatggtgtggcatatgaagcctcagagcagggcctaccggttcactggtcacaaagacgcggttacctgtgtgaacttctccccctcaggtcacctattggcgtctggcagccgggacaagaccgtacgaatctgggtccctaatgttaagggcgagagtacagttttccgtgcacatacggctactgtaagatccgtgcacttttgcagcgatggacagtctttcgttaccgcatcagacgataaaaccgtaaaagtttgggccacgcaccgccagaaattcctcttttccctttcacagcatatcaattgggtgcgatgcgcaaaattcagccctgacggaaggttgatcgtgtctgccagtgatgacaaaacagtgaaactatgggataaaagctcccgggagtgtgttcactcatactgcgaacatgggggattcgttacatacgtggattttcatccatctggcacctgcatagcagccgcaggcatggacaacaccgtcaaggtgtgggacgtccgaacacatcgcttgcttcagcactaccagctgcacagcgccgccgtgaacgggctgtctttccacccgtctgggaattatttaataacagcgtctagcgattctactctcaagatcctggacttgatggagggcaggcttctctataccctgcatggtcaccaaggtccagccactactgtcgccttttcccgcaccggggaatactttgcgagcggaggcagcgacgagcaagtgatggtttggaaatccaattttgatattgtcgatcacggcgaagtcaccaaggtccctcgcccccccgctaccctggccagctctatgggaaatttgacagtaagtatcttggagcagcggcttaccctgaccgaggacaagcttaagcagtgcctcgagaaccagcagctgattatgcagagagctacaccttag

SEQ ID NO: 24948 - DNA, 633 bp, synthetic construct
  source 1..633: mol_type = other DNA; note = Synthetic coding sequence
atggccgccagcgtggagcagcgggagggcaccatccaggtgcagggccaggccctattcttccgtgaggcgctgcccggttctgggcaggccaggttctcagtgctcctgctgcacgggatcagattttcctctgaaacttggcagaacttgggtacactccatagactcgcccaagctgggtatcgcgccgtggccattgatttgcctggactgggccacagcaaagaggcggcagccccggcccctatcggtgaactcgccccagggtccttcctagcagccgtcgtggacgcacttgagctgggaccgcccgtggtcatctctccttctctgagcggcatgtattctcttccatttctgactgcccccgggagccagctgccaggcttcgtccccgtcgccccaatttgtaccgataagataaatgccgccaactatgcatccgtgaagaccccagccctcatagtttatggcgatcaagaccctatggggcagactagtttcgagcatctgaaacagctcccgaaccaccgggtcttgattatgaaaggagctggccatccctgctatctagacaaacccgaagagtggcataccggtctgctggacttcctgcagggactgcagtag

SEQ ID NO: 24949 - DNA, 1491 bp, synthetic construct
  source 1..1491: mol_type = other DNA; note = Synthetic coding sequence
atggaccaggactacgagcggcggctgctgcggcagatcgtgatccagaatgagaacacaatgcccagggtcacagagatgcgcagaactcttacccctgcatcctcccctgtgagctctccctccaagcatggagatcggttcatcccgtcaagggccggagcaaattggtccgtgaactttcacagaattaacgagaacgaaaaatccccttcacagaatcggaaagctaaagacgccaccagtgataacgggaaagacggtctcgcttattcagccctcctgaagaacgagctcctcggcgctggaattgaaaaggtacaggacccccagacagaggataggaggttgcaaccatcaacacctgagaagaaaggcctgttcacatactcactatctactaaacgctccagcccggatgacggtaatgatgtcagcccctatagcctgagccccgtttccaacaaatcccagaaactgttaagatcaccacggaagcctactcgcaagattagcaagatccctttcaaggtgctggatgcaccagagctgcaggacgatttctacctcaacttggttgactggtcctctctgaatgtgctgtcggtgggactgggcacctgcgtctatctgtggtcagcttgcacctcccaggtgacaagactttgtgatctgagtgttgaaggagatagcgttacctctgtaggctggagcgagcgagggaaccttgtggccgtgggtactcataaggggtttgtccaaatatgggacgcggcagctgggaaaaagctgagcatgttagagggtcacacagcgcgggtaggggccctagcctggaacgctgagcaattgtcctctggctcacgggaccggatgatcctgcagcgcgacattagaacgccacccctacaatcagagcgaagactgcagggacatagacaagaggtgtgcggcctgaagtggtccactgaccatcagttactcgcgagtgggggtaacgataataagctactggtttggaatcactcttcactctcaccagtgcagcagtacactgaacatctcgcagccgtaaaggccatcgcttggtccccccaccagcacggattactcgcaagcggtggagggaccgccgaccgctgtattcggttttggaacactctcaccgggcaacccctacagtgcattgataccgggtcccaggtgtgcaatctggcctggtctaagcatgccaatgaactcgtaagcacacacggatactctcaaaatcagatcctcgtgtggaaatatccctctttgacccaagtagccaaactgacaggccacagctatagagttttatacctcgccatgtcacctgatggggaggccatcgttacaggagcaggtgacgaaaccctgcgattttggaatgtattttcaaagacccgaagcacaaaggttaagtgggagtctgtttccgttttgaatctgttcacaaggatacggtag

SEQ ID NO: 24950 - DNA, 390 bp, synthetic construct
  source 1..390: mol_type = other DNA; note = Synthetic coding sequence
atggccgagctgatccagaagaagctgcagggcgaggtggagaagtaccagcagctccagaaagatctgagcaagtctatgtcaggacgccaaaaactagaggctcagctcactgaaaacaacattgtgaaggaggaattagccctcctcgatggcagcaatgtcgtattcaagctgctgggtcccgtgctggtgaaacaggagttgggagaagcccgcgccaccgtgggcaagcgactggactatattaccgcagagattaaaagatatgagtctcagttgcgagacctggaaaggcagagtgagcagcaacgcgagacgctagctcagcttcagcaagagtttcagcgggcccaggccgcaaaggccggagctccaggcaaggcctag

SEQ ID NO: 24951 - DNA, 888 bp, synthetic construct
  source 1..888: mol_type = other DNA; note = Synthetic coding sequence
atggagctgatccaggacaccagccggccccccctggagtacgtgaagggcgtccctctcataaaatattttgcggaggccctcggtcctcttcagtcttttcaagctcgccctgatgacctcttgattaacacctacccaaagtcggggaccacctgggtgtctcagattcttgacatgatttatcagggtggagatttagaaaagtgcaatcgagcaccgatttacgttagagtcccttttctggaggttaacgatcctggggaaccctcgggtttggaaacacttaaagacaccccaccaccacgcctaatcaagtcgcacctgcctcttgcactgcttccgcagaccctgttggatcagaaggtgaaggtagtgtatgtcgccaggaacccaaaagatgtcgccgtgtcatactaccacttccaccgtatggaaaaggctcatcctgagccaggcacttgggacagttttctggagaaattcatggccggggaggtttcttatggctcctggtaccagcacgtccaggaatggtgggagctctctcggacccatcccgtgctgtacctcttttatgaggacatgaaggagaatcctaagcgcgagattcagaaaattttggaatttgtcggccgctcactgccagaggagacaatggatttcatggtgcagcacacgagttttaaagagatgaagaagaacccaatgaccaattacaccactgtgccacaggagctcatggaccatagcatttccccatttatgcggaaaggaatggcgggagattggaaaaccactttcacagtagctcaaaatgagcgcttcgacgccgattacgccgaaaagatggccggttgtagcctgtctttccgatctgaactgtag

SEQ ID NO: 24952 - DNA, 888 bp, synthetic construct
  source 1..888: mol_type = other DNA; note = Synthetic coding sequence
atggagctgatccaggacaccagccggccccccctggagtacgtgaaaggcgttcccctcattaaatattttgccgaagccctgggccctctccagagtttccaagcacgcccagatgatcttctaattaacacgtatcccaagtctggtacaacatgggtgtcacaaatcctggatatgatatatcagggaggtgatctggagaagtgtaacagagcacctatttacgtgagggttcccttcctagaagtgaacgaccccggtgagcctagtggtctcgaaacccttaaagacacacctcctccgcgactcattaagtcccatctccccttagccttgctaccacagacgttgctggaccaaaaggtgaaagtggtttacgttgcccgcaatcccaaagatgtggccgtcagctattaccatttccatcggatggaaaaggctcatcccgagcctggcacgtgggactccttcctggaaaaattcatggcaggagaagtttcctacgggagctggtatcagcatgtgcaagagtggtgggaactgagcagaacccatcccgtgttatacctgttctatgaagatatgaaggaaaaccccaagagggagatccaaaaaattcttgagtttgtgggaaggagcttgccggaagaaaccatggactttatggtgcagcacacatcatttaaggagatgaagaagaatcctatgacaaactatacaaccgtgccacaagagctgatggaccacagcattagccctttcatgcgcaagggtatggcaggagattggaaaactacattcaccgtcgcacagaacgagaggtttgatgccgactacgccgagaaaatggcggggtgttccttgtctttccggtccgagctttag

SEQ ID NO: 24953 - DNA, 354 bp, synthetic construct
  source 1..354: mol_type = other DNA; note = Synthetic coding sequence
atgctgtgctggggcaacgccagcttcggccagctgggcctgggcggaatagacgaagagatagtgctcgagcctagaaaatcagatttcttcatcaataaaagagtccgagatgtcggatgcggcctgagacacaccgttttcgtcttggatgatggaacagtgtacacatgcggatgtaacgacctgggccagcttggtcacgagaagagccgcaagaagccagagatacttaaggtatgccagatcagccggctgtacagattgctagtggtaaccatcatccatcttcatttcttgaagcaggttaaaagctcagtgggcgaccggatcaatatggcgaattgggtctag

SEQ ID NO: 24954 - DNA, 3174 bp, synthetic construct
  source 1..3174: mol_type = other DNA; note = Synthetic coding sequence
atgctgtgctggggcaacgccagcttcggccagctgggcctgggcggtattgacgaggaaatcgttcttgagcctcgaaagagcgatttcttcatcaacaaacgggttagagatgttggatgcggattaaggcatactgtctttgtgttagacgatggcacagtatacacgtgtggctgcaacgacctggggcagctcggacacgaaaagagcagaaaaaaacccgaacaggttgtggccctggatgcacaaaacatcgtggccgtttcctgcggagaagcccacactctggcattaaacgacaagggacaggtgtacgcatggggtctcgactcagacggacaacttgggctcgtgggttccgaagaatgtattagggtgccacgcaatattaaatccttaagcgatattcagattgtgcaggtcgcgtgcggatactaccacagcctggctctgtccaaggccagcgaggtgttctgctgggggcaaaacaagtatggacaactgggactgggcacagattgcaaaaagcagaccagcccgcaactcctgaagtctctgttaggcatacccttcatgcaggtcgccgctggcggggctcatagctttgtgctgaccctgtctggtgcaatcttcggctggggccgcaacaagttcggccaactcggcctcaatgacgagaatgaccgttatgtcccgaacctgcttaagtcactcaggtcacaaaagatcgtgtatatatgctgtggcgaggatcacacagctgcactaaccaaggagggaggggtctttacgtttggtgccggcggctatgggcagttaggccataattcaacatctcacgaaatcaatcctcggaaggtatttgaactgatggggagtattgtgaccgagatcgcttgcggacgacagcacactagtgcatttgtaccaagcagcggaagaatatattcctttggcctcggcggtaacgggcaattaggcaccggaagcactagtaataggaaatcacccttcaccgtgaagggcaactggtacccatataacggacagtgtttgcctgatattgactccgaggagtatttttgcgtcaagaggatcttttctggaggcgatcaaagcttcagccattactcctctccacaaaattgcgggccccctgacgactttcgatgccccaatccaactaaacagatatggacggtgaacgaagctctgattcagaagtggctgtcataccccagcgggcgcttccccgtcgagatcgctaacgagattgatgggacattttccagttcaggatgtttaaatgggtcatttctagcggtttccaatgacgaccattaccgaacaggtaccaggttctccggcgtcgacatgaacgccgctaggctcctgtttcacaagctgatacaacccgatcatcctcaaatatcgcagcaggtggcagccagcctagagaaaaacctgatacccaaactgaccagctcactccccgatgtggaagccctgaggttctaccttacgctacccgaatgtcctctgatgagcgattctaataatttcactacaatagctattccctttgggacagccctcgtgaacttggagaaggctcctctgaaagtgctggaaaattggtggagcgtgctcgagccccctctatttctgaaaatcgtcgagctgttcaaggaggtagtagttcacttgctgaaactgtataagatcgggattccaccttctgaacggcggattttcaactcatttctgcacacagcactgaaagtgctggaaatcctgcacagggtgaacgaaaagatggggcagatcatccaatatgataaattctacatccacgaggtacaggagttgatcgatatccgtaatgactacattaactgggtgcagcaacaggcttatggcatggatgtaaatcacggcctgaccgagttggccgatatccctgtcaccatctgcacctacccttttgtgtttgatgcccaggccaaaacgacccttttgcagaccgatgccgtactacagatgcagatggcgatcgaccaggcccacaggcagaacgtgtcctctctgttcctgccagtgattgagtccgttaatccgtgtttgatccttgtagttaggagggagaatattgtcggagacgcaatggaagtactccgaaaaaccaagaatatcgattacaagaagccactgaaagtgatctttgtaggcgaggatgcagtggacgctggtggcgtcagaaaagagtttttccttctgattatgagagagcttttggacccaaagtacggtatgttcagatactacgaggattcccgcctgatttggttttccgataaaacttttgaggacagcgacctctttcatctgattggggtgatttgtggacttgcaatatacaactgcacaatagtggacttgcactttcccctcgccctttataaaaagctccttaagaagaaaccaagcctggatgacctgaaggagctcatgcccgatgtgggaagaagcatgcagcagcttcttgattatccagaagatgatattgaagaaactttctgcttgaatttcactattactgtggagaactttggtgccaccgaggtcaaggaactggttctgaatggtgccgacacagcagtaaataagcagaacagacaggagttcgtggacgcctatgtggattatatctttaacaagagcgtcgcaagccttttcgatgcttttcacgccggattccataaagtgtgcggcggcaaagtactgctcctcttccagcctaatgaactccaggcaatggttatcggcaacacaaattatgattggaaggaattggaaaaaaatacagagtataagggcgagtattgggctgagcatcctacgattaagatcttctgggaggtctttcatgaactgccattagagaaaaagaaacaattcctgttgttcctgacgggatctgacagaattcctatcctggggatgaaatccctgaaactagtgattcagagcacagggggcggggaagaatatctccctgtgagccatacctgctttaatctgttggacctgcccaagtacaccgagaaggaaactctcaggagtaaactgattcaagcaattgaccacaacgaggggttcagcctcatctag

SEQ ID NO: 24955 - DNA, 1080 bp, synthetic construct
  source 1..1080: mol_type = other DNA; note = Synthetic coding sequence
atgagctaccggcgggagctggagaagtaccgggacctggacgaggacgagattctcggcgccctgaccgaagaggaactgaggaccctggaaaacgaattagacgaattggatcccgacaacgctttgttgccagccggcctgcgccaaaaagaccagaccacgaaagctcccactggaccctttaagagagaagagctgctggaccacttagagaagcaggcgaaggaatttaaagatagggaggacctcgttccctatactggcgagaagaggggcaaagtctgggtgccgaaacagaagcccctcgatcccgtgcttgagagcgtgacactagaacccgagcttgaggaggcgttagcaaatgcatctgacgcagaactgtgcgacatcgcggccatcctgggcatgcacacactcatgagtaatcagcagtactaccaagccctgtcctcctcctcaataatgaataaggagggtttgaattctgtgatcaagccaactcagtacaagcccgtcccggatgaagaacccaacagcaccgatgtagaggagactttggagaggattaagaacaacgacccgaagcttgaggaggtgaatctcaacaacataaggaatatacccatcccaactcttaaagcatacgctgaagcactgaaagagaactcctacgtcaagaaattctccatcgttggaactaggagcaacgatcccgtggcttatgcgctcgcagagatgctgaaagaaaacaaagtgctcaagacgctgaacgttgagagtaattttatttccggcgctggcatcctgagactggtcgaagccctgccctacaatacctctctcgtggagatgaagattgacaatcagagccagcctttgggcaataaggtggagatggaaattgtgagcatgttggagaagaacgccacacttctgaaatttggctatcacttcacccaacaagggccccgactcagagcctcaaatgctatgatgaacaacaatgatctggtgagaaagaggaggctggcagacctgactggtccaattatccctaaatgccggtcgggggtttag

SEQ ID NO: 24956 - DNA, 714 bp, synthetic construct
  source 1..714: mol_type = other DNA; note = Synthetic coding sequence
atggaggtgatggagggccccctgaacctggcccaccagcagagccggcgggcggatcgcctacttgccgcgggcaagtatgaagaggcaattagttgccataagaaggcagcagcctacctcagtgaagccatgaaattgactcagagtgaacaggcccatctcagtttagagctccagcgcgactcccacatgaagcagctgctactgattcaggagaggtggaagcgcgcccagcgggaggaacgcctcaaagcccagcagaacaccgtgttgtacctgctgcaacagaagagcgaaccagcggaaccttgcattggatctaaagcaccaaaagatgacaagactattatagaggagcaagctacaaaaattgcagacctcaagcgacacgtggagttcctcgtggccgaaaacgagcgccttagaaaggagaataagcagctaaaggctgaaaaggcaagacttctgaagggccctattgagaaagagttagacgtcgatgcagacttcgtggaaacgagcgaactatggtctctgcccccacacgccgagacagcaacagcctccagcacctggcagaaatttgcggctaatacggggaaagccaaggatattcccatcccaaacctgccccctctagatttcccgtcacccgagctgcccctgatggagctatccgaagatatcctaaagggctttatgaacaattag

SEQ ID NO: 24957 - DNA, 1458 bp, synthetic construct
  source 1..1458: mol_type = other DNA; note = Synthetic coding sequence
atgaacggcaccctggaccaccccgaccagcccgacctggacgccataaagatgttcgtggggcaggttcctaggacgtggtccgagaaggatctgagggagctgtttgaacagtacggggcggtgtacgaaataaatgtgctcagggataggagtcagaaccccccgcagtcgaaaggctgttgctttgtcacattttataccagaaaagctgcactggaggctcagaatgctctgcacaacatgaaagtcttgccggggatgcaccacccaattcagatgaaaccagctgactctgaaaaaaacaacgtggaggaccgcaaactgtttatcggcatgatcagcaaaaaatgcaccgaaaatgacattagagtgatgttctcctcatttgggcaaatcgaggagtgtaggatcctccggggcccagacggactcagtcgcgggtgtgcattcgtgaccttcactacaagggccatggcccaaactgctattaaggccatgcatcaggcccagacgatggaaggctgtagtagccccatggtggtgaagttcgccgacactcagaaggacaaggagcaaaagagaatggcacagcaactgcagcagcagatgcagcaaatttccgctgcctccgtgtggggcaatctggctggtctcaacaccctgggtcctcagtatcttgccctgtatttacaacttttacagcagactgcctccagcggtaacttaaatactctgagttctctccatcccatgggcggccttaacgcaatgcaactgcagaatctcgctgcactggccgctgctgcctccgccgctcaaaacactccctccgggacgaatgccctgaccaccagctctagtcctttatccgtgttgacttcctctggaagcagcccaagctcctccagttccaatagtgtcaaccctattgcttcattaggggcattgcaaacactagctggcgcaaccgcgggcctcaatgtcgggtcactggccggcatggccgccctgaacggggggcttggatcttcgggtctgtcaaacggcacagggagcaccatggaagccttgacccaggcctattccggcattcaacagtatgctgctgctgctctgcctacactgtataatcagaatcttttgacccaacaatcaatcggggcagctggttctcagaaggaaggccctgagggtgccaacctttttatatatcatctgccacaggagttcggcgatcaggatctgctccagatgttcatgccattcggcaatgtagtcagtgcaaaagttttcatcgacaagcagaccaatttaagcaagtgctttgggttcgtgagctacgacaaccccgtctcagcccaggcagcaatacaaagcatgaatgggttccaaatcgggatgaaaagactcaaagtccagctaaaacgaagtaagaatgattctaaaccttactag

SEQ ID NO: 24958 - DNA, 1452 bp, synthetic construct
  source 1..1452: mol_type = other DNA; note = Synthetic coding sequence
atgaacggcaccctggaccaccccgaccagcccgacctggacgccatcaagatgtttgtcggtcaggttccacggacttggagtgaaaaggaccttcgtgaattgttcgagcagtacggagccgtgtacgaaattaatgtgctgagagacagatcccagaaccctccacagtctaaaggttgttgcttcgtgacgttctataccaggaaagccgctctggaagcccagaatgcactgcataatatgaaagtcctgcccggcatgcaccaccccatccagatgaaaccagcagacagcgagaagaataatgctgtggaggatcggaaactgttcatcggaatgatcagcaagaagtgcaccgagaatgatatccgtgtgatgttttcctcctttgggcagatagaggagtgccgcattctgcggggtccggacggtctgagtcgcggctgcgcctttgtgactttcaccacacgggccatggcacagaccgcaattaaggctatgcatcaggctcagacaatggaaggatgtagtagccctatggtggtcaagtttgcggacactcaaaaggacaaagagcagaaacgcatggcgcagcagcttcagcagcagatgcagcaaatcagtgctgccagtgtgtggggtaaccttgccggcctcaataccctgggaccacagtatctggcattgctgcagcagactgctagttccggaaacctgaatacactgagcagcttgcacccaatgggaggattaaacgcaatgcagttacagaatctggcagctcttgccgccgcggcaagcgcggcacaaaataccccaagtggaaccaatgcccttacaacctcctcgtcgcctctgagtgtgcttacaagttccgcggggtcatctccttcgtcaagttcttctaacagtgttaacccaatagcctctttgggagcattacagacactagccggcgcgacggccgggctcaacgtggggagtctcgcaggaatggcggccctgaatggcggcctcggaagctccggtctctccaatggtactgggtcaacaatggaggccctcactcaggcgtactctgggatccagcaatatgcggccgctgctctgccgacgctctacaaccaaaatctattgacacagcaaagcatcggcgccgccggatcgcagaaggaaggccccgagggtgcgaacctctttatctatcatttgccgcaggagttcggtgatcaagacttactccagatgtttatgcccttcggtaacgtcgtaagtgcaaaagtgttcattgacaaacaaacaaatctgtctaagtgtttcggatttgtctcctacgacaatccggtcagcgcccaagcagcaatccagtctatgaatggatttcaaatcgggatgaaacgccttaaggtccagctgaaacgatccaaaaacgatagcaagccgtactag

SEQ ID NO: 24959 - DNA, 3570 bp, synthetic construct
  source 1..3570: mol_type = other DNA; note = Synthetic coding sequence
atggacgacaagggcgaccccagcaacgaggaggcccccaaggccatcaagccgaccagtaaagagttccgaaagacttggggattccgccgaactacgatcgccaagagggaaggcgcgggagacgcagaagctgacccccttgagccccccccaccacaacagcagttgggactgtcacttagaagaagcggccggcagcctaagcgcactgaacgcgttgaacagtttttgaccatcgcacgccggaggggtcgtaggtcaatgccagttagcctggaggactcgggggagcccacttcgtgccccgcaacagatgccgaaacagcttctgaaggatccgtcgaaagcgcctcggaaacacgctccggaccacagtcggctagcaccgccgttaaagagaggcctgctagcagcgagaaggtgaaaggaggagacgaccacgatgacactagcgattctgatagcgacggtctgaccttgaaggaacttcagaataggttgcggagaaaaagggagcaagagccgaccgaaaggcctctcaaaggaatccagtctagactgcgcaaaaaacgaagagaggaggggccagccgagaccgtcgggtccgaagctagcgataccgtcgaaggagtgttgcctagcaagcaggaaccagaaaatgaccaaggtgttgtttctcaggcaggcaaggatgaccgggagagcaagcttgaaggtaaagccgctcaagatatcaaggacgaggagcccggtgatctgggacgcccaaaaccggaatgtgagggatacgaccccaatgctttgtactgtatctgccgccagccccacaacaatcgatttatgatttgttgtgaccgctgtgaagagtggttccacggcgattgcgttggcataagtgaagcccgcggccgcctcctagaacggaacggtgaggattatatttgccccaattgcaccatcctgcaggtacaggacgaaacccatagtgagacggctgatcagcaagaggcaaagtggcgccccggcgatgcggatggcacagattgtacgtcaatcggtacaattgaacagaagagttccgaagatcaaggaataaaggggcggatcgagaaagccgcaaatcccagcggtaaaaaaaagctgaagattttccagcccgtcatcgaggcaccaggtgctagtaagtgtattggccctggctgttgtcatgtcgctcagcccgatagcgtgtattgctctaacgactgtatactgaaacacgccgccgcaaccatgaagtttctgtcttctggtaaggaacagaagccaaagccaaaagaaaaaatgaagatgaagcccgagaaaccctccctgcctaagtgcggcgctcaggcaggaataaaaataagctccgtccataagagacccgctccggagaaaaaggaaacaactgtgaaaaaagccgtggttgtgcccgccaggtccgaggccctgggcaaggaggccgcttgcgaatcctcaacaccctcctgggcctctgaccacaactacaatgccgtgaagcctgagaagaccgctgcaccaagtccttctttactgtataagtcaaccaaagaggatcgccgttccgaggagaaggccgcagctatggccgccagtaagaaaactgcgccacccgggagtgcagtgggaaagcagcctgccccaagaaatctagtgccgaaaaagagctcctttgctaatgtggcagccgctacacctgccataaaaaagccaccatcagggtttaaaggtaccatacccaagaggccctggttaagtgctacgccaagcagtggggcatcggccgcacggcaggcaggaccagcaccagctgccgccaccgctgccagtaaaaagttcccaggcagcgcagcgttggtaggagccgtgagaaagccagtcgtgccgtccgtccctatggcctccccagccccaggacgcctgggagctatgagcgcagcgccctcgcaacctaacagccaaatcagacagaacatcagacggtccttgaaggaaatcctgtggaaacgtgtgaatgacagtgatgacctcattatgacagagaacgaagttggcaaaattgcacttcacatcgagaaggaaatgttcaaccttttccaagtgacagacaacagatacaagagcaaataccgatcaatcatgtttaatttgaaggatccaaaaaaccagggactttttcatagggtgctccgtgaggaaatctctctcgccaaattagttcgacttaaacccgaagagctcgtctccaaggagctgtctacctggaaggaacgaccagcgcgaagtgtgatggagtccaggacgaaacttcacaatgaatcaaaaaagacagccccgagacaggaagcaatccctgacctggaagactcccctcctgtgagcgacagcgaggagcaacaagaaagcgccagagccgtgcctgagaagtccactgccccattgttggatgtgttttcaagtatgctgaaagacactacatcccagcatagagcgcatctatttgatttgaattgtaagatctgcacaggccaggtgccaagcgcagaggatgaaccagcgccaaaaaagcaaaaactgagcgctagcgtcaaaaaggaggacctaaagtcaaaacacgactcatccgcaccagatcccgcccctgactcagcagacgaggtgatgcccgaagcggtcccggaggtggcatctgagccggggctagaatctgccagccatccaaacgtggatcgaacgtattttcctgggccccccggggatggacatccggagcccagcccattagaggacctgagcccatgcccagcctcctgcgggagtggggtggtgactacagtgaccgtctctggcagggatcctcgtaccgcccccagtagttcatgtaccgcagttgcctccgctgcatcccggccagactccactcatatggtggaagctcggcaggatgtccccaaaccagtgctcacgtccgtgatggtgccaaagagcatactggccaaacccagtagtagtcctgaccccaggtacctgagcgtgcccccctctccaaacatatccacctcagaatcgaggagccccccagagggggatacgaccctcttcctgagccggttatccaccatttggaaagggtttataaacatgcagagtgtagcaaagtttgtgaccaaagcatatcctgtgtccggctgtttcgattatctgagcgaggatctgcctgacactattcacattggaggtaggattgcgccaaagaccgtctgggactatgttggtaaactcaagtcctcagtttccaaggaattgtgtttgattcgatttcatcctgccacagaagaggaggaggtcgcctatataagcctatacagctacttcagcagccgaggccgtttcggagtggtggctaataacaaccgccatgtgaaagatttgtacctgattcccctctcggctcaagaccctgtaccctccaaactacttccgtttgagggccctggcaagaggaggctatctggctggcgttag

SEQ ID NO: 24960 - DNA, 3570 bp, synthetic construct
  source 1..3570: mol_type = other DNA; note = Synthetic coding sequence
atggacgacaagggcgaccccagcaacgaggaggcccccaaggccatcaaacccacaagcaaagaattcagaaaaacatggggatttcgaagaacaacaattgcgaaaagggaaggtgctggtgacgccgaggcagaccccctggaacctccaccaccccagcagcaactcggcctcagtctgcgaaggagcggaagacaacccaagcggaccgagcgcgttgaacaatttcttactatagctcggcgacgcggcagaaggtccatgcccgttagcctggaagactcaggggagcctacttcctgtcctgcgactgatgcggaaaccgcctcagaggggtcggttgagagcgcgtctgaaacaaggtccggaccccaatctgcctccaccgcggtgaaggagcggccggcaagctcagagaaggttaaaggcggcgacgatcatgacgatacgtcagactcagattccgacggcttaaccttaaaagaacttcagaatcgacttagacgaaaacgcgagcaggagcctacggaacgccccctcaaaggaatccagtcccggctgagaaaaaaacgccgcgaggaggggccagcagagaccgtaggctccgaggcttctgacacagtagaaggagtgctgccctccaaacaagagcccgagaatgatcagggtgtggtatctcaggcaggtaaggacgatcgggagagcaaactcgaggggaaagccgcccaggacattaaagacgaagaacctggcgatctgggacgtcctaagcctgaatgtgaaggttacgatcctaacgccctctattgtatctgccgccaaccccataacaataggttcatgatttgctgtgatagatgcgaagaatggtttcatggagattgcgtgggaattagcgaagctagaggcaggctgctcgaacgtaacggggaggattatatctgccctaattgcaccatcctgcaagtgcaggacgaaacccacagtgagacagcagaccagcaagaggctaaatggcgcccaggagatgcagacggcacagactgcacgagcattggcactattgagcagaagtctagcgaggatcagggcataaagggacggatagagaaagctgccaatcctagcggtaaaaagaaattaaaaatctttcaaccggttattgaggctcctggcgcctccaagtgcattggaccgggctgttgtcatgttgcccagcctgacagcgtgtattgttctaatgactgcattctcaagcacgccgcagctactatgaagttcctgagctctggcaaggagcaaaaacccaaaccgaaggagaaaatgaagatgaagccagagaaaccaagcctccctaagtgcggggcacaggccggtataaagattagctcagtccacaaacgcccagctccagagaagaaggagaccaccgtcaaaaaagctgtcgtagttccagcccgctctgaagcgttgggcaaggaagccgcctgcgaaagcagcaccccatcatgggctagcgatcacaactataatgctgtgaaaccagaaaagaccgcagctccaagtccgagtcttctgtacaaatctaccaaggaggatagacgctcagaggaaaaggctgctgcgatggccgccagtaaaaaaactgccccgcctggttccgcagttggcaagcagcccgctccccgaaacctggtgcctaagaaaagttccttcgccaacgtggcagccgctaccccagccatcaaaaagccacccagtggctttaaaggaacaattcccaagcggccatggctcagcgctacaccatcttccggtgcctctgctgcacggcaggctggacctgcaccggctgctgccaccgcagcctccaagaagttccccggttcagccgctctggtgggagctgtcaggaagcccgtcgtaccttctgtcccaatggcctctcccgctccgggcagattaggcgccatgagtgctgccccctctcaacctaacagccagatccgtcagaacatccggagatcgcttaaggaaattctgtggaaacgcgtcaacgattcggacgatctcattatgaccgagaacgaggttgggaaaatcgccctgcacattgagaaggagatgtttaatctgtttcaggtgactgataatcgctacaaaagcaaatatcggagcatcatgttcaatctgaaggacccaaagaaccaggggctttttcatcgcgtgttgagagaggagatctctcttgcaaaacttgtacgcctaaaacccgaagagctggtgtctaaagaactgtccacctggaaagagcgcccagctaggagtgtgatggagagtagaacaaaactgcacaacgagtctaaaaaaaccgcaccacgtcaggaggctatcccagacctggaagactccccccccgtgtcggactccgaggaacagcaagaatccgcacgggcggtgccagaaaagtcaaccgctccccttcttgatgtgttctcctctatgctgaaggacacaacgtcccaacacagagcccacctgttcgacttaaattgtaagatttgtacagggcaagtgccaagtgcagaggatgagcccgccccgaagaaacaaaaactgtctgcatccgtgaaaaaagaagaccttaagtccaagcacgattcttccgctcccgacccagcccctgactctgctgacgaggtaatgcccgaagccgtgccagaggtggcctcggaacctggcttggaaagtgcttctcatcctaacgtggatagaacatatttcccaggcccacccggtgatgggcacccagaaccatcccccctggaagatttaagtccctgtcctgcttcttgcggctccggagtggtgaccacagtcaccgtgagcgggcgagacccgcgcaccgcacctagttctagctgcacagcagtggctagcgcagcctctcgacccgattctacacacatggtggaagcccggcaagacgtcccaaagcccgttctgacatcagtcatggttcctaagagcatactcgctaaaccttcttcaagccctgacccgagatatctcagcgtccctcccagtcctaacattagtacaagtgaatccaggtctccccctgagggagataccaccctctttctgagccggctctcaactatatggaaggggtttataaatatgcagagcgtggccaagttcgtcactaaagcctatccagtcagtgggtgctttgactacctgtcggaggacttgccggatacaattcatattggtggacgcattgccccaaagacagtatgggattatgttggaaaactaaaaagctctgtttctaaggaactgtgtctcatccgattccatcccgcaacagaggaagaagaggttgcctatatttcactctatagctatttttcatcacgcggccgattcggtgtggtggccaataataatcgccacgtgaaagatctatacttaatcccgcttagtgcccaggaccctgtgccttccaagttattaccatttgaaggtcccgggaaacgaaggttgtcgggttggcgctag

SEQ ID NO: 24961 - DNA, 6723 bp, synthetic construct
  source 1..6723: mol_type = other DNA; note = Synthetic coding sequence
atggacgacaagggcgaccccagcaacgaggaggcccccaaggccattaagccgacttctaaagaatttcgaaaaacctggggatttaggagaaccacaatcgctaagagagaaggggccggcgacgctgaagcagaccccctggaacctcccccgcctcagcagcagcttgggctgagcctgaggagaagtgggaggcagcctaagcggacagagagggtcgagcagtttctgacaatcgctcgtcggcgggggcgcaggtctatgccggtgtccctggaagattctggagaacctacctcctgcccggccactgatgctgaaaccgcttccgagggctcagtggaatcggcctcagagaccagaagcggccctcaaagtgcctctaccgctgtcaaagaaaggccagcaagctcagagaaagtcaaaggaggggacgaccatgatgatacctctgatagcgacagtgacggattgacccttaaggaattacagaataggctcagacggaagcgggaacaggaacccaccgagcggcctcttaagggaatccagagtaggctgcggaagaagcggcgagaagagggccccgccgagacggtgggctccgaggccagcgacaccgtcgaaggggttctgccaagcaagcaagaacctgaaaatgatcagggcgtggtgtcccaagcaggaaaggatgacagagaatccaaattagaaggcaaggccgctcaagatatcaaagatgaggagcccggggatctgggacggcccaaaccggaatgcgagggatatgatcctaatgccctctattgcatctgccgccagccacataataaccggttcatgatctgttgtgaccggtgtgaagaatggttccacggggactgcgtgggaatcagcgaagcccgaggtagactgctcgagcggaatggagaggattatatttgccccaactgcacgatcctgcaggttcaggatgaaacccacagtgaaactgcggaccagcaggaggctaagtggcggcctggggacgccgatggaacagattgtacatcaatagggactatcgaacaaaagtctagcgaggatcaagggatcaagggacgtatcgagaaagctgccaacccatcaggcaagaagaagttgaagattttccagccagtgatcgaagctcctggcgcttctaagtgtattggaccgggctgttgtcacgttgctcagcccgactcagtgtattgctcaaacgactgtattcttaagcacgccgccgccactatgaaatttctgagtagtgggaaagaacagaagcctaagcctaaggaaaaaatgaaaatgaagcctgagaagccctcactgcctaagtgtggagcccaggcaggtataaagatatcttccgttcacaaaagacccgcccccgaaaagaaagagacgacagtgaagaaagctgttgtagttccagcccgtagtgaggctctgggcaaagaagcagcctgcgaaagcagcacgccgtcctgggctagcgatcacaactacaatgcagtgaagccggagaaaaccgcagcccccagcccatccctgctatataaatcaacgaaggaagatcgtagaagcgaagaaaaagctgcagctatggctgcatccaaaaaaaccgcacctccgggcagcgccgtggggaaacagccagcacctcgtaatctggtcccgaaaaaatctagcttcgctaatgtggctgcggcaacaccagcgatcaagaaaccgccaagcggctttaagggcacgatccctaaacgtccctggctgtccgccaccccctcctccggtgcgtctgctgccaggcaggcggggccagcgccggccgcggcaactgcggcctccaaaaagtttcctgggtccgctgccctggtcggggctgtgcgcaaacccgtcgtgccgtctgtgccaatggccagtccagcaccaggcagactgggcgctatgtctgcagctccctcacaacccaactcccagatcaggcagaatattaggcgatctctcaaggaaatcctgtggaagagagttaacgacagcgacgatctcattatgaccgaaaatgaagtgggaaaaattgccttgcacattgagaaggaaatgtttaatttattccaggtcactgataacagatataaatccaaatacaggagcattatgttcaacctaaaggatccgaagaatcagggtctctttcacagggtgctacgcgaagagatctcgcttgccaagctggtgaggttaaaacccgaggagctcgtctcaaaggagctctctacatggaaggagagacctgcccgctcagtcatggagtcaagaaccaaactacataacgaatccaagaagacagcccctagacaggaggccatcccagaccttgaggatagcccccctgtgtcggactctgaggagcagcaggagtcagcaagggccgttcctgagaaatcaactgctccattattagatgtattctcctctatgttaaaggatacaactagtcagcatcgcgcacatctattcgatctgaattgtaagatctgtactgggcaggtaccctcagcagaagacgaaccagcccccaaaaaacagaaacttagtgcctcggtgaaaaaagaggacctgaagtcaaagcatgactcatctgctcccgacccggctcccgatagtgcagacgaggtgatgcccgaggctgtgcctgaggtagcctcggagccaggactggagagcgcctctcaccccaacgttgaccggacttacttccccggaccacctggagatggacacccagagccgtctccattggaagacttgagcccctgcccggccagctgtggctcaggagtggtgacaaccgtcactgtcagcggccgggatcctcgcaccgccccgtccagctcgtgcactgccgtcgcatctgctgccagccgccccgattccacacatatggtcgaggcccgtcaggacgtgcccaaaccagtcttaacctcggtcatggtccccaagtctatccttgccaagccctctagctcaccagatcctagatatctctcagtgcccccttctcctaatatctccacctccgagtctaggtccccaccagagggagataccaccctctttctctctagactgtccactatctggaagggtttcattaacatgcagtcagtagccaagttcgtcactaaagcttaccccgtgagcggctgcttcgactatctgtccgaagacctgccggataccattcatattggcggcaggatcgcccctaagacagtgtgggattacgtgggcaaactgaaatcttcggtttccaaggaactgtgcctgatcagattccaccccgccacagaagaagaagaagtggcttatatcagtctgtacagttattttagtagtaggggtcgttttggcgttgtggctaataacaatcgccacgtgaaggatttgtatcttatcccattgagcgcacaggaccctgtgcctagtaagctccttcccttcgaagggccaggcctcgagagtccccggcccaatatcattctgggcctggtgatttgccaaaaaatcaaacgtcccgccaattccggggaactggataagatggacgaaaaacggacccggcttcagccagaggaggcggatgtgccagcgtatcccaaggtggcaacagtgccacagtcagagaagaagccaagcaaatatccgctgtgttctgctgacgctgctgtctccacgactccccctggctctcccccacccccaccccccctccctgaaccccctgtccttaaggtgctttcgagtttaaaacccgccgctccatctcctgcgacggcagccacgaccgctgccgccgcaagcacagcagcttcctccacagcaagctccgcgtcaaagactgctagcccgcttgaacatattcttcaaacactcttcgggaaaaagaagtcttttgatcctagcgcacgcgagcccccggggtcaactgccggtctgcctcaggaaccaaagacgacagccgaggatggggtgcccgccccgccgctcctggatcctatagtgcagcagtttggccagttctctaaggataaagccctggaggaagaggaggacgaccggccctacgaccccgaggaagagtacgaccctgaaagagctttcgacacgcagttggtcgagagaggcagacgccatgaagtagaaagagcccctgaggcagcagccgccgagagagaggaggtggcatatgacccggaagacgagacaatcctggaggaggccaaagttacagttgacgatcttccgaatcggatgtgcgccgatgtgcgaagaaacagcgtggaacggcccgctgaacctgtggcaggagcagccaccccctccttggtcgagcaacagaagatgcttgaggagttgaataagcagattgaagaacaaaaaaggcagctcgaagagcaggaggaggcattaagacaacagagagccgctgtcggcgtctctatggcccatttctctgtgtctgatgctctaatgtctcctccacctaaatcatcccttcctaaagccgagttattccagcaggaacagcaatctgcggataagccagcgtccctgccacccgcttctcaggcctcaaaccaccgggatccacgacaggcaaggaggctcgccaccgagactggcgagggagagggcgagccccttagtaggctgagtgcaaggggggctcagggtgctttgccagagagggacgccagccgcggtggcctggttggtcaggcccctatgcctgttccagaagaaaaggagcccgcctctagcccgtgggcttccggcgaaaagcctcccgctggatcagagcaggacggttggaaggctgagcccggcgagggcacgcgacccgccactgtgggcgattcttcggcaaggccagcacggcgcgtgttactcccgacacccccgtgtggggccctgcaaccaggctttcctctgcaacatgacggagaaagggaccccttcacctgccccggcttcgcttctcaggacaaggctcttggcagcgctcagtatgaggatcctaggaacctgcactcagccggtcggtcttcttctccggccggagagaccgagggtgatcgcgagccacaggccagacctggggagggtacagcgcccctgccaccaccgggtcagaaagtagggggttcccagcctcccttccagggccagcgggagcccggaccccacgctctcgggatgagcggactccatgggcccaacttcccaggtccgcgggggccggccccacctttccctgaagagaacatcgcttcaaacgatggacctcgtgggcccccacctgcaaggttcggagcgcaaaaaggtccaatcccatcgctattttctggacagcatggaccgcctccttatggggactctagagggcctagccccagctatcttggcggaccccggggagtcgcaccaagccagttcgaagaaagaaaagatccccatggcgaaaagcgcgagttccaggatgcaccttacaacgaggtgacaggagcgcccgctcagtttgagggaacagagcaagctccctttcttggctcacggggaggcgccccattccaatttggaggacaacgcaggccattgctgtcgcagttgaaggggcctaggggcggaccccccccaagccagtttggagggcagaggggacctccccctggtcattttgtaggaccacgcggaccccatccatcacagttcgagacagcgagagggccccaccccaaccagtttgaggggccccgagggcaggccccaaacttcatgccaggcccccgggggattcaaccccagcaattcgaggatcaacgcgttcacagcccacctagattcactaaccagcgggcccctgcacctctccaatttggcgggctgagaggctcagcaccttttagcgaaaagaacgagcagacccccagccgatttcattttcagggccaggctccccaggtgatgaagcccgggcctcggcccctacttgagcttccttctcaccctccccaacaccggaaagaccgctgggaagaggccggccctcccagtgctttgtcctcttctgcccctggtcaggggcccgaagccgacggacagtgggcttccgcggatttccgcgaaggtaagggacacgagtacaggaaccaaacattcgagggaaggcagcgtgagcgttttgacgtcggtcctaaggagaaacctctggaagaaccagacgctcaggggcgtgccagcgaggacagaaggagagagcgggagcgaggccgcaactggagccgcgaaagagattgggatagacctagagagtgggatcgtcaccgagataaggactcgagtagagactgggatcgcaaccgtgagcgctcagcaaatagagatcgcgagcgcgaggcggataggggtaaggagtgggatcggtcccgtgagcgctcaaggaacagggagagagagcgggacaggcggcgcgacagagataggtccagatcgagagagagagatcgtgataaagccagagacagagaaaggggacgggacagaaaggaccgatccaagagtaaggaaagcgcccgagatcccaaacctgaagcctcccgggcctcagatgccggtactgcttcacaagcgtag

SEQ ID NO: 24962 - DNA, 888 bp, synthetic construct
  source 1..888: mol_type = other DNA; note = Synthetic coding sequence
atggagctgatccaggacaccagccggccccccctggagtacgtgaaaggcgttccgctgatcaaatatttcgctgaagccctgggtccacttcagtcatttcaagcccggcccgacgatcttctaattaatacatatccaaagtccggcaccacttgggtgtcgcagatactggacatgatttaccagggaggagatctggagaaatgcaatagagcgcctatttacgtgagggttccttttttggaagtgaatgacccaggagaacctagcgggttggaaacattaaaagacaccccaccacctcggttaattaagtctcatctccccctggcattgctgccccagacactgttagatcaaaaggtaaaagtcgtgtatgtggctaggaaccctaaagacgtggctgtttcttactatcattttcatcgtatggaaaaagcccacccggagcccgggacttgggacagtttcctcgagaagttcatggcgggagaggtcagttacggaagttggtatcagcacgtgcaggagtggtgggaactatcccgcacccatccggtattgtacttgttctatgaagacatgaaggagaaccctaaaagggagatccagaaaatattagaattcgtgggcagatcattgcctgaagaaacaatggatttcatggtacaacatactagtttcaaggagatgaagaagaaccccatgactaactacacaaccgtgccacaggagctcatggatcactcaatttcccctttcatgcggaagggcatggctggggactggaagactacttttaccgttgcacagaacgaacgatttgacgccgactatgcagagaaaatggccggatgcagtctctcctttcggagtgaactgtag

SEQ ID NO: 24963 - DNA, 834 bp, synthetic construct
  source 1..834: mol_type = other DNA; note = Synthetic coding sequence
atggaggccgccgagaccgaggccgaggccgccgccctggaggtgctagcagaagtcgccggcatactggagccagtaggcctgcaggaagaagcggagcttccagcgaagatcctggtggagttcgtcgtagattcacagaaaaaggacaagctcctgtgctctcagcttcaggtcgcggacttcctgcagaacatcttagcgcaggaagacacagcaaaaggtctggatcccttggcatccgaggataccagtcgccagaaagctatcgccgcaaaggaacagtggaaagagttgaaggctacataccgagaacacgtagaggctatcaaaattggcctgacgaaagctttgacccagatggaggaagctcagagaaaaagaacgcagctgcgagaggcatttgagcagctccaggcgaagaaacagatggctatggaaaagcgccgggcggtgcagaaccaatggcagctgcagcaagaaaaacacctgcaacacctggctgaggtctctgccgaagtgagggaacgaaaaactgggactcagcaggagctggacagagtgttccaaaagctgggcaatttgaagcaacaagctgagcaagagcgtgataagctgcagagataccaaacctttctccaactcctttatacactgcaaggaaaactgttgttccccgaagcagaagccgaagctgaaaacctgcccgacgataaaccgcagcagcctaccaggcctcaagaacagtctacgggggacactatgggcagggatccgggagtctccttcaaggccgtagggctccagcccgcaggagatgtgaacctcccgtag

SEQ ID NO: 24964 - DNA, 1245 bp, synthetic construct
  source 1..1245: mol_type = other DNA; note = Synthetic coding sequence
atgggcaccgtgaccgaggacctgatccggcggaacgccgagcacaacgattgtgtcattttctcactggaagagctgagtctgcaccagcaggaaattgaacgcttggaacacatcgacaagtggtgtagagacctgaagatattgtatttgcagaataatctaataggcaaaatcgagaatgtgtctaagctgaagaaactcgagtatctgaatctggcccttaacaatattgagaaaatcgaaaacctggaagggtgcgaagagttggccaaactggacctcaccgtaaacttcatcggcgagctgtcttctattaagaacctccagcataatatacatctgaaagaacttttcctcatgggcaatccatgcgcttcattcgatcactacagggagttcgtggtggccactctgcctcagctgaaatggctcgacggtaaagagattgaaccctcggagcgaattaaagcactgcaagattattccgtcatcgaaccacagattcgcgaacaggaaaaagaccactgtctgaaacgagctaagctgaaggaggaggctcaacgcaagcaccaggaggaagacaaaaacgaggacaagcggtctaacgcagggttcgacgggaggtggtacactgatattaacgcaactctgagctccctggagagcaaagatcaccttcaggctcccgataccgaagaacacaacacgaaaaagttagataactccgaggacgacctcgaattctggaacaagccatgcctcttcactcctgagagccggctcgaaacactccgccatatggaaaaacagcgcaaaaaacaggagaagctgagtgagaaaaaaaaaaaagtaaagcctccccggaccctcatcaccgaagatggcaaggccttgaacgttaacgagccgaaaattgactttagcctgaaagataatgagaagcagataatacttgacctcgctgtatacaggtatatggatacatctcttatcgacgtcgatgtccagccaacttacgtgcgggtcatgattaagggcaaaccttttcagctagtcttgccagctgaggttaagccagacagtagcagcgctaaaaggtcccagacaacgggccatcttgtcatatgtatgcccaaggtgggagaggtgattaccggcggccagcgcgccttcaaatcgatgaaaaccacttccgatcgaagtcgtgagcagaccaacacatcctattccaccgggttttag

SEQ ID NO: 24965 - DNA, 2529 bp, synthetic construct
  source 1..2529: mol_type = other DNA; note = Synthetic coding sequence
atgagcagcagccacttcgccagccggcaccggaaggacatcagcacggagatgattcggaccaaaatcgcccaccggaagagcttaagtcagaaagaaaatagacataaggaatatgagagaaatagacacttcgggcttaaagatgtgaatattccaacactggaaggccggattttagtggaactagacgagacgtcgcagggactggtccccgaaaagacaaatgtcaagcctagagctatgaagacaatcctaggggaccaaaggaaacagatgctgcagaagtataaggaggagaaacagcttcagaaattgaaagaacagcgggagaaagcaaagcgggggattttcaaggtaggtcggtatcgacctgatatgccatgttttctcctgagtaaccagaatgccgtgaaagcagaaccaaagaaggctatcccttccagtgtgcgaatcactcgttcaaaggctaaggaccagatggagcaaactaagatcgacaatgaatccgatgtgagggccattaggcctgggccacggcagactagcgagaagaaagtgtcggacaaggagaagaaggtggttcagcccgtcatgcctacctcgctcagaatgacacgctctgctactcaggccgcgaagcaggtgccgagaaccgtatctagtacaaccgcccgcaagcctgtgaccagagccgccaacgaaaacgaaccagaggggaaggtccctagtaagggaaggcctgccaaaaatgtagagacaaagcccgacaaagggatctcttgcaaggtagattcggaagagaacacgctgaacagccaaacaaatgcaacatccgggatgaaccccgatggtgtgctgtctaaaatggaaaatctccccgagattaacacagcaaagataaaaggaaagaatagttttgcccccaaggactttatgttccaacccctagacggcctgaagacatatcaagtgacacctatgactccccgttccgccaacgctttcctgactcctagttacacctggacaccgttaaagacggaggtggacgagtctcaagcaacgaaagaaatcttggctcagaaatgcaagacctattcaaccaagactatccagcaagactccaataaattaccatgtcccctcggccctctgaccgtgtggcacgaagagcatgtgttgaacaagaatgaagccaccaccaagaacctgaacgggctgcccatcaaggaggtaccaagccttgaacggaatgaggggaggattgcacaaccacaccacggggtgccatacttcaggaatattctgcagtctgaaacagagaaactcacatcacattgcttcgagtgggaccggaagttagaacttgacattcctgacgacgctaaagacctgatccggacagccgtgggccagactcgattgctcatgaaggagcgcttcaagcagtttgagggcctggtggatgactgtgaatacaagcgagggatcaaagagacaacctgcactgacctagacggtttttgggatatggtgtccttccaaatcgaggacgttattcacaaattcaacaacctaatcaaactcgaagaatccggctggcaggtgaacaacaacatgaatcacaatatgaataaaaacgtctttcggaaaaaagtggtaagcgggattgccagtaaacccaagcaagatgatgcagggcggatagccgcgagaaatcgtctggcagcgatcaaaaacgctatgcgggagcgtattcggcaggaggagtgcgcagaaacagccgtctccgtgataccaaaggaagtagataagattgtgttcgacgcagggttcttccgcgtggagtcacccgtcaagctttttagcgggctatcagtctcgtctgaagggcccagtcaaagactggggacgccaaaaagcgtcaacaaagccgtttcccagtctcgtaacgagatgggcattccgcagcagacgacaagtcctgagaacgctggacctcagaatactaaatccgagcatgtgaaaaaaaccttgttcttatcaattcccgagtcgcggagcagcattgaagacgcgcagtgccccggtctgccagacttaattgaagaaaatcatgttgttaataagaccgacctgaaagttgattgcctcagttccgagcgcatgagcttgcctcttctggccggtggtgtcgccgatgacatcaacaccaataaaaaagagggaataagcgatgtagtggagggaatggagctgaactcctccatcacttcacaggacgtgctgatgagctcccctgaaaaaaataccgcaagccagaactccatcttggaggagggcgaaactaagatctcccaaagcgaactgttcgacaataagagtctaactaccgagtgccacctgctggactcagtcggttcttgctacgttgcccgggccgggttggaggttctgggctcatctgatcccaccacaagcgccagcagagttgctggaacgacagcacgttctaagctgcagtag

SEQ ID NO: 24966 - DNA, 1710 bp, synthetic construct
  source 1..1710: mol_type = other DNA; note = Synthetic coding sequence
atgctgtgcagccccagcttctgcaagctgtgctggaagcggcagcgggaaaacggacaaaggaagtacggtggaccaccccccggatgggatgctgctcctccggagcgggggtgtgagatcttcatagggaagctgccgcgggacctgtttgaagatgagctgattccactctgtgaaaaaattgggaagatttacgagatgaggatgatgatggattttaacgggaataaccgcggctatgcattcgtcactttctcgaataaggtggaggcaaaaaacgctatcaagcagctgaataactatgagatccggaatggccgactgctgggcgtctgcgcaagtgtggacaattgtaggcttttcgtgggtggcattccaaagaccaaaaaacgcgaggagatcttaagcgaaatgaagaaagtgactgaaggagtcgtggacgtgatagtctatcctagtgccgcagacaaaacaaaaaacagaggcttcgcctttgtagaatatgagagtcaccgtgccgccgctatggctcgccggaagcttctcccagggcggatccagctgtggggacacgggattgccgtggattgggctgagccagaagtggaagtggacgaggacaccatgtccagcgtgaagatattatacgtcaggaatcttatgctctccacctcagaagagatgatagagaaggaattcaacaacatcaaaccaggggccgtcgaaagggtgaagaagatccgggactacgcatttgtgcatttctctaacagggaggacgctgtggaagccatgaaagctctcaatggaaaagtactggacgggtctcctatcgaagttactctggctaagccagtcgataaggactcctatgtgagatacacgcgagggacaggcggcaggggaaccatgctccagggagagtacacgtattctctgggtcaggtgtatgacccaacgaccacttatctcggggcaccagtcttctatgcacctcaaacatatgcagctattccgtctctgcacttccccgcgacaaaaggccaccttagcaacagggccatcatccgggccccatccgtgcggggggcagcaggggtccgcgggctgggaggccgcggctacctcgcgtacactggactgggacgaggctaccaggtgaagggcgataagcgtgaggacaagctgtacgacatccttccaggcatggagctcacacccatgaacccggtcactttgaagcctcaaggaattaaacttgccccgcagattctggaggagatatgtcagaagaataattggggtcagcccgtgtaccaactgcacagtgcaatcggccaggatcaacgtcagttgttcctctataagatcactattccggcactggcttcccagaaccctgcgatacacccttttacacctccaaagctgtccgccttcgtggatgaagccaaaacttacgcggccgagtacactctgcaaaccctaggtattcccactgacggcggagatggaactatggcaaccgcagccgccgccgccaccgccttcccgggttacgcagtcccaaacgccacagcaccagtatccgctgcccagctaaagcaggcagtgaccctcggccaggacctggcggcctacacgacctacgaagtctacccaacatttgctgtgacggctcggggcgacgggtatggcaccttttag

SEQ ID NO: 24967 - DNA, 1764 bp, synthetic construct
  source 1..1764: mol_type = other DNA; note = Synthetic coding sequence
atgagcaccgccatccccggcctgaagaagggcaacaacgccctgcagtctatcatattacaaaccctattggagaaagagaacggccagaggaaatacggcggcccaccccctgggtgggacgcggcacctcctgagcgggggtgcgagattttcataggcaagctcccgcgtgatctgttcgaggacgagctgattcccctatgtgagaagatagggaagatctacgaaatgaggatgatgatggattttaatgggaataatagagggtatgcgtttgttacattctccaataaggtggaggccaaaaatgccatcaagcaactcaacaactacgaaatccgaaatgggagactactgggagtgtgcgccagtgtcgacaactgccggctctttgtcggaggcatccccaagacgaagaaacgtgaagagatactttctgagatgaagaaggtcactgaaggcgtggtggatgtgattgtctatccttccgcggccgataaaaccaagaatcgcggatttgccttcgttgaatacgagtcacatcgtgcggctgcaatggctcgacgaaagctcctgcccggccggattcaactctggggtcatggaatcgctgtggactgggcagaaccggaagtggaggtggatgaggatactatgtcaagcgttaagatcctgtacgtgcgaaatctgatgttaagtacttctgaagagatgatagaaaaagaatttaacaacattaaacccggtgccgtggagagggtcaagaagatccgagattacgcctttgtgcactttagcaatcgagaggatgccgtcgaggctatgaaggccctcaacggcaaggttctcgatgggtcgccaattgaggtgactctagccaagccagtggacaaggattcctatgtcaggtacacacgagggactggagggcgtggtaccatgttacaaggtgagtatacatattcattggggcaggtgtatgacccaacaacaacttatcttggcgcaccagtgttttatgccccccagacctacgccgccatcccatcgctacacttcccggccactaaaggtcacctgtccaaccgggctatcatccgggctccaagcgtcagagagatttatatgaacgtcccagtgggagctgctggcgtgaggggcctgggagggaggggatacctcgcatatacaggcctaggacgggggtatcaggtcaagggcgacaaacgcgaagataaactgtacgacattctgcccggcatggagctaaccccgatgaaccctgtgaccttgaagccgcagggcattaagctggcaccacagatactcgaagagatttgtcaaaaaaataattggggtcagccagtttatcagcttcacagtgcaatcgggcaggatcaacgccagctgtttctctacaagattactattcccgcactggcatctcaaaatcctgcaattcaccctttcactccgcccaagctgtcggcatttgtcgatgaagcgaagacctatgccgccgagtatacccttcagaccctggggataccaaccgatggcggtgacggcactatggccaccgccgcagccgcagcaaccgcatttcccggatatgcagtccccaacgcaacagcacccgtctctgccgcacagctgaaacaagccgtcacattgggccaggatctcgctgcttataccacgtacgaggtttatcctaccttcgctgttaccgcgcgcggggacgggtatggcacattctag

SEQ ID NO: 24968 - DNA, 1620 bp, synthetic construct
  source 1..1620: mol_type = other DNA; note = Synthetic coding sequence
atggagagcaaccacaagagcggcgacggcctgagcggcacccagaaagaggcggccctccgggccctggttcagcgaactggctactccctggtacaggaaaatgggcagaggaaatatggaggcccaccgcccggctgggacgctgcccccccagagcgcggctgcgagattttcatcggcaaacttcctagagacctattcgaagatgaactcatcccgctttgtgaaaaaataggaaagatatatgagatgcgaatgatgatggactttaatggcaacaatagaggatatgcattcgtcacattttctaataaggtcgaagccaagaatgctattaagcagcttaataattacgaaattagaaatggccgactcctcggggtctgtgcctctgtggacaactgccgcctgtttgtagggggcatccctaagacgaagaagcgtgaggaaattctgtccgagatgaagaaggtaaccgaaggggtggtggatgtgatcgtgtaccctagcgcagctgataagacaaaaaacagaggtttcgcctttgtagaatatgaatcccaccgggcagcagccatggcacggagaaagctgttgcccggggcggtggagagagtgaagaagatccgtgactatgccttcgtccacttctctaatagagaggatgcagttgaagcaatgaaagcactaaacggcaaagtgctcgacggctcccccatcgaggtcacccttgcgaagccagtggacaaggattcttacgtccggtacacgcgaggtaccgggggaaggggaacaatgctccagggcgagtatacttactccttgggccaggtctacgatccgaccacaacttacctcggagctccagtattctatgcaccgcagacctacgcagcgataccctccctccatttcccggccactaaaggtcacttatccaacagggctatcattcgcgcccctagcgtacgtgaaatttatatgaacgttcccgttggcgctgccggtgttcgggggttgggcggccgcggatatttagcctacaccggcttgggcagggggtatcaagttaagggagacaagagagaggataagttatatgatatcttgcccggcatggagctgacccccatgaacccagtgacactaaaaccccagggcatcaagctggctccccagatcctggaggagatctgccagaagaacaactggggccagcctgtctatcagctgcactccgccataggacaggatcagagacaattgtttctgtataagataaccattccagccctggcatcccagaaccctgcgattcatcctttcacccctcctaaactgtccgcgttcgtcgatgaggctaaaacctatgcagccgagtacacactccagactctaggcatcccaacagacggtggagacggcactatggccactgcagctgccgctgctacggccttccccggctatgcggttccaaacgccaccgcccctgtctcagcagcacagctaaaacaggcagtaacactcggccaggacctggccgcctacacaacgtacgaggtgtacccaacctttgcagtgactgcccgaggagacgggtacggtacattttag

SEQ ID NO: 24969 - DNA, 1044 bp, synthetic construct
  source 1..1044: mol_type = other DNA; note = Synthetic coding sequence
ttcagcctgttccccgccgtggacaacgaggaggccgccctgctgcatgaggaggctacaatgaccatagaagaactcctaacacgatacggccagaactgccataaggggccaccacactctaaaagcggggcttccgataagcttcccagggtggccaagagcaaatttttcgaagacagtgaggacgagtccgatgaagccgaagaggaagaggaggattccgaggagtgttctgaggaagaggacgggtacagttcggaagaagcagagaacgaggaggacgaagacgataccgaagaggctgaagaagacgatgaggaagaagaagaggagatgatggtgcctggcatggagggaaaggaggagcccggatccgacagcggcaccacagcagtcgtggctctcattaggggcaagcagctgatcgtggcgaatgcaggagattcgcgctgcgtcgtgagcgaagccggcaaagccttggatatgagctacgatcacaagcccgaggacgaagttgagctcgctcggattaagaacgccggtggtaaggtgaccatggatggcagagtgaatgggggacttaacctttcacgtgccatcggggaccatttttacaagagaaataagaacttaccccctgaggagcagatgattagcgccctcccagacattaaagtgctgacgctcacagacgaccatgaattcatggtcatcgcatgcgacggaatttggaatgttatgagctcccaggaagtggtggattttattcaaagcaagatctcacagcgggatgagaacggcgaactccgcctattgtcctccatcgtggaagagctgctggatcagtgtctggctcccgacaccagcggggacggtacagggtgcgacaatatgacctgtatcatcatttgtttcaagccgagaaataccgccgaactgcaacctgaaagcggcaaacgtaaattggaggaggtgctgtctaccgaaggggccgaggaaaacgggaatagcgacaagaaaaagaaagcaaagagagactag

SEQ ID NO: 24970 - DNA, 1218 bp, synthetic construct
  source 1..1218: mol_type = other DNA; note = Synthetic coding sequence
atggagaccgacctgaacagccaggaccggaaggacctggacaagtttatcaagttctttgccctcaagactgtacaggtcatcgtgcaggcacgcctaggggagaagatttgcacgcgatcttcttccagcccgaccgggtccgattggttcaatctggctatcaaagatattcccgaggtgacacacgaggcgaaaaaggccctggctggacaactgcctgctgtgggccggtccatgtgcgtggaaatctcccttaaaaccagcgagggcgatagcatggagctagaaatctggtgtctagagatgaatgaaaagtgcgataaagaaattaaggtctcttatacagtgtataaccggctgagccttttgctgaaaagcctgctggcgatcactcgcgtgacgcccgcctatcggttaagcagaaaacagggacacgaatatgtcatcctctatagaatctattttggagaagtccagctgtcgggattgggagagggatttcaaacagtgcgggtgggaacagttggcaccccagtgggcaccattactctatcatgcgcttaccgtatcaacctggccttcatgagcacccgtcagttcgaacgcacacccccaatcatgggcatcatcattgaccatttcgtggatcgtccttacccaagttccagccccatgcatccctgcaattatcggacagcaggtgaggacacaggggtgatctatccaagcgtggaagattctcaggaagtctgcaccacttccttcagcacctccccacccagtcaactcatggttcctggcaaagaggggggtgtgccgctggcccctaaccagcctgtgcatggtacgcaggctgatcaggagcgactggctacctgcacaccatccgaccgcacccactgtgcggcaacccctagcagctctgaggatactgaaaccgtgagtaattcctcagagggccgagcctccccacacgacgtcttagagacaatattcgtaagaaaagtgggggcattcgtgaataagcccatcaaccaggtgacgttgacctccctggatattccattcgccatgtttgcccctaaaaacctagagctcgaggacacagatcccatggtgaacccgccggactctcctgaaactgagtctccactacagggtagcctgccatgtagctggccgcttccgtgcctgctttccccgagtacggtctag

SEQ ID NO: 24971 - DNA, 2025 bp, synthetic construct
  source 1..2025: mol_type = other DNA; note = Synthetic coding sequence
atgcagaccagcagcagccggagcgtgcacctgagcgagtggcagaaaaactatttcgccatcactagcggcatttgcacaggacccaaggctgatgcttatcgggcacagatcctgcggattcagtacgcctgggccaattcagagatttctcaggtttgcgcgacaaaactcttcaaaaagtatgcggaaaagtattcagccataatcgactctgacaatgtagagagtggattgaacaactacgccgaaaacatcttaaccctggctggctcacagcagactgactcggacaaatggcaaagtggactatccataaacaacgtttttaaaatgagttctgttcagaagatgatgcaggctggaaagaagtttaaggactccttactggagcccgctctggccagtgtggtaatacataaagaggccacagtgttcgacctgcccaagttttcagtctgtgggagttcccaggaaagcgacagcctgccaaattccgcacatgatcgcgacagaacacaagatttccctgagagcaacagattaaaactgctgcagaatgctcagcctcctatggtgacaaacactgctcgaacctgccccactttctccgccccagttggtgagtccgccacagctaagttccacgtaactccactatttggaaatgttaaaaaggagaaccatagcagtgcaaaggagaacatcgggctgaacgtttttctgtctaatcagtcatgttttcctgccgcttgcgagaaccctcagcgtaagagcttctacggatccggcaccatcgatgcccttagcaacccaatactgaacaaggcttgctctaagacggaagacaacgggccaaaagaggactcctccctgccgacctttaagacggcaaaagagcagttatgggtcgatcagcagaagaagtatcaccagcctcagcgcgcctctgggtcttcttatgggggagtcaagaagagcttgggcgccagccgctcccgcggcatactgggaaagtttgtgccccccattccgaagcaggacggcggtgaacagaacggcggaatgcagtgcaagccttatggtgcaggccctaccgagccagctcacccagttgacgaacggctgaagaatctggaacccaagatgatcgagctgatcatgaacgagatcatggaccacgggccaccagtgaattgggaggacatagcaggcgttgagttcgcaaaagcgactatcaaagagatcgtagtctggccaatgcttagaccagacatattcacgggcctgcgcgggcccccaaaaggaattctgctctttggaccacccgggacaggaaagaccttgattgggaaatgtatcgcctctcagagcggggcaacctttttctccatttcggcgtccagcttgaccagcaagtgggtgggggagggtgagaaaatggtcagggcactgtttgcagtggccagatgccaacagcccgctgtgatcttcattgacgagattgacagccttctgagtcagcgaggggatggtgaacacgaaagctccaggcgcataaaaacagaattccttgttcagctcgacggagctaccacaagcagcgaggatcggatcctggtagttggggccaccaatcgtcctcaagaaattgatgaggcggcccggcgccggctcgtcaagcgcctttacatacccctgcccgaggcttctgcacggaaacagattgtgatcaatctgatgtcaaaggagcagtgctgtcttagcgaagaggaaatcgaacagatcgtacagcaatccgatgccttcagcggcgccgacatgacccagttgtgccgtgaggcctccttgggacccatacgttcacttcagacggcagacattgccaccattacccccgatcaagtgaggccaattgcctatatcgattttgagaatgcttttcgtacagtccggcccagtgtctccccgaaggatttggaactctacgagaactggaataaaaccttcgggtgcgggaagtag

SEQ ID NO: 24972 - DNA, 2640 bp, synthetic construct
  source 1..2640: mol_type = other DNA; note = Synthetic coding sequence
atgaactaccccggccggggcagcccccggagccccgagcacaacggccgcgggggaggtgggggcgcttgggagctcggaagcgacgccaggcccgccttcggaggaggggtgtgctgtttcgaacacttacctggaggcgacccagatgatggcgatgtcccgctggcattgctgaggggagagccagggctgcatctggccccagggaccgacgatcacaaccatcacctggcactggacccatgtctctccgatgaaaactatgacttctcctctgccgagtcaggttcctccctgagatactactctgaaggggaatctggaggcgggggaagctcactctcactacatccccctcaacaaccccctctcgttccaaccaattccggagggggaggcgcaactggtggttcacctggagaaagaaaacgcacccgattaggtgggcctgcagcacgccatcggtacgaagtggtgaccgaactcgggcccgaagaagttcgttggttttacaaggaagacaaaaaaacatggaagccatttattggatacgactccctacggattgaactggcttttcgaacactgctgcagactaccggggcccgccctcagggtggggaccgggacggagatcacgtgtgctccccaactgggccggcctcttctagtggcgaggatgacgatgaagaccgcgcctgcggcttctgtcagtcgactactggtcacgagcccgagatggtcgagctggtcaacatcgaacctgtttgcgtgagggggggactgtatgaagttgatgtcacccagggcgagtgttaccctgtctactggaatcaagcagacaagattcccgttatgagaggacagtggtttatcgatggtacgtggcagcctcttgaagaagaagagtcgaatctcatcgagcaagagcacttgaattgttttcgtggccaacagatgcaggagaacttcgacatcgaggtgtccaagtctatcgacggtaaggatggatcaggtattaactactctgccgtgcactcttttaagctgagcaggaaccatgtcgattggcactccgttgatgaggtctacctatatagcgatgcaacaacctcaaagatcgcaagaacagtgacacagaagctcggtttttctaaagcctcctcgagcgggacccggctccataggggctatgtggaagaagctacgttggaagataagccatcccaaactacgcacattgtgtttgttgtgcacggtattggccaaaagatggatcagggaaggataatcaagaacactgccatgatgagagaggccgccaggaaaatcgaagagcggcacttctcgaaccacgctacacatgtagagttcctacctgttgaatggaggagcaaactgaccctggacggcgacactgtcgactctataacccctgataaggtgagaggtctgagagatatgctgaattcatccgcaatggatattatgtattacaccagcccgctgtaccgagacgagctggtgaagggccttcaacaggagttaaatcgcctttactctttgttttgttcacgcaatcctgattttgaggagaagggaggaaaggtgagcattgtatcacactcccttggctgtgtgatcacttacgatatcatgactggatggaatccggtgcgtctgtacgagcagctcctgcaaaaggaagaggagctccctgatgagagatggatgtcttacgaagagcgccaccttctggatgagctgtatattacaaagcgcagactgaaggagatcgaggaaaggttacacggactgaaggcatccagtatgacgcaaacccccgccctgaagttcaaagtcgagaactttttttgcatgggatccccgctcgctgtgtttctggcgttgcgggggattagacctggaaatacaggaagccaagatcatattcttccgcgggaaatctgtaatcgcctgttaaatatctttcaccctacagatcctgtggcctaccggcttgagcctctgatcctaaaacactactctaacattagccccgtgcagattcattggtacaacacatcaaaccctcttccttatgaacacatgaagccttcgtttttgaacccagctaaagagcccaccagtgtgagcgagaacgagggaatttccacgatacccagtccagttactagccccgtgctcagtcggagacattacggagagagcatcaccaatatcgggaaagcctctattctcggcgccgcttctataggcaagggactcggcggtatgctgttttcccggttcggtcggagtagtacaacccagagcagtgagacatcaaaagacagcatggaagacgagaagaaacccgtagcttcacccagcgccaccactgttggtacgcagaccctgccacacagtagctccggcttcctcgatagcgctttagagctggaccataggatcgactttgaactcagggaaggattagtggaaagcagatactggtccgccgtgaccagccatacagcctactggagctccctggacgtggccttgttcctgcttactttcatgtacaagcatgaacatgatgacgatgctaagccgaacctggacccgatatag

SEQ ID NO: 24973 - DNA, 2316 bp, synthetic construct
  source 1..2316: mol_type = other DNA; note = Synthetic coding sequence
atgaactaccccggccggggcagcccccggagccccgagcacaacggacgcggcggaggcggaggcgcgtgggaactggggagcgacgcaaggccagcctttggtgggggagtctgttgctttgaacacctgccaggcggtgatcctgacgacggtgacgtgcccttggctctgctgaggggcgaacctggtcttcacttggcgccggggaccgatgatcataaccatcacctggcactggacccttgcctttccgatgaaaactacgatttcagttctgcagagtccggctcctcactccggtactattctgagggggaaagcggcggtggcggcagtagcctaagtctccatccgccccagcagcctccactggtgcccaccaatagcggaggcggcctctacgaggtggacgtaacccagggggaatgttatcccgtctactggaatcaggctgataagattccagtcatgaggggccagtggtttattgacgggacctggcagccactggaggaggaggagagtaacctcattgaacaggagcatctgaattgctttcgaggccagcagatgcaggagaactttgacatcgaggtaagtaaatctatcgacggcaaagatgccgttcacagctttaagcttagtcggaatcacgtagactggcactccgtggacgaggtgtacctatatagcgatgccaccacctccaaaattgctcggaccgtgacacagaagctaggcttctcaaaggcttcaagcagcgggactcggctgcacaggggatatgttgaggaggctaccctcgaagacaaacctagccagacgactcacatagtgttcgttgtgcacggcataggccagaagatggatcaggggcgcatcataaagaatacagctatgatgcgagaggctgccaggaagattgaggagcgacattttagcaatcatgcaactcacgtcgagtttctgcccgtagaatggcgctcaaaactgacacttgacggagatacagtcgattcaatcaccccagataaagttcggggactgcgggacatgctgaactcctcagcgatggacatcatgtattatacgagcccactgtatagggacgagctggtcaagggactgcaacaagagttaaaccggctgtattcgttgttttgttcccgtaatccagattttgaggaaaagggtggtaaggtgagtattgtgagtcacagtttaggctgcgtgataacatatgacatcatgaccggctggaacccagtccgcctgtacgaacagctgctccagaaggaggaggagttaccagacgagcggtggatgtcctatgaggaaaggcacctgcttgacgagctgtacatcacgaagcggcgccttaaggaaattgaggagcggctccacgggttgaaggcctcatctatgactcagaccccggccctcaagtttaaagtagagaactttttctgcatgggctctccgctggccgtattcctggctctgaggggaatacggcccggcaacacggggagccaggaccacatcctgcctagggaaatatgtaacagactcctgaacatctttcatcccaccgaccccgtggcgtacaggctagagccattgattctcaagcattactctaacatttcgcccgtgcagattcattggtacaacacctccaaccctctgccctacgagcacatgaagcccagcttcttaaatcccgccaaagagccaaccagcgtatcagagaatgaaggcatatccacaatcccttcacctgtgacctctcccgtcctgtcgcgccgccactacggagaaagcatcactaatatcggaaaagcgtcaatcttgggagcggcttccataggcaagggtttagggggcatgttgttctccaggtttggtcggtcatccacgacacaatcctcagagacctcgaaggattcaatggaagatgagaagaagcctgtcgcctcccctagtgctaccaccgttggtacccaaaccctgccacattcgtcttctggattcctcgattccgcttactttagactacaggagtcgttcttcaaccttcctcaacttctttttcccgaaaacgtgatgcagaacaaggacaacgcacttgtggaactcgatcacagaatcgatttcgagctgcgcgaggggctagttgaatctagatattggagtgccgtcacatctcacactgcctactggtcatctctagacgtcgccttgttcctgttgaccttcatgtacaagcatgaacacgacgatgacgcaaagccgaatctcgatcctatctag

SEQ ID NO: 24974 - DNA, 1179 bp, synthetic construct
  source 1..1179: mol_type = other DNA; note = Synthetic coding sequence
atgggcaccacctgcctgcacctgggcaccctggagcagagcctggtgtttgaaaacaaagtgaacagtgaaaaggtgaagctgtcgttaagaaacttccctcacaatgactacgaggatgtatttgaggaaccttctgaatcagggtccgatccatccatgtggaccgcaaggggcccttttcgtcgggatagatggtcttccgaagacgaggaggcagcaggcccttcccaggcactgagtccgctcctgagcgatactcgcaaaatagtgtctgagggggagctggaccaattggcccagataaggccgctgatcttcaactttcacgagcagaccgcgatcaaggattgcctcaagattctggaagaaaagactgcagcatatgatattatgcaggaattcatggccctggagctcaagaatttaccaggggaatttaattctggaaatcagcccagtaacagagagaagaacagatatcgtgacatcctaccttatgatagcacaagggtacctctgggcaagagcaaggactatattaacgcttcctatatcagaatcgtcaactgtggggaggagtacttttatattgctactcaggggccccttctctcaaccatagatgacttctggcagatggttctggagaacaatagcaacgtaatagccatgattacaagagaaattgagggtgggattatcaaatgttatcattattggcccatctccctgaagaagcccctagaactgaaacactttagagtgttccttgagaactaccagatccttcagtatttcattatccgtatgtttcaggttgtagaaaaatccacgggaacgtcacacagtgtcaaacaattgcagttcaccaaatggcctgatcatggcacaccagcttctgcagatagtttcatcaagtatatccggtatgcacggaagagtcatctgaccggcccgatggttgtgcactgctctgccggtattggcagaaccggtgtcttcctctgcgtagatgtggtgttctgtgccatcgtcaagaactgttccttcaacataatggacatagtagctcagatgagggagcagagatccggtatggttcagactaaggagcagtatcatttctgttacgatattgtactagaggtgttgcggaagctcctgactctggactag

SEQ ID NO: 24975 - DNA, 621 bp, synthetic construct
  source 1..621: mol_type = other DNA; note = Synthetic coding sequence
atgagcagcccccgggacttccgggccgagcccgtgaacgactacgagggcaacgactctgaggctgaagacctaaattttcgggaaacactacccagctcgtcgcaagagaatacaccacgtagcaaggtgtttgagaacaaggtgaacagtgaaaaggtcaaattatcattaaggaacttccctcataatgactacgaagacgtgttcgaggaaccgtctgaaagcggatctgacccaagtatgtggaccgcccggggtcctttcaggcgcgaccggtggtcctccgaggatgaggaggcggcagggccttcacaggctcttagcccgctccttagcgacacccgtaaaatcgtgtctgaaggcgaactcgatcagctggctcagatccggcctctcattttcaattttcatgagcaaaccgcaattaaggactgtctgaaaattctggaggaaaagaccgctgcttatgatatcatgcaggaatttatgttcaacataatggatatagtcgcccaaatgagagaacaacgtagcgggatggtgcagaccaaagaacaataccacttttgctatgatatcgtcctggaagtgctccgtaagctgctcactctggactag

SEQ ID NO: 24976 - DNA, 438 bp, synthetic construct
  source 1..438: mol_type = other DNA; note = Synthetic coding sequence
atgtggaccgcccggggccccttccggcgggaccggtggagcagcgaggatgaggaggccgcaggcccctctcaggctctgtcccctctgctctcagacacaaggaagatcgttagtgaaggtgaactggaccagctggcccaaatccgccccctcatcttcaattttcacgagcagacagctatcaaagactgcttaaaaatcctggaggaaaaaactgcagcttacgacatcatgcaggagttcatggccttggagttgaaaaatttgccaggcgaattcaacagcggcaatcagccgagcaacagagagaagaatcgctatcgcgatatcctccccttccagcaccacggctacagtggcccgaacgaaagaaccactttttggcatggtagcaatgagggtgcagtgtcactgctcttgcggtactgtgcctag

SEQ ID NO: 24977 - DNA, 1020 bp, synthetic construct
  source 1..1020: mol_type = other DNA; note = Synthetic coding sequence
atgtggaccgcccggggccccttccggcgggaccggtggagcagcgaggacgaagaagccgccgggccttctcaagccctgagcccactcctgtcggacacaaggaagattgtgagcgagggggagctcgatcagttggcccagatcagaccattaatttttaattttcacgaacagactgccataaaagattgtttgaagatattggaggagaagactgcggcttatgatattatgcaggagtttatggcacttgagttgaaaaatcttcccggagagtttaattcggggaatcagccttccaaccgcgaaaagaaccgataccgcgacatccttccgtatgatagtactcgggtccctctgggcaagagtaaggattatatcaatgcctcttacatcaggattgtaaactgtggggaagagtacttctatatcgctacacaaggcccccttctgtcaactatcgatgatttttggcagatggtgttggagaataactctaacgtgattgccatgattacacgagaaattgagggcggaattatcaagtgttaccactactggccaatttctctcaagaagccgcttgagctgaagcattttagagtcttcctggaaaattatcagatccttcagtattttatcatccgcatgttccaggtggtcgagaaatccactggcacttcgcactcagtcaaacagctccagttcaccaagtggccggaccacggaacgccagcgagcgcagattctttcatcaagtatatcaggtacgcacgcaagtcacacctgactggcccgatggttgtccactgttccgctgggatcgggaggacaggggtgttcctttgcgtggacgtggtgttttgtgctattgtcaagaactgtagctttaacatcatggatatcgtagcccagatgcgggaacaacgctcaggaatggtccagactaaggaacaataccatttctgctacgatattgtgcttgaggttctgcgaaaacttcttaccttggattag

SEQ ID NO: 24978 - DNA, 1047 bp, synthetic construct
  source 1..1047: mol_type = other DNA; note = Synthetic coding sequence
atgcagttcggcgagctgctggccgccgtgcggaaggcccaggccaacgtgatgctgttcttggaggaaaaggaacaggcagctctttcccaggctaatgggattaaagctcatctcgagtatagatcagctgagatggagaaatctaagcaagagctcgagactatggccgcgattagtaatactgtgcagttccttgaagagtactgtaagttcaaaaatactgaagacattacttttccaagtgtctatatcggcctcaaggataaactcagcggcattcgcaaggttatcactgaatccacagtgcatttgattcagctattagagaattataagaagaaactgcaagaatttagcaaggaagaggagtatgacattagaactcaggtctctgccatcgtgcagcggaagtactggaccagtaagcccgagccctcaactagggagcagttcctgcagtatgtacacgacatcacatttgatccagacacagcccacaaatatcttcggttgcaagaggaaaaccgtaaggtgacaaacaccacgccctgggaacatccttaccccgacctgcctagtagatttcttcactggagacaagtcctatctcagcagagcctgtacttacatagatactactttgaggttgaaatcttcggggccgggacatacgttgggctcacttgtaaggggattgaccagaaaggcgaggaaagatcatcttgtatttctggcaacaacttttcttggagtctgcagtggaatgggaaggaattcaccgcttggtacagcgatatggaaactccactcaaggccgggcccttctggaggctcggggtgtacatcgattttcccgggggaatcctctctttttacggtgttgagtacgactccatgaccctggtccataaattcgcttgcaaattttccgaaccagtgtatgccgccttttggctgtcaaaaaaagagaacgcaatcagaatcgtggatctaggagaggagcctgaaaagcccgcaccaagcctggtcgggaccgccccttag

SEQ ID NO: 24979 - DNA, 1047 bp, synthetic construct
  source 1..1047: mol_type = other DNA; note = Synthetic coding sequence
atgcagttcggcgagctgctggccgccgtgcggaaggcccaggccaatgttatgctgttcctcgaagagaaagagcaggctgccttatctcaggcgaacggcatcaaggcccatctcgagtatagatccgcagagatggagaagagtaagcaggaacttgagaccatggcggcaatctcaaacacagtacaatttctggaggaatactgtaagtttaagaacacagaagatatcacctttcctagtgtttatattggactgaaggacaaactctcaggcattagaaaggtgattactgagtctacagtacatcttattcagttgttggagaactataagaagaaactccaagaattttctaaggaggaagagtacgacattagaacacaagtgtcagcaatcgttcaacgcaagtattggacatcgaagccggagccaagtaccagagagcaatttctacagtatgtgcacgacatcaccttcgatccagataccgcccataagtacctgcggttgcaagaggagaatcgcaaggtgactaacacgacgccctgggagcacccataccctgacctgccaagccgttttttacactggagacaggtcctgtcgcaacagtccctgtacctgcaccggtattatttcgaggtcgagattttcggggcgggaacatatgtgggccttacgtgtaagggaatcgatcagaagggggaagagcggtcttcctgtattagtggtaacaacttctcatggtcccttcagtggaacgggaaggaatttaccgcttggtacagcgacatggaaactccactaaaagccgggcctttttggcggctgggggtttacatcgactttcccggaggcatactcagtttctatggggtggagtacgatagcatgacgctggtgcacaagtttgcatgcaagttcagcgagccggtgtatgctgcgttctggctcagcaaaaaagagaacgccatcagaatagtggatctgggcgaggagccagaaaaaccagccccctctcttgtcggaaccgctccttag

SEQ ID NO: 24980 - DNA, 687 bp, synthetic construct
  source 1..687: mol_type = other DNA; note = Synthetic coding sequence
atgatcgacgacagcacccgggtgcccctgggcaagagcaaggactacatcaatgcttcatacatccgcatagtgaactgcggggaggagtatttctacatcgcgactcaggggcccctgctgagcacgatcgacgacttctggcagatggtactggagaacaactccaatgtgatcgccatgatcacacgtgaaattgagggcggaattatcaaatgttaccactactggcctattagcctcaaaaagcccctggaattgaagcattttcgagtcttcctggagaattatcagatcctgcaatattttatcatccgcatgttccaagtggtagagaaaagcacaggaacatcacatagcgtcaaacagctccagttcactaaatggcccgatcacgggaccccagcctctgccgattcctttattaaatacatacggtacgcaagaaagtcccacctgactggtcccatggtggtgcattgttccgctggaattggccggactggtgtgtttttatgtgtggatgtggtgttttgtgcgatagtgaagaactgtagttttaatattatggacattgttgcccagatgcgggaacagaggagcggtatggttcagacaaaagagcagtaccacttttgctatgatatcgtactagaggtgttgaggaaattgctaactctcgattag

SEQ ID NO: 24981 - DNA, 1449 bp, synthetic construct
  source 1..1449: mol_type = other DNA; note = Synthetic coding sequence
atggtgatggagaagcccagccccctgctggtgggccgggagttcgtgagacagtactacactctcctgaataaggctcctgaatatttgcaccgtttttacggaagaaactcaagctatgttcatggcggggttgacgcaagcggaaagccgcaggaagccgtgtacggacagaatgatatccaccacaaagtgctgtctctgaacttctccgagtgccatacaaagatacggcatgttgacgctcacgcaaccctgtctgacggcgtcgtggtacaggtcatgggcctattatccaatagtggccagcccgaacgaaagttcatgcagaccttcgtgttggcaccagagggatctgttcctaataagttctacgttcacaatgatatgttccgttacgaggatgaggtgttcggcgatagtgagcctgaattggacgaggaaagcgaggatgaagttgaagaagagcaggaagagcgacagccctccccagaaccagtccaagagaacgctaatagtggatattatgaggctcaccctgttactaacggaatcgaggagcctttggaggaatcctctcatgaacctgagcctgaacctgaatcagagactaagacagaagaattaaagcctcaggtcgaagaaaagaacctggaggagctagaggaaaagtcaaccacaccaccccccgctgagccagtatcgctgccccaggaaccaccgaaagccttcagctgggcttccgttacttctaaaaatctgccaccaagcggaaccgtgtcatcttcgggaatcccaccacacgttaaggctccggtttcacaaccccgggtcgaggcaaagcctgaagtccagtctcaaccgccgcgtgttagggaacagcgtccccgcgaaaggccaggtttcccccctagaggccccagacctggacgtggggatatggaacagaatgactcagacaaccggcgcataattcggtacccagacagccaccaactatttgtgggcaaccttccccatgacattgacgagaacgagcttaaggagttcttcatgtcattcggtaacgtggtggagctgcgtattaacacaaagggggtagggggaaagcttcccaattttgggtttgtcgtgtttgatgactccgaacccgtgcagagaatactgattgccaagccaataatgttcagaggcgaggtgcgcctcaacgtagaggaaaagaaaaccagggccgcacgagaacgggagactcgcggaggcggcgatgataggcgagatatcagacgcaacgatcggggacccggagggcctaggggaattgtcggaggagggatgatgagggaccgcgacggtcggggaccacctcccagaggcgggatggcacagaaacttggctctggccgtggcacaggtcagatggaaggacgctttacaggtcagcggcgttag

SEQ ID NO: 24982 - DNA, 1020 bp, synthetic construct
  source 1..1020: mol_type = other DNA; note = Synthetic coding sequence
atgtggaccgcccggggccccttccggcgggaccggtggagcagcgaagatgaagaggctgcaggtccctcccaggcactttctcctctcttgagtgataccagaaaaatagtgtctgaaggagagctggatcaactggcacagataagacctttgattttcaatttccacgagcagactgccattaaagactgtcttaagattctcgaggagaagaccgccgcctacgacatcatgcaggaattcatggcccttgagctcaaaaaccttccgggcgaatttaacagcggcaaccaaccgtcaaacagggaaaagaaccgttaccgggacattttaccatacgactctactcgggtgccactaggtaagagtaaggattacattaacgcttcatatatacgtatcgtgaactgtggggaggagtatttttacattgcaactcaagggcccctactttccactattgatgacttctggcagatggttcttgagaacaacagcaatgtcattgctatgatcactagagaaattgagggtggaatcataaaatgctaccattattggccaatttcactgaagaaacctttggaactgaaacacttccgagtgttccttgagaactaccagattttgcagtatttcattattcggatgttccaagtggttgaaaagagtacaggtacatcccacagtgtaaagcagctgcagttcacgaaatggcccgaccacggtactcccgcaagcgcggacagtttcatcaaatatataagatacgcaaggaagagccacctcaccggacccatggtcgtgcattgttctgccggcatcggcaggaccggcgtttttctgtgtgtagatgtggtgttttgtgccatcgtgaagaactgctcattcaacatcatggacatagtcgctcagatgcgggaacaacgatctggcatggttcaaacaaaggaacaataccacttctgctacgatattgtcttggaggttctccggaagctattgacactcgactag

SEQ ID NO: 24983 - DNA, 621 bp, synthetic construct
  source 1..621: mol_type = other DNA; note = Synthetic coding sequence
atgagcagcccccgggacttccgggccgagcccgtgaacgactacgaaggaaatgacagtgaagctgaagacctcaattttagggaaacgctccctagcagctcccaggagaataccccccgatctaaggtctttgagaataaggtcaactccgaaaaagttaaactgtctcttcgtaacttcccccataacgactatgaggatgtatttgaggagccaagtgagtccgggagtgatcccagtatgtggactgcccgcggccctttcaggagggacaggtggtcatcggaggatgaggaggccgcgggcccctctcaggctttgagcccactcctgtctgatacccgcaaaatagtgtcagaaggcgagttagaccagctcgcccagatcaggcccctgatctttaactttcacgagcaaaccgcgatcaaagactgtctgaagattctcgaggagaaaacagcagcctacgatatcatgcaggaatttatgtttaatatcatggatattgtcgcacagatgcgagaacaaaggtccgggatggttcagactaaggagcagtaccatttttgctacgatatcgtgctggaggtactgcggaaattactaacactggactag

SEQ ID NO: 24984 - DNA, 438 bp, synthetic construct
  source 1..438: mol_type = other DNA; note = Synthetic coding sequence
atgtggaccgcccggggccccttccggcgggaccggtggagcagcgaagatgaagaagctgcgggtccatctcaggccttaagccccctgctgagtgatacccgcaagatagtgtcggagggcgaactggaccagctcgctcagatccggccactcatttttaattttcatgagcagacggccatcaaggactgtctgaaaatccttgaggaaaaaactgccgcctacgacataatgcaggagtttatggccctggagcttaagaacctgcctggtgaattcaactccgggaatcaaccttccaatagggaaaagaatcgttaccgcgacattttacctttccaacaccatggctactctggtcccaacgaaagaacaacgttctggcatggatctaacgagggggctgtcagtctgctactcagatattgcgcctag

SEQ ID NO: 24985 - DNA, 687 bp, synthetic construct
  source 1..687: mol_type = other DNA; note = Synthetic coding sequence
atgatcgacgacagcacccgggtgcccctgggcaagagcaaggactacattaatgctagttatatacgcatcgtgaattgcggcgaagagtatttttacattgctacgcagggaccgcttttgagcactattgacgacttctggcagatggtgttagagaacaattcaaacgtgatcgctatgataactcgggagatcgagggtggcatcatcaagtgctatcattactggcctatctcactgaaaaagcccctggaactgaaacattttcgcgtattcttggaaaactaccagatcctgcagtatttcatcatacggatgttccaggtagttgagaagtccacgggcacaagccattccgtgaagcagcttcagtttactaagtggcccgatcatggcacccccgcctctgccgacagctttatcaagtatataagatacgctaggaaaagtcatctcacgggccccatggtggtgcactgttccgcgggaatcgggcgcaccggcgtgtttctgtgcgtcgatgtcgtgttctgcgcaatcgtaaagaattgctcgttcaatataatggacatcgtggcacaaatgcgcgagcaacgatccgggatggtgcagaccaaggagcagtatcacttttgctatgacattgtgctggaagtgctgaggaaactgctcacccttgactag

SEQ ID NO: 24986 - DNA, 2802 bp, synthetic construct
  source 1..2802: mol_type = other DNA; note = Synthetic coding sequence
atgttctggaagttcgacctgaacaccaccagccacgtggacaagctgcttgacaaggaacacgtgactctgcaggaactaatggatgaggatgacatcctgcaggaatgcaaagcacagaaccagaaattactggactttctctgtcgccagcagtgcatggaagaactcgtttctctgatcactcaggatccccccttagatatggaagaaaaggtgcgattcaagtaccccaacaccgcttgcgaactgctgacatgtgacgtgccccagatctctgatagactgggaggggacgaatctctgctgtccctgttatacgactttctggaccacgaaccaccactgaaccctcttcttgcgtcattttttagcaaaactatcggtaacctcatcgcacgtaaaacagaacaggtcataacctttctgaaaaaaaaagacaagttcatcagcttggtgcttaagcatatcggcacctctgcgctgatggatttgcttctgcgcctcgtttcctgcgtggaacccgctggtcttcgccaggacgtcctgcactggctgaatgaagaaaaggtgattcaacgcctggtagagctcattcatccctcccaggacgaggataggcaaagcaatgcctcccagacattgtgtgacatcgtgagactcggaagagaccagggctctcagctgcaagaggcactcgagcccgaccctctcctgaccgcattagaatcccgacaggattgtgtcgaacagctcctgaagaatatgttcgatggggataggaccgaatcgtgcctcgtatcgggcacccaggtgctgttgacactactcgagactcgacgggttggcactgaggggctcgtggattcatttagccagggcttggaaagatcctacgcggtcagcagtagtgtgttgcatggaatcgagccccgtctgaaagactttcaccagctgcttctcaatcccccgaaaaaaaaagctattttaaccactataggagtgctggaggagcccctggggaatgcacggctacacggtgcccgactcatggcagcgttgctgcataccaacactccttcaatcaaccaggaactgtgccggctcaacacaatggatctactgcttgacctcttctttaaatacacctggaataacttcttgcacttccaggtagagctgtgcattgcagctattctctcgcacgcagccagagaagagcggaccgaagcatcggggagtgaatccagagtggagcctcctcacgagaacggaaatcggtcgttagagacgccccagcctgccgccagcctgcccgacaacaccatggtgacacacctctttcagaagtgctgtctggtccagagaattctggaggcttgggaggccaacgatcatacccaagcagcaggaggcatgcgccgggggaatatgggacatttaacccgtatcgcgaacgcagtggtccagaacctagaacgggggcccgttcagacacacatcagcgaagtgattcgtggcctgcctgcagattgccgcggacgctgggagtcttttgtcgaggagaccttgacagagacaaatagaagaaatactgtggacctggcattctccgattaccagatccagcaaatgactgcaaattttgtggatcaatttgggtttaacgacgaggaattcgctgatcaggacgacaatatcaatgctccattcgatcgaattgccgagattaattttaacatcgatgccgacgaggattctccgtctgctgccctgtttgaggcttgctgtagcgacagaatccagcctttcgacgacgacgaggacgaggatatctgggaagacagcgatacaagatgcgccgccagagtgatggctcgccccaggttcggggctcctcatgctagcgagagctgctccaaaaacggacccgagcgcggcggtcaggacgggaaagcctcattagaggcccatcgcgacgctcccggtgccggcgcgccacctgcacctggaaaaaaggaggcacctccagtggagggggatagcgagggcgctatgtggaccgcagtcttcgatgagcctgccaactccacacctacagccccaggagtcgtaagagatgtagggtcctcagtctgggcggctgggacatcagcccccgaggaaaagggttgggccaagtttactgacttccagcccttttgctgtagcgaatccggtccaagatgctcaagccctgtcgatactgaatgttcccacgccgagggttcgcgatcccagggacccgagaaagccttcagtcctgcctcgccctgtgcctggaacgtctgtgtcacacgcaaagcaccacttctggcttcagactccagcagcagcgggggttcgcattccgaggacggcgaccagaaggccgcttcggctatggatgctgtctcacggggccctggcagagaagccccccccctcccgacagttgcccggactgaagaggccgtgggcagggtgggatgcgcggatagccggttgcttagtcccgcctgcccagctcctaaagaggtgacagccgcacccgccgtcgcagtccctccagaggccacagttgcaattactaccgccctgtctaaggcagggcctgccattcccactcctgctgtaagttctgccctggcggtggctgtgccgcttggtcctattatggccgtcaccgcggcacctgcaatggtagccacgctcgggacagtgacaaaagacggtaaaacagatgcacccccagagggtgcagctcttaacggcccagtctag

SEQ ID NO: 24987 - DNA, 2799 bp, synthetic construct
  source 1..2799: mol_type = other DNA; note = Synthetic coding sequence
atgttctggaagttcgacctgaacaccaccagccacgtggacaagctcctggacaaggaacacgtcacattgcaggagctaatggatgaggacgatatcctgcaggaatgcaaagcccagaatcaaaagctgctcgattttctttgccgacagcagtgcatggaagaactggtgagtctgatcacacaggacccccccttggatatggaggagaaagtcagattcaagtatccgaacacagcatgcgagctgcttacatgtgatgtgccccagatctcagatagacttggaggcgatgaaagcctcctctctctgctgtacgatttcttagaccacgaaccaccactgaaccctctcttagcctcgttcttttccaagacaatcggcaaccttatcgcaagaaagacagagcaggtgatcactttccttaaaaagaaagacaaattcataagcctggtcctgaaacatatcggtacgagcgctttgatggatctgctgctgcgtttggtgtcttgcgtggaacccgccggtttacgacaagacgtgctgcattggctgaatgaggaaaaggtcatacagcggctggttgagctgattcatcctagccaggacgaagaccgacaatcgaatgctagtcagacactctgcgacatcgtgagacttggccgcgaccagggctcgcaactacaggaggcccttgaacccgacccacttctcaccgcgctggaaagccaggactgcgtcgagcaacttttgaagaacatgtttgatggtgatcgaaccgagagctgtctggttagcggaacacaggtactcctaacattgttggaaacacgacgggtcggcacagaggggctcgtggactccttttcccaggggctggaacgttcatatgccgtaagcagctctgtgctacacggaatcgagccccgcctcaaagattttcatcagcttctgttaaatccacctaaaaagaaggccattttgaccacaatcggagtgcttgaggagcctttgggtaacgcccgactccatggtgcacgacttatggcagcgcttttgcataccaatacaccctccatcaaccaggagttatgtcggcttaatactatggatctcctactggacctcttcttcaagtatacttggaacaactttctccatttccaggttgagctgtgtattgcagccattctttcgcacgctgcccgcgaagaacgcactgaagcctctgggagcgagtccagggtagagcccccccacgagaacggaaataggtcactggagacacctcagcctgcggcatccctgcctgacaatacaatggtaacccacctgttccaaaagtgctgtctggtgcagaggatcctggaagcatgggaagcaaacgaccacacacaggcggccggaggcatgagacgggggaacatggggcatctgactcgtattgccaatgccgtggtccagaacttggagagggggcccgtgcaaacccatatcagcgaggtcattcgcggactgcctgccgattgtagaggtagatgggagtcgttcgttgaagagacgctcaccgaaacgaatagacggaacaccgtggaccttgctttctctgattaccagattcagcaaatgacagcgaattttgtggaccagtttggcttcaatgatgaggaatttgccgaccaggacgataatattaacgctccgttcgaccggatcgctgagatcaatttcaacatcgatgccgacgaggacagcccttctgctgcattgtttgaggcatgctgctccgacaggattcagcctttcgatgatgacgaagacgaggacatctgggaagattccgacactcggtgtgccgcgcgagtgatggcccggcctcggtttggtgccccccacgccagcgaaagctgcagcaagaatggacccgagcgcggtggacaggacggaaaagcgtctctggaagcacacagagacgccccgggcgccggggcaccacccgcccctggtaagaaagaagctcctcctgtcgaaggggactcagagggggcgatgtggacagcagtattcgacgagcctgcaaactctacgcccacagcaccaggagtggtcagggatgtcggctcgtccgtttgggcagcgggtacttcagctccagaggaaaagggctgggccaagttcactgactttcagcctttttgctgttccgagtcaggccctaggtgttcatcacccgtggacaccgagtgcagccacgccgagggcagccgcagccagggaccagaaaaggcctttagccctgcatccccttgtgcctggaacgtttgcgtcacgaggaaagcccccttattggcatcggatagctcttctagcggcggctctcacagcgaagatggcgatcagaaagctgcatccgctatggacgctgtaagcagagggccgggtcgagaagcaccaccacttcctacagtcgcaaggacggaggaggccgtgggccgtgtcggatgcgccgacagccgattactttctcctgcatgcccagccccgaaggaggtgaccgccgcacccgccgtagccgttcccccggaagctactgtagctatcaccaccgcactatcgaaagctggccctgctatcccaaccccagcggtttcatcggctctagctgtcgctgtgccactcggccccattatggcggtcactgctgccccagctatggtggccaccttaggtactgtcactaaggatgggaagacagatgcaccaccagagggagcagcgctaaacggccccgtctag

SEQ ID NO: 24988 - DNA, 789 bp, synthetic construct
  source 1..789: mol_type = other DNA; note = Synthetic coding sequence
atggccctgagcctgggctggaaggcccaccggaaccactgcggcctcctcctgcaggcccttagatcctcggggttgctcctttttccctgcggacaatgcccttggagaggagctggctcctttctcgacccagaaattaaagcatttcttgaagagaataccgaggtaacaagctctggaagcttaacacctgaaatccagctccggctgttgacccccagatgcaagttctggtgggagagggccgatttatggcctcattctgacccctactgggcaatatactggcctggcggccaagcattgagcaggtacctcctagacaaccctgatgtcgttaggggaaagagcgtgctggacctggggagtgggtgtggtgccactgcaatcgcagcgaaaatgtccggagctagtagaattctcgcgaatgacattgacccaattgctggtatggcaattaccctgaattgtgagctgaataggctaaatccctttcctatcctgatccagaacatccttaatctcgagcaggacaaatgggatctggtggtccttggcgatatgttttatgatgaagatctggcagatagtctgcaccagtggcttaagaagtgcttttggacctaccgcacaagagtactcataggagaccccggaaggccgcagttctccgggcactcaatccagcatcacctacacaaagtggtagagtactccttgctcgaatctacacgccaggaaaattccggattgaccacctccaccgtgtgggggtttcaaccctag

SEQ ID NO: 24989 - DNA, 2718 bp, synthetic construct
  source 1..2718: mol_type = other DNA; note = Synthetic coding sequence
atggaggtgcaggtgagccaggccagcctgggcttcgagctgaccagtgttgaaaaaagtttgcgtgagtggagtaggctgtcacgggaggtaatcgcttggctttgcccgagcagccccaattttatcctgaacttcccaccccctccctcagcaagttccgtgtcgatggtgcagcttttctcttcgccctttggataccagtcaccatcgggtcatagcgaagaggagcgtgaaggcaatatgaagagtgctaagccacaagtgaaccattcccagcacggcgaaagtcagagggctctgtcaccccttcagtccaccttgagctccgcagcgagcccatctcaggcttacgagacgtacatcgaaaatggcctgatttgcctgaaacacaaaatccggaacatcgagaaaaagaaattgaagttagaggattacaaggatcgactaaagtcaggcgagcatctgaaccctgaccagctggaagctgtggagaagtatgaggaagtccttcataacctggagtttgcaaaggagttgcagaagacctttagcggactttccctcgatcttcttaaagctcagaaaaaagcccagcgcagggagcacatgctgaagctggaggccgagaagaaaaaattacgtacaatcctgcaggttcagtacgtactgcagaacctgactcaggagcacgtgcagaaggacttcaagggcggcctgaacggtgcagtatatctaccctctaaagagctcgactatttgattaaattttctaagctgacttgtcctgaaagaaacgagagcctctcagtggaagaccagatggagcagtcttccttatacttttgggatctgctggaaggttccgagaaagcagtggttgggactacttataagcatctgaaggatctgctctcaaagctgttgaattctggttattttgagtcaatccctgtgcctaagaacgccaaggagaaggaagtgccattggaggaagaaatgcttatccaaagcgagaagaagacacagctgagcaaaactgagtctgtgaaggaaagcgaatccctcatggagtttgcacagcctgaaattcagcctcaagaatttctcaacagaaggtatatgactgaagtggattatagcaacaaacagggcgaggaacagccatgggaagctgattacgctcgaaagccaaatctacctaagcggtgggatatgctgaccgaacctgatgggcaagagaaaaaacaggaaagtttcaaaagctgggaggcgtctggtaagcaccaggaagtgtctaaaccggccgtgtccctcgagcaacgcaaacaagacacgtccaagttaaggtctacgctgccggaagaacaaaagaagcaggagatcagcaagagcaagccttcccccagtcagtggaaacaagacaccccaaagtccaaggcaggatacgtgcaggaggagcagaagaagcaggaaacccccaagttatggccggtccagttgcaaaaggagcaagatcccaagaagcagactccaaaaagctggaccccaagtatgcagtctgaacagaatacgactaagtcctggactacacctatgtgcgaagaacaggactcaaaacaacctgagacccctaaaagctgggagaacaatgtggaatcccagaagcattcactgaccagccaatcacagatatcccccaagtcctggggagtggctaccgcatcactcattccaaacgatcaactgttgccaagaaaactaaacacggaacctaaagacgtacccaagcccgttcatcagccagtcgggtcctcatcaacccttcccaaagatcccgtgctccgaaaagagaagctgcaggacttgatgacgcagattcagggcacctgcaacttcatgcaagaatctgtccttgatttcgataagccctcatctgccatccccacttctcagcctccaagtgctacccctgggtcgccagtagcatcaaaagaacagaacctatcctcacaatcagactttttgcaggaacccctgcaggcagctatacctcctggaaagcagcctagtagcctggcgtcacctaatcctcccatggctaagggcagcgagcagggcttccagtcccccccggcctctagttcatccgtgaccatcaacacagccccctttcaggccatgcagacggtgttcaacgtgaacgcccctcttccgcctaggaaagagcaggagattaaggagtcgccgtattctccaggctacaaccagagcttcacaaccgctagtacacaaactcctccgcagtgccagctgccctctatccacgtcgaacaaaccgtacactcacaggaaaccgctcagaccaatgtgttccctcgccccacgcagccctttgtgaatagccggggctcagtaaggggatgtacccgtggtgggcgcctgattaccaatagttacaggtcgcccggaggctacaaggggttcgacacttatcgagggctgccaagtatatccaatggaaattactcccagctccagttccaggcccgcgagtactcaggggctccgtacagccaaagggacaactttcaacagtgctataagaggggaggaacaagcggcggccccagggcaaacagtcgagccaattgctttataatgagaaattcactcctcctcatcaagcaacaaggcggagtgattctccttcgttag

SEQ ID NO: 24990 - DNA, 1107 bp, synthetic construct
  source 1..1107: mol_type = other DNA; note = Synthetic coding sequence
atgagcctgttcggcaccaccagcggcttcggcaccagcggcaccagcatgttcgggtctgcaacaactgataatcacaaccctatgaaggatatcgaggtgacaagcagtccagacgactccatcggctgtcttagctttagccctcccacactgcctggaaatttcctgatcgcagggagttgggccaatgatgttaggtgctgggaagttcaggactctgggcagacaattcctaaggcccaacaaatgcacaccgggcctgtcttggatgtgtgttggtctgatgacggctctaaggtgtttaccgccagttgcgataaaaccgctaagatgtgggacttgtcaagtaaccaagctatacagatagcccagcatgacgctcctgttaagaccattcactggatcaaagcccctaactactcgtgtgtcatgactggctcctgggacaagacattgaaattttgggacacccgatcctccaaccctatgatggtgctgcaactaccagaacggtgttactgtgccgatgtcatctatcctatggcagtcgtcgccaccgcagagagaggtctgattgtgtaccagctggaaaaccaaccaagcgagttccgtcggattgaatcacccttgaagcaccagcatcgctgcgtggccattttcaaggataagcagaacaaacccaccggcttcgcgcttggcagcattgaagggagagtagccattcactacattaaccctcctaatcccgccaaagacaatttcacttttaagtgtcacaggtcaaacgggactaataccagcgctccacaggatatatacgcagtgaacgggatcgcctttcacccagtgcacggcactctggctaccgtgggctctgacgggagattcagcttttgggacaaagatgccagaacaaaattgaagacatcagagcagctcgatcagccaatcagtgcctgttgctttaatcataatggcaacatctttgcctacgctagctcttacgattggtccaaaggccacgaattctataacccccaaaaaaaaaactatatattcctgaggaacgcggccgaggaactgaaaccccgcaataagaagtag

SEQ ID NO: 24991 - DNA, 1107 bp, synthetic construct
  source 1..1107: mol_type = other DNA; note = Synthetic coding sequence
atgagcctgttcggcaccaccagcggcttcggcaccagcggcacctctatgttcgggtctgcaacgaccgacaaccataatcctatgaaagacattgaagttaccagctcgcctgacgactctatcggatgcctcagcttcagcccgcctacactgccggggaactttcttatcgccgggagttgggctaatgatgttcggtgctgggaagtgcaggattctggacagacgatccccaaggcacaacagatgcataccgggcccgtgctagacgtgtgctggagtgacgacggctccaaagtgtttacagctagctgcgataaaactgcgaaaatgtgggacctctcaagcaaccaggcaatccagatcgcccagcacgacgctcccgtcaagacaatccactggatcaaggctcctaactactcttgcgttatgactggctcctgggacaagacactaaagttctgggataccagaagcagcaatcctatgatggtcctgcagttgcctgagaggtgttactgcgctgatgtaatctacccaatggctgtcgtggctaccgctgaaagaggcctgatagtgtatcagctggagaaccaacctagcgagtttcgcaggatcgaaagtcctctgaaacaccagcatagatgcgtggcaatatttaaggacaaacagaataagcctaccggatttgcacttggtagcatcgagggaagagtcgcgatacactatatcaatcctccaaatccggctaaggacaattttacttttaaatgccataggagcaacggcacaaatacctccgccccacaggatatttatgcagtcaacggaattgcattccatccagtccacggaacactggctacagtgggctccgatggccggttttcgttctgggacaaggacgcccgcactaagctgaaaacatctgaacagctcgatcagccaatcagtgcctgttgtttcaaccataacggcaatattttcgcctacgcctccagctacgattggtccaaggggcacgaattctataacccccaaaaaaagaattacattttcctgaggaacgccgctgaggagctcaagcctcggaacaaaaagtag

SEQ ID NO: 24992 - DNA, 2745 bp, synthetic construct
  source 1..2745: mol_type = other DNA; note = Synthetic coding sequence
atgagcagcagcggctacccccccaaccagggcgccttcagcaccgaacaatcgaggtaccccccgcacagtgtgcaatacacgttcccaaatactcgacaccagcaggaccccgcattcggcggaaaacacgaggccccatcatcacctataagtggtcaaccctgtggtgacgaccagaacgcctctcccagtaagctcagcaaggaggaactgattcaatcaatggacagggtggaccgtgagatcgctaaagtggagcaacaaatcctgaaactgaagaagaagcaacagcagctggaggaggaagccgccaagcctcctgagcccgagaagcctgttagccccccaccagttgagcagaaacatagatcaatcgtgcagatcatatatgatgagaacaggaagaaagcggaggaggcacacaagatctttgaaggcctggggccgaaagtcgagctaccactgtacaatcagccctccgacactaaagtgtatcatgagaacatcaagaccaatcaagtcatgcgtaagaaattgattttgttctttaaaaggcgaaaccacgccagaaagcagagggagcagaagatctgccagcgttatgatcagttaatggaggcttgggaaaaaaaggtcgatcgaatcgaaaacaacccaaggcgcaaggctaaggaaagcaaaacccgagaatactatgagaaacaatttcctgaaatcaggaagcagcgggagcagcaggaacgatttcagagagttggccagaggggagccggactgtctgccacgatagccagatccgaacacgaaatctccgagattatcgatggcctcagcgaacaggaaaacaatgagaagcagatgaggcaactctcagttattccccccatgatgttcgacgcagaacagcgacgggtgaaattcattaatatgaacggccttatggaggaccctatgaaggtgtacaaagataggcagttcatgaacgtttggacagatcatgaaaaggaaatcttcaaagataagttcatccaacacccaaaaaattttgggctcatcgcctcttacttagagagaaagtctgtccccgattgtgtattgtattattatctgaccaagaagaacgagaattataaggcgttggtccgccgaaattacgggaaacggcggggccgcaaccaacagatcgcaaggcccagccaggaggagaaggtcgaggagaaagaagaggataaagcagagaaaacggagaagaaagaagaagaaaaaaaagacgaagaggaaaaggatgaaaaggaggattctaaggagaacacaaaggagaaggataaaattgacggtactgcggaagagactgaagagagagagcaggcaactccccgcggccgcaaaaccgcaaactcacaagggcgacgcaaaggtcggattacacggtccatgacaaacgaggccgccgccgcctctgccgctgctgctgccgccacagaggaacctccacctccactgccccctccccccgagccaatttccactgaacctgtagaaacatctaggtggaccgaagaagaaatggaggttgcgaagaaaggactggtagagcacggacggaactgggctgctattgccaagatggtggggaccaagtccgaggcccagtgcaaaaatttctattttaattacaagagaagacacaaccttgacaatctgctgcagcagcacaaacaaaagactagtcgtaaaccaagggaggagcgagatgtgtcacagtgcgagtccgttgcttcgactgtctccgctcaagaggacgaagacatcgaggccagcaatgaagaagaaaatccagaggacagtgagggagcggagaactcctccgacacagaatctgccccttccccctcccccgtagaggcagtcaaaccaagcgaagacagtcctgagaacgccacttctcgcggtaataccgaacccgccgtggagctggagcccacaactgagacagcccccagcacatccccttccctcgcagtgccgagcacgaagcccgcagaagatgagtctgtggagactcaggtgaatgactccatttcagcagaaaccgcagaacagatggatgtcgatcaacaagagcatagcgccgaagagggcagcgtgtgtgacccccccccagccacaaaagctgattctgtggacgtcgaagtgcgggtccccgagaaccacgcatcaaaggtcgagggtgataacacaaaagaacgggacttggacagagcatccgaaaaggttgaaccacgggacgaggatctcgttgttgcacagcagatcaacgcccaacggcctgagccacagagtgataacgattcgtccgctacttgtagcgctgatgaggacgtggacggtgagcctgaacgccagcgcatgtttccaatggattcaaagcctagtttgctcaatcctaccggctctattttagtcagctctccattaaagcccaacccacttgatctgcctcagctccagcatcgtgctgcagtgattccacctatggtctcctgcactccttgtaatatccccattgggacgcctgtgtctggctatgccctgtatcagagacacatcaaagcaatgcatgagagtgccctactagaggaacagcgtcagcgccaggaacagatcgacttggaatgtcgctctagtacatctccttgtgggacgagtaaaagccctaatcgggaatgggagggcaggtag

SEQ ID NO: 24993 - DNA, 7032 bp, synthetic construct
  source 1..7032: mol_type = other DNA; note = Synthetic coding sequence
atgagcagcagcggctacccccccaaccagggcgccttcagcaccgaacaatctcgttatccacctcactctgtccagtatacttttcctaacacacgtcatcagcaggaccccgctttcgggggaaagcatgaagccccctcctcgcctatatccggccagccatgtggtgatgatcagaacgcctccccgagcaaactcagcaaggaggagttaatacagagtatggaccgcgttgatcgggagatcgcaaaggttgagcagcagatcttgaaactgaagaagaaacagcagcagttggaggaggaggcagccaagccacccgagccggagaaacccgttagccccccccccgtcgaacagaagcatagatccatcgtgcagattatatacgatgagaacagaaagaaagctgaagaggcccacaagatttttgaagggctggggccaaaggtagagttgcctctgtataatcaaccatccgacaccaaagtctatcacgaaaacatcaagaccaaccaagtgatgcgaaagaaactgatcctatttttcaaaagaaggaaccacgctagaaagcagcgggagcagaagatttgccagaggtacgatcagctgatggaagcctgggagaaaaaggtggatagaatcgaaaataatcctaggaggaaagctaaggagtcaaaaacaagagagtattacgagaagcagtttcccgagatccgaaaacaacgagagcagcaggaaaggttccagcgcgtcggccagcggggggccggcctgagtgccacaatcgcgcgaagcgagcatgagatctctgagatcatcgatggactctctgagcaggagaacaacgaaaagcaaatgcgacaattgagcgtaatcccacccatgatgtttgacgcagaacagcggagggtgaaattcatcaacatgaacggactgatggaggatcctatgaaagtgtataaagaccggcagttcatgaatgtttggacggaccatgaaaaagagatattcaaagataagttcatccagcacccaaagaattttggactcatcgccagttaccttgaaagaaaatctgttcccgattgcgtgctgtactattaccttacaaaaaaaaacgagaattacaaagcattagtgcgaagaaattatggaaaacggaggggccgaaatcaacagatcgccagaccaagccaggaggagaaggtggaagaaaaggaggaagataaggccgagaaaaccgagaagaaagaagaggagaaaaaggatgaagaagagaaggatgagaaggaggattccaaggagaacacaaaggaaaaagacaagattgacggcacagctgaggaaacagaggaacgggaacaggcaactccgcgggggcggaaaacagcgaattcccagggccgcaggaaaggtaggatcactcggagcatgacgaatgaggccgctgccgcgagcgccgcagccgctgctgccaccgaagaacccccacctcccctcccaccaccaccggagcctataagtacagagcctgtcgaaacctcccgatggacagaggaggagatggaggtcgccaagaaagggctcgttgaacacggacggaactgggctgccatagccaagatggtggggactaaatcagaagcccaatgtaagaatttttacttcaattataaaagaagacataatctcgacaacttgttacaacagcacaaacaaaagacctcccgtaaacctcgcgaggagcgggacgtgagccagtgtgagtcagtcgcatccacggtttcggctcaggaagacgaagatatcgaagcatcgaatgaggaagaaaacccagaagattcggagggcgcggaaaacagttctgatacagaatccgctccttctccatccccggttgaagccgtgaagcctagcgaagatagccccgaaaacgccacctctcggggtaataccgagccagctgtagagttagaacctactacggagacagctccatccacctctcccagtttggctgttccgagtacgaaaccagccgaagatgagtccgttgaaacccaggtcaacgacagcatctccgctgaaacagctgaacaaatggatgtggaccagcaggaacacagcgccgaagaaggtagcgtgtgtgaccccccccctgccacaaaggccgactccgtagatgttgaggtgcgggtgccggaaaatcacgcaagtaaggtggagggtgacaacactaaggagcgggatctggatagggcctcagaaaaagtggagcctagagacgaggacctggtcgtggcacaacagattaacgctcagcgaccggagccccagtcagataatgacagttctgctacctgctctgcagacgaggacgtggatggagaaccggagcggcagagaatgttccctatggactccaaaccttcactcctgaacccgacggggtctatcctggtctctagtccgctgaagcccaacccgctggatcttcctcaactgcaacaccgtgcggcggtgatcccacccatggtctcctgcaccccctgtaacatacctattggcacgccagtgagcggatatgcattgtatcagcggcacattaaagcaatgcacgagagtgctctcctcgaggagcagagacaacggcaagagcagatagatttggaatgtagatcatccacctctccatgcgggacatctaagtcaccaaaccgagagtgggaggtcctccagcctgcccctcatcaggtgataaccaacctcccagaaggagtcagactcccaactaccaggcccacaaggccgccgcctcccctgatcccctccagcaagacgaccgtcgcgagcgaaaaacccagttttattatggggggaagcatttcccaggggaccccagggacatatcttacatctcacaaccaagcctcttatacgcaggaaacccctaagccgagtgtgggaagcatttcgcttggacttccccgacagcaggagtctgcaaagtccgcgaccctcccttatatcaagcaggaagaatttagccctagatctcaaaatagccagcccgagggactgcttgtgcgtgcccagcatgagggagtggtaagggggactgccggtgctattcaggagggctccattaccagggggactcctacctcaaaaatcagtgttgagtcgatccctagcctccgtgggtcaatcactcagggcactccagccctacctcagaccgggattccaactgaggctctcgttaagggatccattagcaggatgcctatcgaggatagttctcctgagaagggcagagaggaggcggctagcaagggccatgttatttacgagggtaagagcggacacatcctctcgtatgacaatattaagaatgctagagaaggtaccagatcccccagaaccgcacacgaaatttctctaaaacggagctatgaatctgtggagggcaatatcaaacagggcatgtctatgcgggagtccccggtgtctgccccacttgagggtttgatttgtagagctctgcctagaggcagcccgcactccgacctgaaggagagaactgttctatccggctccattatgcaggggactccccgggctactaccgagtctttcgaggacgggctgaaatatcctaaacaaatcaagagggagtcccccccaattcgagccttcgaaggtgctataactaagggaaagccttacgacggaatcaccactattaaggaaatggggagatctatccacgagatcccccgacaggacatccttacacaggagtcgcggaaaacacccgaagtcgtgcagtcgactcggcctatcatagaaggctccataagccaaggaacccctatcaagttcgataataattccgggcagtctgcaataaaacataatgtgaagtccctgatcacaggcccttcaaagctttctaggggaatgccgccactggaaatcgttccggagaacatcaaagtcgtggaacgaggcaagtacgaagacgttaaagctggagagactgttaggtctcggcacacttcagttgttagcagcggtcctagcgttttaaggagcaccctccatgaggcccctaaggcgcaactgtcccccggaatctacgatgacacttccgcaagacgcactcctgtgtcataccagaatactatgtccagggggtccccaatgatgaaccgcacctccgacgtctctagcaacaagtccacaaatcatgagcggaagagtacccttacccccactcagcgggagtctattcctgcaaaatcaccagtgcctggagttgaccccgttgtctctcacagtccattcgaccctcatcatcggggtagcaccgccggagaggtataccgcagccacttgcccacccatctcgaccccgccatgccctttcatagagcactggatcccgccgccgcctacctgttccagaggcaattgtcgccaacaccaggataccccagccaataccaactgtatgccatggagaatacccgacagactattctgaatgattatatcacctcccagcagatgcaggtcaaccttaggcccgatgtcgccagagggctgtcgccgcgtgaacagcccttggggttgccctatccagcaacgaggggcattatagatcttaccaacatgcccccaaccatcctggtgccacacccagggggtacatccacaccgccaatggatcgcatcacatatattcctggcactcagatcaccttccccccgcgcccctataattccgcatcgatgagccctggccaccccacacatcttgccgcagccgcctctgccgaacgtgagcgggagagagagagagagaaagagagagaacgagagagaatcgctgccgcatcaagcgatttgtaccttagacccggttctgagcagccaggccgcccaggcagccacggatatgtcaggagcccttcgccgagtgtgcgaactcaggaaactatgttacagcagcgtccttccgtgttccagggcaccaacggaactagtgtgataacccctttagatcctacagcgcagctgagaataatgccgctccccgccgggggcccctcgatcagccagggcctgcccgcgagtaggtacaacacagctgccgatgcactcgctgccttagtcgacgccgctgcctcagcccctcagatggacgtgtctaagaccaaagaatctaagcatgaggccgccagactggaagaaaatttgcggagccgatctgccgccgtctccgagcaacagcagttagagcaaaaaaccctcgaagtggaaaaaagaagcgtccaatgcctctatacctcttctgcctttccttccggaaagcctcaacctcacagctctgttgtctattccgaggccggcaaggataagggcccaccccccaagtctagatatgaggaggaacttcgcacaagagggaagaccacaatcaccgctgctaattttatcgatgtaattatcactcgccagatcgcatcagataaagacgcacgggagcgcggaagccagtcaagcgattcaagctctagcttgtcttcacaccgctacgaaactccatccgacgctatagaagtgattagccctgcgagcagcccagcccctcctcaggagaagctacagacttatcaaccagaggtggtcaaagcgaatcaagccgaaaatgatccaacaaggcagtacgagggaccgctccatcactaccggccccaacaggagagccccagtccccagcaacaactgcctcccagcagccaggctgaaggaatgggtcaggtgcctaggacccaccgcctgattactctcgcagatcatatttgtcaaattataacacaggacttcgcccgcaatcaggtaagtagtcagacgccacagcagccccctacgtcgacttttcagaacagccccagtgctctcgttagtactcctgtccgcacgaagacgtctaacagatattcccccgaatcacaggcccagtcagtgcatcatcagagacctgggagccgagttagtcctgagaacctggtcgacaaatctcgaggcagccgaccgggcaaatctcccgaacggtctcatgtgtcgagtgagccatacgagcctatctcgccccctcaggtccctgtagtgcacgaaaagcaagattcacttctactcctgagtcagcgaggagctgagcccgctgaacagcgcaatgacgcaaggagcccaggctccatttcatatctacctagcttctttacaaaacttgaaaatacttctccgatggtaaagtctaagaagcaggaaattttcagaaaactgaactccagcggcggcggagattcagatatggcagccgctcagccaggcactgaaatcttcaacctccctgcagttaccacatctgggagtgtctcttccagagggcactcattcgcggaccctgcttccaacctggggctcgaagatattatcagaaaggccctcatgggatctttcgatgataaggttgaggatcacggggtggtgatgagtcagccaatgggtgtcgtccctgggacggccaatacctccgtggtgacctctggcgaaactaggagggaagagggtgacccatcgccccactcgggggtgtgcaagccgaagctcatctccaaatccaattctcggaagagcaaatcaccaataccgggccagggctatctgggcaccgagaggcccagttctgtcagctcagtgcacagtgagggagactaccaccgccagacacctgggtgggcctgggaagataggccgtcttccacgggttcaacacagtttccctataatccgttgaccatgagaatgctttcttcaactcctcccactcccattgcttgcgccccaagcgcggtgaaccaggcagctccacaccagcaaaacagaatctgggaacgagaacccgcccccctgctcagtgcccagtacgagaccctcagcgattccgatgactag

SEQ ID NO: 24994 - DNA, 7014 bp, synthetic construct
  source 1..7014: mol_type = other DNA; note = Synthetic coding sequence
atgagcagcagcggctacccccccaaccagggcgccttcagcaccgagcaatcaagatatcctccgcacagtgttcagtacacctttccaaacacccggcatcaacaggaatttgcagttcccgattaccgctcttctcaccttgaagtttcgcaggcctcacagctgctgcagcaacagcaacaacagcagctaagacgacgtccatcgctattgtctgaatttcatccggggagcgaccgacctcaagagagaagaactagctatgagccgtttcatccaggaccgtctccagtcgatcacgacagtctcgaatcaaagaggcctcgcctcgaacaggtgtctgacagccacttccagcgtgtctcagcagccgtgttacccctggtgcatcccctccccgaaggtctcagggctagcgccgatgctaaaaaggatcctgcattcggaggcaaacacgaagccccgtccagtcccattagtggacagccctgtggcgacgaccagaacgcctcaccgagtaagctcagtaaagaggaattgatacaatccatggaccgcgtcgatcgagagatcgccaaagtggaacaacagatcctcaaattgaagaagaaacagcagcagttagaagaggaggcagcaaagccacccgaaccagaaaagcctgtgtcaccaccgccagtagagcaaaaacaccgcagcatagtgcagattatttacgacgagaataggaagaaggcagaagaggcccacaaaatattcgagggactggggccaaaagtagagctccccctatacaatcagcctagcgacactaaagtgtaccatgagaacatcaaaaccaatcaggttatgagaaagaaattgattctgtttttcaagcgcagaaatcacgcccgcaagcaacgcgaacagaaaatttgtcagaggtatgatcagttgatggaggcctgggaaaaaaaggttgatcggatagagaacaacccccgaaggaaggctaaggagtcaaaaactcgcgaatattatgaaaaacagttccccgagattagaaagcagagagagcagcaggagcggttccagagagtgggtcaacgcggcgccggcttatccgccaccattgcaaggagcgaacacgagatctccgagatcattgacggcctcagcgagcaagaaaataacgaaaagcagatgaggcagctgagcgttatcccacctatgatgttcgacgccgaacagcggagagtgaagtttatcaatatgaatggactcatggaggatcctatgaaggtgtataaggataggcagttcatgaacgtgtggactgaccatgagaaggagatctttaaggataagttcatccaacatccaaagaactttggcctcattgccagctacctggagagaaaatcagtcccggattgtgttctctactactacttgactaagaagaacgaaaattacaaggctctcgtgcggcgcaattacggcaaacggcgcggccgaaatcaacagattgcccgtccaagccaggaggaaaaggtcgaagagaaagaggaagacaaagccgaaaagaccgaaaaaaaagaggaggaaaagaaggacgaagaggagaaagatgagaaagaggacagcaaggagaacacaaaggaaaaagataagattgacggcactgctgaggagaccgaggagcgtgaacaggcaacacccagaggcaggaaaaccgccaacagccagggccggcgcaagggccgcatcaccaggagtatgactaatgaagcggccgctgctagcgctgccgctgcagccgccaccgaggaacccccgccacccctgccccccccacccgagcctatctcaaccgagccagtggagacctcacgctggacagaggaggagatggaagtggcaaaaaaaggcttggtggaacacgggcggaattgggcggccatcgcgaaaatggttggcaccaagagcgaagcgcagtgtaaaaatttttatttcaactacaagcgccggcacaatctcgacaaccttctccagcagcacaaacagaaaaccagcagaaaaccgcgtgaggaacgggacgtatctcaatgtgaaagcgttgctagcactgtgtcggctcaggaagacgaggatatcgaggcttcaaacgaagaagagaacccagaagactccgagggcgctgaaaattcctccgatactgaaagtgcgccatccccaagccccgtcgaggctgtcaagcctagtgaagattcacctgaaaatgcgacgtcaaggggtaacacggagcctgccgtggaactggagccaaccactgaaaccgcaccgagcacttcgccctctctggccgtgccatccactaagcccgccgaagacgagagtgtagagacacaagtcaatgactcaatcagcgccgagacggccgagcaaatggacgtggaccagcaggagcactctgctgaagaaggctcggtctgtgacccccccccagcaaccaaggctgacagcgtggacgtggaagttagggtgcctgagaaccacgcatccaaagtcgagggcgacaatacaaaggaacgggatcttgatcgcgccagtgaaaaggttgagccaagggatgaggacctcgtcgtggctcaacagattaatgcccagcgacctgaaccccaaagtgacaatgacagtagcgccacatgcagcgccgatgaggatgtcgacggggaaccagagcggcaacggatgtttcccatggatagcaagccaagccttctgaatccaactggctcaatactggtgtccagtcccctcaaacccaatccactagacctgcctcagctgcaacacagagcagccgtgataccgcctatggtttcttgtactccttgtaatatcccgattggaacccccgtgtctggctacgccctttaccaaagacatattaaggctatgcacgaaagtgctctcttagaagaacagagacagcgacaggagcagatcgatctcgaatgtaggagtagtaccagtccttgcggcactagcaagagtcccaatcgggaatgggaagtgctccagcctgcgcctcaccaggtgatcactaatcttccagagggggtgcgcctgccaacaactcgtcctactaggccccctcccccacttatcccttcttccaaaaccacagttgccagtgaaaaacctagcttcattatgggtgggtcaatctctcagggtacgccaggcacttatctcacaagccacaaccaggcctcttacacgcaggagacgccaaagccttccgttggcagtatttcgctaggcctccccaggcaacaggagagcgctaagtccgccacactcccctacattaaacaagaggagtttagtcctcgcagtcagaacagtcagccagaaggactgctggtgcgggcccagcatgaaggcgtcgttcgaggtaccgctggcgccatacaggaaggctctatcacaaggggaaccccaacgtccaaaataagcgtggagagcataccaagtctgcgtgggtccatcactcagggcaccccagccctcccccagacagggattcccacagaagctcttgtgaaaggcagcatcagtcggatgcccattgaggactccagccctgaaaagggccgcgaggaggcagcctccaagggtcatgtgatctatgaaggcaagtctgggcatattctttcctatgataacattaaaaatgcacgagagggcacacgcagccctagaaccgcccacgagattagccttaaacgatcttacgaaagcgtcgagggaaacataaaacagggcatgagtatgcgggagtcacctgttagcgctccactggaaggtctgatctgccgggccctcccaaggggcagtccgcactcagacttaaaagagcgaactgtactttccgggtccatcatgcaggggacgcctcgggcaacaacagaatcttttgaagatggcctgaagtatccaaaacagatcaagagggagtctccacctattagagcatttgaaggagccattaccaagggcaagccttacgatgggatcaccaccatcaaagaaatggggcggagcatccacgagataccccgccaggatattctgacccaggagtcccgcaaaaccccagaagtggtacaaagcaccagacccattatcgaaggctccatcagccaaggtacccccattaaatttgataacaattcgggacaatccgccatcaagcacaatgtcaagtccctgattacaggtccatcaaagctctctagaggaatgccgccattggagattgtccctgagaatattaaggtggtagaacgcggtaagtacgaagacgttaaggctggcgagaccgtcagatctcgccacacgtccgttgtgtcctccggcccgtcggtgttaagaagtacgctgcacgaggcgcctaaagcccagctgagcccaggcatctacgatgacaccagcgcccggagaaccccggtcagctatcagaatacgatgagccgcggctcacccatgatgaatcgaacttctgacgtgaccattagcagcaataagtccacaaaccacgagcgaaaatccactctgacccctacccaacgggaatcaattcccgccaaaagcccagtccccggggtcgacccagtggtgtcccactctcctttcgacccgcatcatcgaggaagcacagctggtgaagtctatcgaagccatctgcctacacacctggatcccgctatgcccttccaccgggcgctggatccagctgctgccgcatacttgttccagcgccagctgtccccaacacccggatatcctagtcagtaccagctctacgccatggagaatacacgacagactatattgaatgactacattactagtcagcaaatgcaggtaaatttgcgcccggatgtggcccgtggcttgtcacctcgagaacagcccctgggactcccgtaccctgctactcggggaataattgaccttacaaacatgcccccaacgatcctggtccctcatcctggcggcacgagtactccaccgatggatagaataacctatatccctgggacacagatcacatttccaccacgtccctacaacagcgctagtatgagtccggggcatcctacccacttggccgccgccgcttcagccgaacgagagcgtgagcgcgagcgcgagaaagagcgggagagagagcgtatcgcggcagccagtagcgacctctatctgcggcctggctcggaacaaccagggcggcccggaagccacggttatgtacggtctccatccccaagcgtccgcacgcaggagactatgctgcaacaacgtccctcagttttccagggtactaacggtacatccgtcatcacccctctagatcccaccgcacagttgagaatcatgccactgcctgctgggggccctagtatttcacaggggctccccgcttccagatacaacaccgcggcggatgcactggcagctctggttgatgcggccgcgagcgctcctcagatggacgtgtcaaagacaaaggaaatcagctctcatagatatgagacccccagcgacgctatcgaggtcatctccccggcctcttctcctgcccctcctcaggaaaaacttcagacataccagcctgaggtggtcaaagccaatcaggctgaaaatgatcccactagacagtatgagggaccactacatcactatcgacctcaacaggagagtccttcccctcagcagcaactgcccccttcgagtcaggccgagggaatgggtcaggtaccacggacccatcgcttgatcaccctggcggaccatatatgccaaattattacccaggatttcgcccgtaatcaggtgtctagtcagacaccccagcaacctcccacttccacatttcaaaactctcccagcgccctggtgtccacaccagttcgaactaaaaccagcaaccgatatagcccagaaagccaggcacaatccgtgcaccaccagcgtcctgggagccgggtgagtccagagaacctggtcgacaagtcacgggggtcgagacctggaaagtctccagaaaggtcccacgtgagctccgaaccatacgagcccatctcacctccccaggtacctgtagtgcacgaaaaacaggacagcctcttacttctctctcaacgtggtgccgaacccgcagagcagaggaatgatgcacgttcacctggatctatatcctacctgccctcctttttcaccaagctcgagaacacctctcctatggtcaagtccaaaaaacaggagatctttcggaagctgaactcaagtggggggggtgatagcgacatggctgcggcccagcccggcaccgagatttttaacctgccggctgtgactaccagtggcagcgtttcttctcgaggacactcatttgccgatcccgcaagcaacctcgggctggaagatatcatcagaaaagccttgatgggtagctttgacgataaagtggaggatcatggcgttgtgatgtcccagccaatgggggtggtccctggcaccgctaacacgagcgtcgttacaagtggcgaaaccaggagggaggagggggaccccagccctcattctggcggcgtttgcaagccgaaactgatctccaagtcgaactcccgaaagagcaagtctcctataccaggacagggctacttgggtaccgagagacctagttcagtgagcagcgtccattctgagggggactatcaccgccagactcctggctgggcttgggaggaccgcccatcttctaccggatccacacagttcccttataaccctttgacgatgagaatgctgagttctacccctcccactcctattgcctgcgccccctctgccgtgaaccaggctgctcctcaccaacagaaccgaatctgggagagagaacctgcaccactgctttctgcacaatatgagacactgtctgactccgatgactag

SEQ ID NO: 24995 - DNA, 3075 bp, synthetic construct
  source 1..3075: mol_type = other DNA; note = Synthetic coding sequence
atgccccccctggagatcgtgcccgagaacatcaaggtggtggagcgagggaagtatgaggacgtgaaagccggggaaactgttcgttcgcgccacacctcggtggtgtcaagcgggccaagcgttcttcggtctaccttgcacgaggcccccaaagctcagctgagccctggcatttatgacgacacatccgctcggagaactcctgtgtcctatcagaacacaatgtcgcgcggaagccccatgatgaatagaacctctgatgtgactatttccagcaataagagtacgaaccacgagcgcaaatccactcttacccccacccagcgggagtcaatacccgccaagagtcctgtgccaggagtggatcccgtggtgagccactcaccttttgacccccatcatcgcggatctacagccggagaagtgtaccgctcccacttacccactcacttggatccggctatgccgtttcaccgtgctcttgaccccgcagctgcagcttacctcttccagcgtcagctgtcccccacaccaggctacccttcacagtaccagttgtatgctatggaaaacaccagacagactatcctcaacgactatatcacttcccaacagatgcaggtgaatctgcgtcctgacgtggctcgggggctcagcccacgcgagcagcctctgggtcttccgtacccagcaacgcggggtatcatcgatcttaccaatatgccaccgaccattcttgtcccacatcctggggggacttccacgccacccatggaccgcattacctatatcccagggacacagattacgttccctccgcgaccgtacaacagcgcaagcatgagtcccggccaccccacccatctggccgcggcagcaagtgccgaacgagagcgggagagagagcgagaaaaagagcgtgaacgcgagcgaatcgccgcagcaagcagcgacctgtacttgcgacccggatcagaacagccagggcgtcctggtagtcacggatatgtgaggtccccatccccctccgtgcgaacacaggagaccatgcttcagcaacgtcctagtgtgttccaagggaccaacgggaccagtgtgatcacacccctggatcccaccgcgcagctacgaattatgcctcttcctgctggaggtccttctatttctcagggcctgcctgcaagtcgttataatactgcggccgatgccttggcagctctggtggatgctgcagcatcggcccctcagatggacgtctccaaaacaaaagaatcgaagcacgaagcagcacgcctggaggaaaacttaagatcccggtcagcagccgtctccgagcagcaacaactggaacagaaaaccttggaggtggagaagcggagcgtgcagtgtctgtacaccagctcagccttcccatctggcaaaccccagccacattcatcagtggtatattcagaagcagggaaagataagggtccgcccccaaaaagccggtatgaggaagagctccggaccaggggaaagaccactattacagctgccaattttattgacgttattattaccaggcaaatagcatccgataaagacgcaagggagaggggcagccagtcctcagacagcagcagcagcctatccagtcatcgatacgaaactccatctgatgcaatagaggttatctctcctgcctcaagcccagctcccccccaggagaaattgcagacctatcagcctgaagtggtgaaagctaaccaggccgagaatgatccgacccgacaatatgaaggaccgcttcaccactaccgcccgcagcaggagagccctagtccacaacaacaactgcccccatcatcccaagctgagggtatgggccaggttcccagaacccaccgcctgataaccttggccgatcatatatgccagatcattactcaggacttcgctaggaaccaggtcagtagccagaccccacagcagcctcccacatccacttttcaaaattctcctagcgcccttgtgtccacccctgtgcgaacgaaaacatctaacaggtacagtcccgagtcccaggcccagagtgtgcaccatcagcgccctgggtcacgggtttccccagagaacttggttgacaagtctaggggaagtcgcccaggcaaatcccccgaacgtagtcatgtgagctcggagccttatgaacccatctcacccccccaggttccggtcgtgcatgaaaaacaggattctttattgttgctatctcagcgcggcgccgaaccagccgagcagagaaacgacgcccggagccccggctctatctcatatctaccatctttcttcaccaagctggagaacacctctccaatggtaaaatctaagaagcaggagatttttcggaagctgaattcaagcgggggcggcgatagcgacatggcggcggcgcagccgggcaccgaaatctttaatctgccggcggtgacaacatccggatccgtcagcagccggggacattcgtttgctgacccagcatccaacctaggactagaagatattatccggaaagccttgatgggcagttttgacgacaaagttgaggaccacggggtggtgatgtcccaaccaatgggcgttgtccccggtactgctaacacaagcgtggtcactagtggagagacccgtcgagaggagggggatccatcacctcattccggcggtgtctgtaaaccaaaactgatcagtaaatccaactccaggaagagtaagtcaccaataccaggacagggatatttagggacagaacgacccagctcggtctctagtgttcattctgaaggcgactatcatcgacagactcctggctgggcctgggaagaccggcctagctccactggatcgacgcaattcccatataaccccctgacaatgcgcatgctgtcttccacccctccgactcccattgcgtgcgctccctctgcagtgaatcaagccgctccccatcagcagaaccggatctgggaacgagaacccgcccccttgctcagcgcccagtatgaaacactgtccgattctgacgattag

SEQ ID NO: 24996 - DNA, 4821 bp, synthetic construct
  source 1..4821: mol_type = other DNA; note = Synthetic coding sequence
atgctgctgcacctgtgcagcgtgaagaacctgtaccagaaccggtttctgggtctggccgctatggcttctcccagcagaaatagccagtcaagacgccgatgcaaagaacccctcagatactcctacaatcctgaccaattccacaacatggatctgaggggagggccacacgatggggtcacaatccctaggagtacctcggacaccgacctagtcacatcagactccaggagtacgctgatggtcagctcctcatattattctattggtcacagccaggacctcgtgattcattgggacatcaaagaagaggtggatgctggggattggattggtatgtatctgatcgacgaagtgctgtccgagaactttttagattacaaaaaccgcggtgtaaacggatcccatcgcggacagataatctggaagattgacgccagctcttacttcgtcgagcctgagactaaaatttgttttaaatactaccacggtgtatccggagccctgagagccacaacccctagtgttactgtcaagaactcggccgctcccatatttaaatccataggtgctgacgagaccgtacaagggcagggcagccgccgtctcatatccttttccctctcagattttcaggctatgggcctaaagaagggaatgttcttcaatcctgatccatacctcaaaatctcgattcagcctggaaaacacagcattttcccagctcttccacaccatggacaggaaagacgatcaaagattattggcaatactgtcaatcccatctggcaggccgagcaattctccttcgtgtcccttcctacagacgtgttggaaatcgaggtgaaagataagttcgctaaatctaggcccatcatcaaaagatttctaggcaagcttagcatgcctgtgcaacggctgctggaaagacatgccattggggatcgcgtggtaagctacacgctcgggcgcaggctccccaccgaccatgtgtccggccagcttcagtttagattcgagattaccagtagcatccatcccgacgatgaagaaataagcctgtctaccgagccagaatccgctcaaatccaggactccccgatgaataacctgatggaaagtggcagtggcgaacctcgatctgaggctccggagtccagtgaatcttggaagccggaacagctcggggaaggcagcgtgcctgacgggcctggtaaccagagcattgaattgtctaggcctgcagaagaagctgcagttatcactgaggcaggcgatcagggcatggtgagcgtgggacccgagggggcaggagaattgttggcgcaggtgcagaaagacatccagccagcacccagcgctgaggagctggctgagcaactggatctgggagaggaagcttccgcgcttttgctggaggacggcgaggcccccgcctcaacaaaggaagagcctttagaagaagaagccacaactcagtcgcgggcagggcgcgaggaagaggagaaggaacaggaggaggagggggacgtcagtactctggagcagggggaggggagattacaattgcgcgcctctgtgaagcggaagagtaggccatgctcactcccagtcagcgaactcgaaactgtaatcgccagcgcttgtggcgaccccgagaccccacgaactcattacatcagaatccatactctcctgcacagcatgcccagcgcacaaggaggctctgcagcagaggaagaagacggggccgaggaggagagcaccctgaaggactcctcagaaaaggatggactttctgaggtggacacagttgccgccgatccatctgccctggaggaagaccgcgaagagcccgagggtgccactcccgggacagcacaccctggccacagtgggggccattttccatccctggcaaatggcgctgcccaggatggagacacgcacccctcgaccggaagcgaaagcgacagctcacctcgacaaggaggcgaccacagttgcgaaggttgtgatgcaagttgctgttcaccgtcctgctatagcagcagttgttacagcacaagctgttactcgagtagttgctatagtgctagctgttatagcccaagctgctataacgggaatcggttcgcatcccacaccaggtttagctctgtcgatagcgccaagatcagcgaatccacagtgttctccagccaggatgacgaagaagaggagaactctgcgttcgagtcagtgccagatagtatgcaatccccggagctcgatcctgaatccactaacggggccggaccttggcaggatgagctcgccgcgcccagcggccatgtagagaggtcccctgaagggctcgagagtcctgttgccgggccatccaaccgccgggagggagagtgcccaatcctccataactcccagcctgtgtcccagcttccatctctgcgccccgaacaccatcactaccccaccattgatgagccacttcctcctaattgggaagcccggatcgattcacacggacgagttttttatgttgatcatgtaaatcgaacaacgacttggcagcgccccaccgcagcggcaactccggatggcatgcggagatccgggtccatacagcaaatggagcaattgaatcgaagatatcaaaatatccagagaacgatcgctacagaaagaagtgaggaggacagcggcagccagtcatgcgaacaggcacccgcgggaggtggaggcggaggaggatctgacagcgaagccgagagctctcaatcgagtctggatctgcgtcgggaagggtctttgtccccagtgaattctcaaaagatcaccttgctgctacagagcccagcagtaaagttcatcaccaatcccgagtttttcacagtattacacgccaactattccgcctatcgcgttttcacatcttcaacatgcctcaaacacatgatcctgaaagtgagacgcgacgcaagaaacttcgagcggtaccagcataatagggaccttgtcaatttcatcaacatgttcgcagatactaggttggagttgccgagagggtgggagattaagacagatcaacagggcaagtccttctttgttgatcacaactctagagctactactttcatcgaccctcgcattccactgcagaacgggagactgcccaatcatctgactcaccggcagcacctgcagagattacgcagctacagtgcaggcgaggcctcagaagtaagtaggaatagaggtgcttctctccttgctcgtccaggccattccttagtggccgccatccgctcacaacaccagcacgaaagcctccctctggcgtataacgataaaatcgtggcttttttgcgtcagccaaatatcttcgagatgttacaggaaagacaaccttccctggccaggaatcataccttacgagagaagattcattatatccgaactgaaggaaatcacggtctggagaagttatcctgcgacgccgatttggtcatcctgcttagcctgttcgaggaggaaataatgagctatgtgccactccaagcagcctttcaccctggatatagctttagcccaaggtgtagtccttgttcgtccccccaaaattcgcccggactccaacgtgcatcagcacgggcgccttccccctaccgacgcgacttcgaggccaagctccgtaacttctataggaagctagaggcaaaaggatttggccagggccccggcaagattaagctcatcattaggagggatcacctgctggagggcaccttcaaccaagttatggcctattcacgaaaggaacttcagagaaacaagctttatgtaaccttcgttggggaagagggactggactacagcggcccctcccgggaattcttctttctgttgagtcaggaactgttcaacccctattatggactatttgagtactccgccaatgatacttacacggttcaaatttcccccatgagcgctttcgttgagaaccatctcgaatggtttagatttagcggccgtatcctcggcctggcccttattcaccagtatttgctggacgccttcttcaccagacctttctataaagccctgctgagattaccttgcgacctttctgacctggaatacctggatgaggaattccaccagtcactgcagtggatgaaggacaataacatcaccgacatcctcgatttaaccttcacggtcaacgaggaagtcttcgggcaggtcactgaaagggaactaaaatccgggggcgcgaacactcaggtgaccgagaaaaacaaaaaggaatacatagagcggatggtcaagtggagagttgagagaggagtggttcaacagaccgaagccttagttcgtggtttctacgaggtggtcgatagcagactcgtcagcgtcttcgatgctagggaactggagttggtgatcgccggcactgcggagatcgacctcaatgactggcgaaataacactgaatatagaggaggctaccatgatggccatctggtgatcaggtggttttgggccgccgtggaacgatttaataacgagcagaggcttcgcctcttgcagttcgtcactggcacgtcgtcggtgccctacgagggctttgcagccctacgaggcagcaacggtctcaggcgattttgtatagagaaatggggtaagattacaagcctgccgcgtgctcatacctgtttcaatcgtctcgatcttccaccctaccctagttatagtatgctgtacgaaaagctcctgacggcggtcgaggagacaagcaccttcggcctggagtag

SEQ ID NO: 24997 - DNA, 1209 bp, synthetic construct
  source 1..1209: mol_type = other DNA; note = Synthetic coding sequence
atggccgccctgtgccggaccgccgagagccaggccgagctgcagtgtacacagctggaccttgaaaggaaactcaaactgaacgagaacgccattagcaggctccaagccaatcagaagtccgtgctggtgagtgtgtcagaagtcaaggctgtggccgaaatgcagttcggcgaactcttggccgcagtcagaaaagcacaggcaaacgttatgctgttcctggaggaaaaagagcaggccgctctgagccaggccaatggtataaaggcgcatcttgagtataggtctgcggagatggaaaaatccaaacaggagctggaaacaatggccgccatttcaaacacggtccagttcttagaagagtactgcaaattcaaaaatactgaagacataacattcccatctgtttatataggccttaaagataagctgagtgggattaggaaggtgattaccgagtcaacggtgcatctcatccagctactcgagaactacaaaaaaaagctacaagaattcagcaaagaggaggagtatgacatccggacccaagtgtcagcaatcgtgcagaggaaatattggacgtctaaaccagagcccagcaccagagaacagttcttgcagtacgtgcacgatatcacctttgaccctgacactgctcataaatatttgcgtttgcaagaggaaaaccgaaaggtaacaaacacgaccccctgggagcacccttaccctgacctgccttccaggttcctgcactggcgccaggttcttagccagcagagtttatatctacacagatactactttgaagtagagattttcggagccggaacttacgtgggactgacctgtaaggggatcgatcaaaaaggagaagaaaggtcatcttgtatttccggcaacaacttctcatggtccctccagtggaatggcaaggaattcacggcttggtacagcgacatggagacacccctcaaagctgggccgttctggcggttgggggtgtacatcgattttcccggggggattctgagtttctatggagtggagtatgattcaatgaccctggtgcataagtttgcttgtaaattctctgagcccgtctacgctgccttttggttgagcaagaaggagaacgcaataagaatagttgacctgggtgaggagcccgagaagcctgccccgtccctcgtgggcacggctccatag

SEQ ID NO: 24998 - DNA, 1677 bp, synthetic construct
  source 1..1677: mol_type = other DNA; note = Synthetic coding sequence
atgcaccggagcgcccccagccagaccaccaagcggagccggagccctttcagcaccaccaggagaagctgggacgactcggaatcaagcgggactaacttgaacatagacaatgaagactattcccgctacccacctcgggagtatagggcctccggttctcggagaggcatggcttacggccatatcgatagctacggggcagatgacagtgaggaggagggggctggcccagtggaacgccccccagttcgaggcaagacgggtaagttcaaggacgacaagctcctggaccccgtgccagccgctcgttgtagcgcttccagggcagattttttacctcagagtagtgtggcgtcgcagagttcatctgagggtaagctcgccaccaagggtgattcatctgagagagaacggcgagagcagaatctgccagcacggcctagcagagcaccagtgtccatctgtggcgggggagagaatacctcaaagtcagctgaggaaccggtggtcaggcctaagataaggaatttggcctccccaaattgtgtgaaacctaagatctttttcgatactgatgatgacgacgacatgccgcactcaacgagtcggtggcgagacactgctaacgataatgaaggacattctgatggcctggcaagacgagggcgcggggaaagtagcagtggctaccctgagcccaagtaccccgaggataagagggaggcccgttctgatcaggttaaaccggagaaagtgcctagaaggcgcagaacaatggccgatccagacttttggacccacagcgacgactattacaagtactgtgatgaggactctgattctgacaaagagtggattgccgcgttaagaaggaagtatcgcagtagagaacagactctgagttcgagcggcgaaagttgggagacattgcctggaaaagaagagcgagagccacctcaggccaaagtgtccgctagtaccggcactagtcctggccccggagcttccgccagcgcgggggctggcgctggtgcatcagctgggagcaacgggagtaactacttggaggaagtgagagagcctagcctccaggaagaacaagctagccttgaggagggcgagattccttggttgcagtaccacgaaaacgattctagcagtgaaggagacaacgattccggacacgagctcatgcagcctggcgtatttatgctggacggtaataataacctggaggacgactccagcgtgtcggaggatttggaagtggactggtccctgtttgatggttttgctgacggtctgggcgtagcagaggctatttcatatgtggatccgcagttcctcacctacatggcattggaagagcgcttggcacaggccatggagacagccctggcccatctcgaaagcctggccgtggacgtggaagttgccaaccctccagcctctaaagagtcaatcgatgccctgcccgaaattctggtcaccgaagaccacggggccgtgggacaggaaatgtgctgccccatctgctgttcagaatacgtaaagggtgaggtagccacagagctgccttgtcaccattactttcataaaccatgcgtttccatatggctccagaaaagtggtacctgtcctgtgtgccggtgcatgtttccaccgcccctatag

SEQ ID NO: 24999 - DNA, 3591 bp, synthetic construct
  source 1..3591: mol_type = other DNA; note = Synthetic coding sequence
gtgcccccctgccccgccgagctgcggagcgtgaccaacggccagagtaatcaaccttctaacgaaggggatgccataaaagtcttcgttcgcataagaccccccgccgaacgctcgggaagtgccgacggagagcagaacctgtgtctgagtgtcctgagctccaccagcttgaggctgcacagtaacccagagcccaagacgtttacatttgatcatgtggcagatgtggataccactcaagagtccgtgtttgcaacagtagccaaatccatcgtggaatcgtgtatgagtggctacaacgggacaatcttcgcttacggtcaaaccggatcaggcaagacctttactatgatgggtccatccgaaagcgacaacttctcacataacttaaggggcgtgattccccgcagttttgagtacctcttctccctcatagaccgggagaaggagaaagctggagcaggaaagtcttttttgtgtaaatgcagttttatcgagatctacaacgaacagatctacgacctccttgatagtgcctcagctggcctgtacctcagggagcacatcaagaaaggagtgttcgtggttggcgcggtagaacaggtcgttacaagtgctgcggaggcatatcaagtgctcagtggaggatggcgtaataggcgtgtggcctcaacctcaatgaacagagagtcctctagatcccacgccgtgtttaccatcaccattgagtctatggagaaatccaacgaaatcgttaacatacggacaagtctgctgaatctggtcgacctggccggatcagaacggcagaaggatactcatgctgaagggatgcgactcaaagaggcgggtaatattaataggtctctgtcatgcctgggacaggtcattacagccctggtggacgtgggtaacggtaaacaacgacatgtctgctatcgagatagcaaactcactttcttgctcagggattccctgggtggcaacgccaagactgcgatcatcgcaaatgtgcacccggggagcaggtgttttggcgagacgctgtctactctgaactttgcccagagggctaagctaataaagaataaagccgtagttaacgaggatacacaggggaatgtgtcccagttgcaagcagaagtcaagcgtctgaaggagcaactggctgagttggcctctggccaaacgccacccgagtctttcctgacccgggataagaagaaaactaactatatggagtattttcaggaagcaatgttattctttaagaaaagtgagcaggaaaaaaaaagcctgatcgaaaaggtcactcaactggaggatctgacacttaagaaggagaaattcatccagagcaataagatgattgttaagttcagagaggatcagataattcgactggagaagttgcacaaggaatcaagagggggattcctgcctgaagaacaggacagattactgtcagagctgaggaacgaaatccagacactccgagaacagatcgaacaccacccacgcgtcgccaaatatgccatggaaaatcacagcctcagggaagagaaccgcagactgcgcctcttggaacccgtcaaacgtgctcaggagatggacgctcagactatcgccaaactggagaaggcgttctccgagatcagcggcatggagaagtctgataaaaatcaacaagggttcagccctaaggctcagaaggaaccctgtcttttcgccaacactgagaagctgaaggcccagctactgcagatacagacggaactgaataacagcaagcaggaatatgaagagtttaaagagttaacgaggaagcgccagctcgaattggagagcgagctgcagtccctgcaaaaggcaaacctcaacctcgagaacttgctggaagctacaaaggcttgtaaacggcaagaggtctcccagctcaataaaattcatgccgaaactttaaagatcattaccacccccaccaaggcttaccagctgcacagtcgcccagttcccaaactcagcccggaaatgggatcttttgggtcgctgtatacccagaattcttccatcctcgataacgacatcctgaatgaaccagtccctccagaaatgaatgagcaggcgtttgaagcaatcagcgaggaactgagaacagtgcaggagcagatgagtgccctgcaggccaaattggatgaagaggagcacaagaacctcaagctgcagcaacacgtggataagcttgaacaccattctacccagatgcaggaactgttctcttcagaaagaatcgactggacgaaacaacaggaggagctactgagccaactgaacgtgttagagaagcagttgcaagagacgcagacgaaaaatgactttcttaaatctgaagttcacgaccttcgggtcgtgctgcatagcgccgataaggagctgagctccgtaaagcttgagtatagcagctttaagacaaaccaggagaaagagttcaacaagctgagcgaacgccacatgcacgtgcagctgcagcttgataacctccgactggagaatgagaaactactggagtcaaaagcgtgcctgcaggattcatacgataacctgcaggagatcatgaagttcgaaatcgaccagctctccaggaatttgcagaacttcaaaaaagaaaatgagacattgaagtccgacctaaacaatttgatggagctcctggaggcagagaaagaacgaaacaacaagctttcattgcagtttgaggaagacaaagaaaacagttcgaaggagatccttaaagttttggaggccgtgcgacaggaaaagcagaaagagactgcgaagtgtgagcaacagatggctaaggtgcagaaactcgaggaatcactgcttgctacagagaaggtgatctcaagcttggagaagtctcgagactctgataagaaggtcgttgcagacctaatgaaccagattcaggaactcaggaccagtgtttgcgagaagaccgaaaccatcgacactttgaaacaagagttgaaggacatcaattgcaagtacaattccgcattagttgaccgcgaggagagtcgcgttttgatcaagaagcaggaagtcgacatccttgatctgaaagagacactccggttgagaattctgagtgaggatatcgaaagagacatgctgtgcgaggacctcgcccacgccaccgagcaactgaacatgttgaccgaggcctccaaaaaacacagtggtttgctccagagtgcccagcgcaccgaccaggagggatcacctgacagtggcacatctgcccaagccaaacccaaagagagaggaagcagaacagaagaagaatataacttcaagatgaggcaattggagcacgtaatggactccgctgccgaggacccacagagcccgaaaaccccccctcactttcagacacatctggcgaagctgctagagacgcaagaacaggaaatcgaggacggcagagcgtctaagacatccctagagcacctggtgaccaagctcaacgaggatcgagaggtaaagaatgccgagatcctgcggatgaaagaacagctgcgctag

SEQ ID NO: 25000 - DNA, 3264 bp, synthetic construct
  source 1..3264: mol_type = other DNA; note = Synthetic coding sequence
atggaccccttcaccgagaagctgctggagcggacccgggcccggagggaaaatctccagaggaaaatggccgagcgccccactgctgccccacggagcatgacgcatgccaagcgggcacgccaacccctgtctgaggcgtctaatcagcaacccctctctggaggcgaggaaaagtcatgcaccaagcctagcccctccaagaagcggtgttctgataacaccgaagtggaggtatccaacctggagaataagcagcctgttgaatcaacaagcgctaaatcttgttcaccttcacccgtgtcaccacaagtacagccccaggcagcggacaccatctcagattctgtggccgtccctgcgagtctcctgggaatgaggcgtggtctgaactctcgcttagaagctactgccgccagctccgtcaagacccggatgcaaaaactggctgagcagcgacggcgctgggataacgatgacatgacggacgatatccctgaatccagcctatttagcccaatgccctctgaagagaaagccgcatcacctccccgcccacttttgtccaatgcatccgccacaccagttggcaggaggggccggttggccaaccttgcggccacaatttgctcttgggaggatgacgtcaaccatagctttgcaaaacagaacagtgttcaggaacagcctgggactgcttgcctctcaaagttcagttctgcatctggggcctctgcaagaattaattccagttccgtaaaacaggaggctacattctgcagtcagagggacggtgacgccagccttaacaaggccttatcatcatcagccgacgacgcatctttggtgaacgcaagtatttcctccagcgtcaaggcaacctcaccggtgaagtcgactactagcataacagacgccaagtcctgcgaggggcagaatcctgagctgctacctaaaacgccgattagccccttgaagacaggagtgtccaaacctattgtgaagtccacattgtcccaaacagtgccttccaagggtgaactgtctcgagaaatctgcttacaatctcagtccaaggacaagagcacaacaccagggggaactggcatcaagccattcctggagcgatttggtgaaaggtgccaggaacactcaaaagaatctccggcaaggagtacgcctcatcggaccccaattatcactcctaataccaaggctatccaggagagactgtttaagcaagataccagttcctcaacgacacatctggcccagcagctgaaacaagagagacagaaggaactggcttgtcttagaggacgatttgacaaggggaatatatggagtgccgagaaagggggaaacagcaagtctaagcagctcgaaacaaagcaggagacacactgccagtctaccccgttgaagaaacatcagggtgtgtcgaaaacccagagcctgccagtaaccgagaaggtgactgagaatcaaatcccagccaaaaactccagtaccgagccaaaagaagttatccgcgaaatcgagatgtctgtggacgacgatgacatcaactcatccaaagtgattaatgatttgttctcagatgtcctggaagaaggcgaactcgatatggagaagagccaggaagaaatggaccaggcgcttgccgagtcttctgaggaacaagaggatgcactgaacatctcctctatgagccttcttgctcctctggcgcagactgttggcgtcgtatccccagaaagcctcgttagtacaccaagactggagctcaaggacactagtcgttctgatgagtcacccaaacctggcaagttccagcgcaccagggtgccgagagccgagagtggcgactccctgggaagtgaagaccgcgatctattatattccatcgacgcttaccggtctcagcgatttaaggagacagaaagaccttctatcaagcaggtgatcgtccgcaaggaagacgtcacatccaaactggacgagaagaataacgcgtttccgtgccaagttaatattaagcagaagatgcaggagctgaataacgagattaatatgcagcagacagtgatttaccaggcatctcaggcgctcaattgctgtgtagacgaggagcatggcaaaggcagcctggaggaggcagaggccgagcgtctgctcctgattgctaccggcaaacgtaccttactgatcgacgagctgaataagctgaaaaatgagggcccccagagaaagaacaaggcctccccccagagtgagtttatgcccagtaaaggctcggtaacactttcggaaattcgactccctctcaaagcagactttgtttgctcaactgtgcagaaacctgacgcagcaaattactactatcttatcatcctgaaggccggggcagaaaacatggtggctacccctctcgccagtacttctaattcgcttaacggagacgcactcacgttcactaccactttcaccctgcaagacgtgagcaatgatttcgagattaacatcgaagtctacagcctggtgcaaaagaaggacccctctggcctagataagaaaaaaaagaccagtaagtccaaagccatcaccccaaagaggcttctcacctcaatcacaaccaaatccaatatacactcttcagtcatggcttcccctggcggcctgagcgcagttagaaccagcaattttgccctcgtgggatcctataccctctcactgtcatctgttggcaataccaaatttgttctggataaggtcccgttcctgtctagcctcgaaggccacatatatctaaagatcaaatgtcaagttaactccagcgtcgaggaacggggattcctaactatcttcgaagacgtgtccggtttcggggcttggcataggcgatggtgcgttctctcaggaaattgcattagttactggacataccccgatgacgagaagcgcaaaaaccccataggtagaattaatttagcgaattgtacctcccggcagatagagcctgctaacagagaattttgcgcgagaagaaacaccttcgagttgatcaccgtccgcccacagagagaggacgacagagaaacactggtttcacagtgtcgagatacactttgcgtgacgaaaaactggctgtctgcggataccaaggaagaacgggatctgtggatgcagaaactgaaccaagtgctggtggatatccgtctctggcagcccgacgcctgttataagcccatcggtaagccttag

SEQ ID NO: 25001 - DNA, 648 bp, synthetic construct
  source 1..648: mol_type = other DNA; note = Synthetic coding sequence
atggtgttccggcggttcgtggaggtgggccgggtggcctacgtgagtttcggtcctcacgctggcaaacttgttgccatcgtagatgtaatagaccagaatagagctctggttgacgggccctgtacgcaggtgcgcagacaggccatgccgtttaagtgcatgcaactaactgactttatcctgaaattcccacattccgcacatcagaaatatgtgcgccaggcctggcagaaagctgatatcaataccaagtgggcggctacccgttgggcaaaaaagattgaagcccgggagagaaaagccaagatgaccgatttcgatcggttcaaagttatgaaggctaagaagatgcgaaataggatcatcaagaatgaggtgaagaagttacagaaagcagccctccttaaggcaagcccaaaaaaggcccccggcactaaaggtactgccgccgctgcggccgctgctgctgcagctaaggtgccagcaaaaaagatcactgccgcatccaaaaaagctcctgctcagaaggtccccgcccaaaaggctacaggccagaaagctgccccagcacccaaagctcagaaaggccaaaaggctccggcccagaaggcccccgccccaaaagcgagcggtaagaaggcatag

SEQ ID NO: 25002 - DNA, 2976 bp, synthetic construct
  source 1..2976: mol_type = other DNA; note = Synthetic coding sequence
atggaggagtacgagaagttctgcgagaagagcctggcccggatccaagaagccagcctgagtacagagtcctttttgccagcccagagcgagtccatttctctgatcaggtttcacggcgttgctatcctctcaccactgctgaatatagaaaaacgcaaggagatgcagcaagagaaacagaaagcactggacgtcgaggcccgaaaacaggtgaataggaaaaaagcactcttaacccgggtccaggagatcttagacaacgttcaggttaggaaggctccaaacgcctcagattttgatcagtgggagatggagaccgtgtacagtaacagtgaggtgaggaacctcaatgtgcccgccacttttccaaactcctttccctctcacacagagcactctacagcagcaaaactggacaagatcgcggggatcctgccgctcgataacgaggaccagtgtaagaccgatgggatcgacctggccagagacagcgaaggtttcaattccccaaagcagtgcgattcatccaacattagccatgttgagaacgaggcgttcccgaagacaagctccgccacaccacaggagaccctcataagtgacggacctttttcagtcaatgaacagcaagacctgccactactcgctgaagttatccccgatccctatgtgatgagcctgcaaaatttgatgaaaaagagcaaggaatacatcgaacgcgaacagtctaggcgatctctgcggggcagtattaacagaattgtgaacgagagccatctggataaagaacacgacgctgtggaggtcgctgattgtgtgaaagaaaaggggcagctgaccggcaagcactgcgtgtccgtgatccctgacaaaccatcactgaacaaatctaacgtgctgctccaaggagccagtacccaggcttcctccatgagcatgcccgtgctggccagctttagcaaggtggatattcccatcaggacaggacatcctaccgtcctcgagagcaactccgactttaaggtaatcccaacatttgtgaccgaaaataatgtcattaagtcactgactggtagttacgcaaaactaccttctcccgagccaagtatgtctccaaagatgcatagacggagatctcgaacgtcctccgcctgccacatcctgataaacaaccccataaacgcctgcgaactgtctccaaaggggaaagaacaggctatggatcttatcatccaggacactgacgaaaacactaacgtaccggaaattatgcccaaactgcctacagacttagccggtgtctgctcgtcaaaagtctacgtagggaagaacacttcagaggtaaaagaggatgtggttctggggaaatctaaccaggtgtgccaatcatcgggcaatcacttagaaaataaggtgacacatggtcttgtgaccgtcgaagggcaattgacctctgatgagcggggagcccacattatgaattcaacctgcgctgccatgccaaagttgcatgaaccttatgctagttcacaatgtatagccagtcccaattttggcaccgttagcggcctgaaacccgcctctatgctagagaaaaattgtagcctgcagaccgaactgaataagtcctatgatgtgaagaacccaagtcccctgttaatgcagaatcagaataccaggcaacagatggatacaccaatggtctcctgtggaaatgagcagttcctcgacaatagcttcgagaaggtaaagaggcgccttgatctggatatagacgggcttcagaaagaaaattgcccttatgtgataacatccggcattactgaacaggagaggcaacatttacccgagaagcgctaccctaaaggatcgggattcgtcaacaagaataaaatgttggggacaagctctaaggagtccgaggaattgctgaaaagcaaaatgttggcattcgaggagatgcgaaaacggctggaagagcagcacgcccagcagctctcactgctgatagccgagcaggaacgggagcaggagaggctgcaaaaggagatagaggaacaggagaagatgctgaaggagaaaaaggccatgactgcggaggcttccgagctcgatattaacaacgccgtcgagttagaatggaggaaaatcagcgatagcagtctcttggaaacaatgcttagccaggctgattctttacacaccagcaattctaatagttccggctttacaaactccgcgatgcagtactcattcgtgagcgcaaacgaggcgcctttctacttgtggggaagctccacgagcgggctgaccaagctatctgtgactaggccgtttggcagggctaagaccaggtggtcgcaggtcttttcgctggaaattcaggctaagttcaacaagattaccgcggttgcaaaagggtttctgactcggcgactcatgcaaaccgacaagctcaaacagttgcgccagacagttaaggatactatggagtttataaggagttttcagagcgaagcaccgctgaagcggggcatcgtttcagcccaggacgcctcgcttcaggaacgggtcctggctcagctgcgagcagccctgtacgggattcatgacatcttcttcgttatggacgccgcagagcggatgagcatccttcaccacgatcgcgaagtgcgcaaagagaagatgttgcgtcagatggacaagatgaagtcaccgagggttgctttgagcgctgccacacaaaagagccttgacaggaagaagtacatgaaggctgccgaaatggggatgcctaataagaaattcttagtaaaacagaacccaagtgaaacgagggtgctccagcctaatcagggtcagaacgccccagtgcaccgcctcctgagtcggcagggatctatttgccgcaagaatccaaagaaggctgccaaatgctgtgacaacctacgacgccagcatagcttaggatag

SEQ ID NO: 25003 - DNA, 2976 bp, synthetic construct
  source 1..2976: mol_type = other DNA; note = Synthetic coding sequence
atggaggagtacgagaagttctgcgagaagagcctggcccggatccaggaagctagcctcagcactgagtcattcttgcctgcgcagtccgaaagtataagcttgatccgctttcacggcgtggctattctatcaccgttgctgaacatagagaagcggaaggaaatgcaacaggaaaagcagaaggccctcgacgtcgaggctcgtaaacaggtgaataggaagaaggccttgctaacaagagttcaggagattcttgataatgttcaggtgagaaaagcaccgaacgccagcgattttgatcagtgggaaatggagacggtgtattccaacagtgaggtgcggaacctgaatgtacccgcgacttttcctaactctttccctagtcatacagagcacagcaccgcagcaaaactggacaagattgcaggtatcttgcctctggataacgaagaccaatgtaaaaccgatggcattgatcttgcacgcgatagtgaggggttcaactcccccaaacaatgcgacagctccaacattagtcacgtggaaaatgaggcattccctaaaacctcatctgcaactccccaggagacactaatctcggacgggcctttttctgtcaacgagcaacaggatctgcctctcctggccgaggtcatccctgatccgtacgtgatgtctcttcagaacctgatgaaaaaatctaaggagtacattgagagagagcaatccaggaggagccttagaggttccatcaaccgcatcgttaacgagtcacatctggacaaagagcacgatgcagtcgaggtggcagattgtgttaaagaaaagggccagcttacaggaaaacattgcgttagcgtcatcccggacaagcctagtttaaacaaatcaaacgttcttctgcagggggcttcaacacaagccagctctatgtctatgcctgttttggcaagtttctccaaggtggacatacccattcgcacaggccatcccaccgtgttggagtccaattccgattttaaagttattcctacttttgtcaccgaaaacaatgtcatcaaaagcttaaccggaagctacgcaaaactcccatcccctgagccctccatgtcacccaagatgcacagaagacgcagtaggacgagcagcgcttgccacattttaatcaacaatcctattaacgcctgcgaactctcccctaaaggtaaagagcaggctatggacttgatcatccaagatacagatgagaatacaaatgtgcccgaaataatgcccaagcttccgactgacctagccggtgtgtgttcatccaaggtgtatgtgggcaagaacacctccgaggtcaaggaggacgtcgtgctgggtaagtccaaccaggtctgccagtcgagcggcaaccacctggaaaataaggtaacccacggcttggtgacagttgaaggacaactgacatccgacgagcggggggcccacatcatgaatagtacttgtgcagccatgccaaagttgcatgaaccctatgcatcttctcagtgtatcgcgagccccaatttcggaacagtgtccggattgaagcccgcctccatgctcgagaagaattgtagtctccagaccgaactaaataaaagctacgatgtcaagaacccgtctccattgctcatgcagaatcagaacactaggcagcagatggacacgcctatggtgtcctgcggtaatgaacagtttcttgataactccttcgaaaaggtcaaaagacgtctcgatctggacatagacggactccaaaaagagaattgcccatatgttatcacaagcggcataactgagcaggaacggcaacatctgccggaaaagcgatacccaaaaggaagcggctttgttaataagaacaagatgctcggtaccagttcaaaggaaagtgaggagctcctgaagtccaagatgcttgccttcgaggaaatgcgtaagcggttggaagagcagcatgcacagcagttaagcctactcatcgccgagcaggaacgcgagcaggagcgcctccaaaaagagatcgaggaacaagaaaaaatgctgaaggagaagaaagccatgaccgccgaggcgagtgaactcgacattaataatgccgtagagctggaatggagaaagatttccgactcatcgttgctcgagacaatgctctcccaggctgattcccttcatactagtaacagcaattctagcggatttactaatagcgcaatgcagtacagcttcgtgtcagccaatgaggcacccttttatttgtgggggtcctccactagtggcctgaccaagctcagcgtaacacggcctttcggtcgagccaaaacaaggtggtctcaggttttttccctggaaatccaggctaagtttaacaaaattaccgcagtcgcgaaaggctttttgacaagaagactgatgcagaccgataagcttaaacaacttagacagactgtcaaggacacaatggagtttatccgatcattccagtccgaggcccctctgaaacggggaattgtatctgctcaggatgcgtctctgcaggagagagtgctggctcagctgcgggctgcattgtatggaatccatgacatcttcttcgttatggacgccgctgagaggatgagcatactgcatcatgatagggaagttaggaaagaaaaaatgctccgccagatggacaagatgaaatcccctcgcgtggctctgtctgccgctacccagaaaagcctggatcgaaagaagtatatgaaagccgcggaaatgggcatgcccaacaagaaattcttagtcaaacagaaccctagtgaaacacgggtactgcagcctaaccagggccagaatgctcctgttcatagactgttatcacggcaagggtccatctgcagaaagaatccgaaaaaagctgcaaaatgctgtgacaatcttcgtcgccaacactccctgggatag

SEQ ID NO: 25004 - DNA, 999 bp, synthetic construct
  source 1..999: mol_type = other DNA; note = Synthetic coding sequence
atggccaccatcaagagcgagctgatcaagaacttcgccgaggaggaggctatccaccacaataaaatcagcattgtcggcacaggctccgtgggagtcgcatgcgcgatcagtatattgctgaaagggctgtctgatgagctggtactggtggacgtggacgaaggcaagctgaaaggagagacaatggacctccaacatggtagtccttttatgaaaatgcctaacattgtctcttctaaggattaccttgtcaccgcaaacagcaacctcgtcattatcacagccggcgcaaggcagaaaaagggcgaaacgcgactagacctggtgcagcgcaatgtgtcgatcttcaagctcatgattccaaacattactcagtactcaccccattgtaagttattgatcgtgacaaacccagtcgacatcctcacctacgtagcatggaaacttagtggctttcctaaaaacagagtgattggatctgggtgtaacttggacagtgccagattcaggtacttcattggacaacggttgggaatccattctgaatcctgtcacgggcttatcctcggggagcacggggatagtagcgtaccggtgtggtctggcgtcaacatagctggcgttccactgaaagaccttaatcccgacattggcaccgacaaagatcctgagcaatgggagaatgtacataagaaagtcatttcgtccggctacgaaatggtgaagatgaagggatatacatcatggggcatcagcttgtccgtagctgaccttaccgagtctatcctgaaaaacttacggcgggtgcaccctgtgtctacactgagtaaaggcctgtacggcattaatgaagatatctttctgagcgtcccttgtattcttggagaaaatggcatcacagatctaataaaggttaaactgactctcgaggaagaagcatgtctccaaaaatccgcagagacactgtgggaaattcaaaaggagctgaagctgtag

SEQ ID NO: 25005 - DNA, 888 bp, synthetic construct
  source 1..888: mol_type = other DNA; note = Synthetic coding sequence
atgatggccaagaagccccccaagcccgccccccggcggatcttccaggagcggctgaagattactgccctcccattgtactttgaggggttcctgctcattaagcgctcaggctacagggaatatgaacactattggacagagcttcgaggtactacactcttcttctataccgacaaaaagagtattatatacgtagacaaattagacatcgtggacctcacttgtctgaccgaacaaaattccacggaaaagaactgtgctaagtttaccctggtactgcctaaagaagaagtgcagctcaagaccgagaatacagaatccggcgaggaatggcgaggcttcatcctaactgttacagagctgagcgtgcctcagaacgtgtccctgttaccgggccaggtgatcaagctgcatgaggtcctggaaagagagaaaaaacgacgaatagaaaccgagcaaagtacctctgtcgaaaaggaaaaagagcccaccgaggactacgttgacgtcctaaacccgatgcctgcatgtttctataccgtgtctcgtaaagaagctacagaaatgttgcagaaaaatccttccctgggcaatatgatcttgaggcccggatccgacagtcgcaattatagtattaccatccggcaggaaatagacattcctaggattaaacactataaggtaatgtccgtgggccagaactatactattgagctcgagaagcccgtgacgctgccaaacctgttcagtgtgatcgactacttcgtgaaggaaactcggggcaacctgaggcccttcatctgctcaacggatgaaaatactgggcaggagccgtccatggagggacgctccgaaaagttaaagaaaaatccccatatagcgtag

SEQ ID NO: 25006 - DNA, 1368 bp, synthetic construct
  source 1..1368: mol_type = other DNA; note = Synthetic coding sequence
atggagggcgtgctgtacaagtggaccaactacctgagcggctggcagcctaggtggttcctactctgtggcggaattctgtcctactatgacagccctgaggatgcttggaaggggtgcaaaggtagtattcaaatggccgtgtgtgaaatccaggtgcacagtgtggacaacacccgcatggatctgattattcccggagaacagtatttctatctgaaggctcggagcgtcgccgaaaggcagcgttggttagttgcgttaggaagcgcaaaggcatgccttacagatagccgaacccaaaaggagaaggagtttgctgaaaacaccgaaaacttgaagactaagatgagtgagttgcgtctctattgcgacctgttggtgcagcaagtagacaagactaaagaagtgactactacaggcgtgtcgaactcagaagagggcattgatgtcggcacgctcctgaagtccacctgtaacacctttctcaagactctggaagaatgtatgcaaattgctaacgccgcattcacatccgagctcctgtataggactcctcctggatctccgcagttggccatgctgaaatcatcaaaaatgaagcacccaatcatccccatccataactctctcgagcgtcagatggagctgagtacctgcgaaaacggtagccttaatatggaaatcaatggtgaggaggagatcctcatgaaaaacaagaacagtttgtatctgaaatcagccgagatcgactgcagcataagcagcgaggagaataccgacgataacataaccgtgcagggcgaaattcgcaaggaggatgggatggagaacctcaagaaccacgataacaatctaacccagtccggatccgattcttcttgttctcctgagtgcctgtgggaagaagggaaggaggtgatccctactttcttcagcacgatgaacacttctttctcagacatcgaacttctcgaagactccggcatacctacagaggcttttctggcctcttgttacgccgtggtccccgtactggataaattaggtccaacagtgttcgcaccagtgaagatggatctcgtgggcaacattaagaaagtcaatcaaaaatatataaccaataaggaagagttcactacgctccagaaaatagtgctgcacgaggtagaggcagacgtcgcccaggtgcgaaattcggcaactgaagcattgctgtggttgaaacgcggactaaagtttctcaagggtttcctgacagaagttaagaacggcgagaaggacatccagactgcccttaacaacgcctacggtaaaactttacgccagcaccacggttgggtggtccgcggcgtgttcgccgtttag

SEQ ID NO: 25007 - DNA, 1320 bp, synthetic construct
  source 1..1320: mol_type = other DNA; note = Synthetic coding sequence
atggagggcgtgctgtacaagtggaccaactacctgagcggctggcagccccgctggtttctactgtgcggaggaattctgagctactacgactctccagaagatgcctggaaaggctgcaaagggtccatccaaatggctgtttgtgaaatccaggtgcacagtgtggacaatactcgcatggacctgatcatccctggagagcaatatttttacctgaaggctcggagtgtggctgaacgccaaagatggcttgtcgccctgggtagcgccaaggcatgtctcaccgattccaggacccagaaagaaaaggagttcgctgaaaatacagagaacctgaaaactaagatgtctgaacttaggctatactgtgatcttctggtgcagcaggtcgataagacaaaagaggttaccacaaccggggtgtccaactcagaggaaggcattgatgtgggaactttgctaaagagcacatgtaacacatttctgaaaacgttagaagagtgtatgcagattgccaacgctgctttcacatcggaacttctctaccgtacgcctcctgggtcacctcaactcgctatgttgaaaagcagtaagatgaaacaccccattatccccatccataatagcctcgaacgccagatggaattatcaacgtgcgagaatgggtctctgaatatggaaataaacggcgaagaggagatactaatgaagaataagaacagcttgtatctgaagtctgccgagattgattgtagtatatcaagcgaggagaacaccgacgacaacatcactgtgcagggtgagattagaaaggaagatggtatggaaaatctcaagaaccatgataataatctcacccagtccggaagtgactcttcttgtagccctgaatgcttgtgggaagaagggaaagaagttatcccgacatttttttccactatgaatacaagtttttccgacattgagctcctggaggacagtggtatacccactgaggccttcctggcatcttgctacgccgtagttccggtgctcgataaactggggcccactgtctttgcccctgtcaaaatggatctagtcggaaacattaagaaggttaatcaaaaatatatcaccaataaagaagagtttactactctgcagaagattgtgctgcacgaagtcgaggccgatgttgcccaggtgcggaacagtgccaccgaggcactgctttggttgaaacgaggcctcaagttcctcaaggggtttctcaccgaagttaagaatggggagaaggatatacagacagctctatcggtcggcatgtgggtgtag

SEQ ID NO: 25008 - DNA, 984 bp, synthetic construct
  source 1..984: mol_type = other DNA; note = Synthetic coding sequence
atgtgcagcaccagcggctgcgacctggaggagatccccctggacgacgacgacctgaacaccatcgaattcaagatactggcttactacacgcgtcatcacgtgtttaagagtacaccagcactcttctctcccaaactgctgagaactaggtccctttcccagcgtggcttgggcaattgctccgccaacgaatcctggaccgaggtgtcatggccttgcagaaacagtcagtcctcagaaaaggctatcaacttgggaaagaagaaaagcagctggaaagcattcttcggcgtagttgagaaggaagattctcagagcacaccagcgaaagtctctgcgcaggggcagcgcacactggagtaccaggactctcactcccagcagtggagcaggtgtctctccaatgtggaacagtgcctggagcatgaagctgtcgatccaaaggtgatcagcatcgctaacagagttgccgagatcgtttacagttggcccccaccacaggccacccaggccggaggcttcaagagtaaggagatcttcgtcactgaagggctgtccttccaacttcaaggccatgtccccgtggccagttcatctaagaaggatgaagaagagcagatcttggccaagatcgtcgaactactgaagtactccggggaccaactggaaagaaagctgaagaaggataaagccctgatggggcacttccaggatggcctctcttattctgtgttcaaaacaatcactgatcaggtcctgatgggtgtcgatccaaggggcgagagcgaagttaaagcgcagggtttcaaggctgctcttgtgatcgatgtgaccgccaaactcacagccattgacaaccaccctatgaatcgggtgctcggctttggcaccaagtatcttaaagagaatttttccccatggatccagcaacacggcgggtgggagaagatcctcgggatctcacatgaagaggttgactag

SEQ ID NO: 25009 - DNA, 5229 bp, synthetic construct
  source 1..5229: mol_type = other DNA; note = Synthetic coding sequence
atgatggagggcaacggcaccgagaacagctgcagccggacccggggctggctacagcaggacaacgacgcaaagccttggctgtggaaattctcaaactgctttagccggcccgagcagacacttccccattctcctcagactaaggaatatatggaaaataaaaaggtggctgtggagctcaaagatgtcccgagccccttacatgcgggcagcaagctgttcccagcagtccccctcccagacatccgttccctccagcagcctaaaatacagctgtctagcgtgcctaaggtgagttgttgcgcccactgtcctaacgagccctcgacaagccctatgcgctttggaggagggggtggagggtctggggggacatcaagcctgatccaccccggcgcactactcgattctcagagtaccaggacgatcacctgccaggtcgggagtggatttgcgtttcagagtgcaagcagcctgcagaatgcgtctgctagaaacaacctggctgggattgcctctgactttccctccatgtgcctcgagtctaaccttagttcctgtaaacatctgccttgctgtggcaagctgcatttccaaagttgtcatgggaatgttcataaattgcaccaatttcccagcctccaagggtgtacttcagccggttacttcccgtgttccgatttcaccagcggcgctcctggccatcttgaagagcatatctctcagtccgagctgactcctcatctttgcactaacagcctgcatttgaatgtggtgcctcctgtgtgcttgaaaggttctctctattgcgaggattgcctgaacaagccagccagaaactccatcatagatgcagccaaggtctggccaaacataccccccccaaacacccagccagctccattggccgtcccactgtgtaatggttgcggcaccaagggtaccggaaaagagactaccctgttgcttgccacctccctcggcaaggctgcttcgaagttcggaagtcctgaggtcgcagtggccgggcaagtactcgagaatctgcccccaatcggcgtgttctgggacatagagaactgtagcgtccctagtggcaggagcgccacagctgtggttcagcggatcagagaaaagtttttcaaagggcatcgagaggccgagttcatctgcgtctgtgatatatctaaggagaacaaggaggtcatccaggaactgaacaattgtcaggtaactgtagcgcacattaacgcaactgctaagaatgcagccgatgacaagctccggcagtcactgcggaggttcgctaatacacacaccgcgcctgccactgttgttctcgtgagtactgatgttaactttgccctggagctcagcgacctaagacacaggcatggcttccatatcatcctcgtgcataaaaatcaggctagcgaggctcttctgcatcacgctaatgaattaattcgctttgaggagttcatttctgacctgcctcccagactgccattgaagatgccacagtgccacacccttctgtacgtttataatttacctgccaataaagacggaaagtccgtgtccaacagactgagacgcctatcagataactgtgggggcaaggtcctgtccatcacggggtgtagtgccatcttacggtttattaatcaggattccgctgaaagagcccagaaacgcatggaaaatgaggacgtgttcggcaaccgcattatagtcagcttcacccctaaaaaccgcgaactgtgtgaaacgaagtctagcaacgctatagcagacaaagtaaagagccccaagaaacttaaaaatcctaaactgtgtttgatcaaagacgcctctgaacagagctcctccgccaaggccactcccggaaaggggtctcaggccaactccgggtctgcgaccaagaataccaacgtaaaatctctgcaggagttgtgcagaatggaaagtaagaccgggcaccggaactcagaacatcaacagggtcatttacgtctggtagtgccaactcatggaaattctagtgctgctgttagtacaccgaaaaactcaggagtagccgagccggtctataagacctcacaaaagaaggagaatctttcagcacgcagtgtaactagctctccagtggagaagaaagacaaagaagagacagtcttccaggtctcgtatccaagtgccttctccaagctagtggcctcccgacaagtcagcccgttactggcctcacagagctggagtagtcgttccatgagccctaacctcttaaatcgcgccagtccccttgcctttaatatcgctaattccagttccgaggccgactgtcctgatcctttcgctaatggagcggacgttcaggtcagcaacattgactatcgtctttccaggaaagagcttcagcagctcctgcaggaggccttcgcccggcatgggaaggtcaagtccgtcgaactgtcccctcacaccgactaccaactgaaggctgtggtacagatggagaacttacaggacgccattggggccgttaactctttacaccgttacaagatcggtagcaaaaagatactagttagtctcgccaccggagccgcctcaaagagcttaagcttactctcggcagagactatgtctgtactgcaggacgctccggcctgctgtctgccactgtttaagttcacggatatttacgagaagaagtttggtcataaattgaatgtcagtgacctgtacaagctgactgacaccgtcgcaatcagggaacaaggaaacgggcgtctggtgtgcctcctgccaagctctcaggcccggcagtctccactgggatcctcgcaatcccacgatgggtcatccacaaactgttccccaattatttttgaggaactggaataccatgagccagtgtgccgacagcactgttccaacaaagatttctccgagcatgagttcgatcccgattcctataaaatccctttcgtaatcctgagcctcaaaactttcgcaccacaggtgcactcattattgcagacccacgagggcacagtgccactgcttagctttcccgactgctacattgctgaattcggggacctcgaagttgtccaggagaaccagggcggcgtgccactggagcatttcatcacatgcgtaccaggggtcaacatagcgacagctcagaacggcatcaaggtcgtgaagtggatacacaacaaaccaccacctccaaataccgacccctggctgctccggagcaaatccccagtgggcaatccccagctcatccagtttagccgggaggtaatagacttactgaagtcacagcccagctgtgtgattcccatttctcacttcatcccaagctaccaccatcatttcgctaaacagtgtcgagtttcagattacggctactcaaagttaatagagctgctggaagcagtgccacacgtcctccagatcctggggatgggctctaagaggctgttgacactgacgcatcgggctcaggtcaagcggttcactcaggatctattaaaactcttgaaatcgcaggccagcaagcaggtgattgtccgggaattttcacaggcctatcattggtgtttttctaaggactgggatgtcaccgagtacggggtttgtgaattgattgatatagtgagtgagatcccagatacaactatctgcttgagtcagcaagataacgaaatggtgatctgcatcccaaagcgtgaacggacacaagacgagattgagaggacaaaacagtttagcaaggatgttgtggaccttctccgccaccaacctcattttaggatgccttttaacaaatttatcccttcataccaccaccatttcgggcgccagtgcaagctggcctattatggcttcacgaaattgttggagctgttcgaagcaatcccggacactttgcaggtgctcgaatgtggggaggagaaaatcctgacccttacggaggtagagagatttaaggctctggccgctcagttcgtgaagctgctcaggtcacaaaaagataactgcctgatgatgacggacctgctaaccgagtatgccaagacttttggttacacttttcgtctacaagattatgacgtgagcagcatctccgccctcacccagaagctttgtcacgttgttaaggtggccgacattgagtcgggtcgacagattcaacttatcaatcggaaaagtctgcgctcgctgaccgcacagcttctggtgctgcttatgagctgggaggggacgactcacctgtccgtggaagagttgaagaggcactacgagtctacccacaacacccccctgaacccttgtgagtacggcttcatgaccctgaccgaactgttgaaaagcctgccgtatctcgtggaggtgttcaccaacgacaagatggaagagtgtgtcaaactgacttcactgtatctgtttgctaagaacgtgcggtctctcttgcatacttatcactaccaacaaatattcctccatgagttctccatggcgtacacgaaatacgtgggtgaaacactgcagccgaagacctacggccactcaagcgtggaagagctcttaggcgccatcccacaggtggtctggattaagggtcacgggcacaaacgtatcgtggttctaaaaaatgacatgaaatccaggctttcttcactcagcctctctcctgctaaccatgaaaaccagccatccgagggtgaacggattttggaagtgccagaatcacacactgccagcgagctgaagctcggggcggacgggagcgggccttctcacactgaacaggagctgctgcggctcacagacgatagtccggtagacctgttgtgcgccccagtaccatcttgcctgcccagcccccagctgcgtcccgatcctgtcatcctacagtctgcagatcttatccaattcgaggaaagacctcaagaaccctccgagatcatgattctgaatcaggaggagaagatggagattccaatccctggtaaatctaagactctgacctccgatagtagctcatcatgcatctccgctgctgtgccagtacccccctgcccgagttccgagacctcagagtcccttctcagtaaagacccggtggagtcccctgctaaaaagcagcctaaaaacagggttaaattggccgccaacttttcattagcccccatcacaaaactgtag

SEQ ID NO: 25010 - DNA, 831 bp, synthetic construct
  source 1..831: mol_type = other DNA; note = Synthetic coding sequence
atgtgcagcaccagcggctgcgacctggaggagatccccctggacgatgatgacctgaacacaatcgagttcaagatccttgcctactatactcgccaccatgtgtttaaaagtacgcccgcgctcttcagtcccaagctgctgaggactcgaagtctgtctcagagaggcctgggaaactgtagcgcgaatgaatcctggacagaagtgtcttggccttgccgcaattcacagagctcggaaaaagctataaatttgggcaaaaaaaaatccagttggaaggcgttcttcggtgtggtcgagaaggaggatagccagtctacccctgccaaagtatctgcccagggtcagcgtaccctagagtaccaagattcccattcacaacagtggtcccgctgtctgtcgaacgttgaacagtgcctggaacatgaagcagtggatccgaaagttatctcgattgccaaccgcgtcgccgaaatagtgtactcttggcccccgccgcaagccactcaggctggcgggtttaaaagtaaagagatttttgtgactgaagggcttagtttccagctgcaagggcatgtcccagtcgcttccagttccaaaaaggatgaggaagaacaaatccttgctaaaatcgttgaactattgaagtatagtggagatcagctagaacgcaaggaaaaggagtgggaggagagcgccaagaccaagatcaaaatggccttgctgtggagatcttctgggggggggcctcgggtgctgagtattcccgaggcctttatgaagaattccttcacactgacaccaccaggattttcggaacacaactag

SEQ ID NO: 25011 - DNA, 552 bp, synthetic construct
  source 1..552: mol_type = other DNA; note = Synthetic coding sequence
atggccagcaacaagaccaccctgcagaagatgggcaagaagcagaacggcaaaagcaagaaggtggaagaagccgaacccgaagaatttgtggtagagaaggtgcttgaccggcgggtggtgaatggaaaagtagaatacttcttgaaatggaaagggttcaccgatgccgataacacttgggaacccgaagagaacctggactgtccagaactgatcgaagcatttctcaattcgcagaaggccggtaaagaaaaggacggtacaaagcgtaagagtctgtctgactcagaatctgacgattctaaaagtaagaagaaaagggacgccgctgataagcctcgcggatttgctagaggcttagatccagagagaatcattggggcaactgacagctcaggagagctcatgtttctgatgaagtggaaggatagcgatgaggctgatctcgtgctagccaaagaggccaacatgaagtgccctcagatcgtcatcgccttttatgaggagcggttgacttggcactcatgccctgaagatgaggcccagtag

SEQ ID NO: 25012 - DNA, 960 bp, synthetic construct
  source 1..960: mol_type = other DNA; note = Synthetic coding sequence
atgctgcggtgcggccagatgatcttcgcccaggccctggtgtgccgccacctcggccgcgactggagatggacacagcgtaagaggcaaccagatagctactttagcgtgctgaacgcattcatcgatcgaaaagactcatattatagcatccatcagatcgcacaaatgggagtgggggaagggaaaagcattggtcagtggtatggcccaaacacagtagcacaggtacttaaaaaacttgcggtgttcgatacttggtcttctctagccgtgcacatagccatggataacaccgtcgttatggaggaaataagaagactgtgcagaacaagtgtgccatgcgcaggggcgaccgctttccccgccgactcagatcgccattgtaacgggtttccagctggggcagaggtgaccaatagaccttctccctggaggcctctggtgctgctcatacctctgcgccttgggctgacagatattaacgaggcctacgtggaaactctcaagcactgctttatgatgccccagtctctgggtgtgattggaggtaagcccaactccgcccactatttcattgggtacgtcggcgaagaactgatttatctggacccacataccacccagccggcagtagagccaactgatgggtgtttcatccctgacgaaagctttcactgtcagcaccctccctgccgaatgagtattgccgagctggatcccagcatcgctgtgggctttttctgcaaaaccgaagatgacttcaatgattggtgtcagcaggtaaagaagttatcccttctgggaggagctctgccaatgtttgaactcgtagagttacaaccatctcacctcgcttgtccagacgtactgaacttgagcctggactccagcgatgtggagaggctcgagcgctttttcgatagcgaggatgaggactttgagatcctatccttgtag

SEQ ID NO: 25013 - DNA, 564 bp, synthetic construct
  source 1..564: mol_type = other DNA; note = Synthetic coding sequence
atgaacggccgggccgacttccgggagcccaacgccgaggtgccccgcccaattccccatatcggcccagactatatcccgacagaagaggaacgccgcgtattcgcggagtgtaacgacgagtccttctggtttcgctcagtgcctctggccgccacaagcatgcttatcacccaggggcttattagtaagggaattctttcctcacaccctaaatatggatcgattccaaagctgatcttggcctgtatcatgggttatttcgctggtaaactgtcatatgtaaagacttgtcaggaaaaatttaagaaactggaaaacagccctctaggtgaggccttgcgcagcggccaggcaagacgtagttcaccgcccggacactactatcagaaatccaaatacgactcttccgtctcaggacaatcaagtttcgtgacatcaccagccgcagacaatatcgaaatgctgccgcactatgaacctatccctttctcaagctccatgaacgaatcagctccgaccggtattaccgaccacatcgtgcaagggcgcaacttcagttag

SEQ ID NO: 25014 - DNA, 270 bp, synthetic construct
  source 1..270: mol_type = other DNA; note = Synthetic coding sequence
atgagcgagcagggcgacctgaaccaggccatcgccgaggagggcggtactgaacaagagactgccacacccgaaaacggaatcgttaaatctgaatccctcgacgaagaagaaaagttagaactccagagacggctggaagcacagaaccaagagcgcagaaagagcaagtccggcgccggcaaaggcaagctgaccaggagccttgccgtctgtgaagaaagcagcgccaggccaggcggtgaaagcctgcaggatcagacactttag

SEQ ID NO: 25015 - DNA, 270 bp, synthetic construct
  source 1..270: mol_type = other DNA; note = Synthetic coding sequence
atgagcgagcagggcgacctgaaccaggccatcgccgaggagggcggtacagagcaggagactgctaccccagagaacggaatcgttaagtctgaatcactggacgaggaagagaagctggagctccagaggcgactcgaggcccagaatcaggaaagacgtaaatcaaaaagcggagccggcaaaggcaagttgacccggtccctggcagtctgcgaggaaagttctgcaaggcctggaggggagagcctccaagaccaaaccttatag

SEQ ID NO: 25016 - DNA, 1473 bp, synthetic construct
  source 1..1473: mol_type = other DNA; note = Synthetic coding sequence
atggaggacagcgccagcgccagcctgagcagcgccgccgccaccggtactagtacgagtacaccagcggctccaacagcccgcaagcaactcgataaggaacaggtccgcaaagcggttgacgccctcctgacccactgtaagtctcggaagaataactatggtctgttgctcaatgagaatgagtcactcttcctgatggtggtattgtggaagattcctagtaaagagttgcgcgtgaggctcacattgcctcacagtattaggagtgatagcgaggatatatgcctgttcactaaggacgaacccaattccactcctgagaaaacagagcagttctaccgcaagctgctgaacaaacatgggattaagacagtttctcaaatcatttcgctccagactttaaagaaggaatataaaagttacgaggcaaagttgcgcctgctgtcaagtttcgatttctttctgactgatgccaggatcagacggttgttgccctctttgatcggccggcacttctatcagaggaaaaaggtcccggtgtcggttaacctgctcagcaagaaccttagccgcgaaatcaatgactgcattggcggaacggtgctgaatatcagcaagagcgggtcttgcagtgctatcaggataggacatgttggaatgcagattgagcacataatagaaaacattgtggctgtgactaaggggctatctgagaaactaccagagaagtgggagtcagtgaagctgttatttgtcaagaccgagaaatcagctgcccttcctatattctcatccttcgtgtccaattgggatgaagccacaaagcggtccctcttgaataagaagaagaaggaggcccgtaggaagagaagagaacgaaattttgaaaaacaaaaagaacgaaaaaaaaaacgacagcaggccagaaagacggcgagtgtgttatctaaagatgacgtggctcctgagtctggggacactacagtgaaaaagcccgaatctaagaaagagcagactcccgaacacggaaaaaagaagcgcggccgcggcaaagcacaggtgaaggcgacaaacgaatccgaggacgagataccacagctggttcccattggcaagaagacccccgcgaatgagaaagtcgagatccagaagcatgctacaggcaagaaatctcccgccaagagtcctaaccctagtacccccagggggaagaagcgaaaggcacttcccgcttccgagacacccaaggctgcagagagcgagacgccaggaaagagccctgaaaagaagcctaagatcaaggaagaagctgtgaaagagaagtcaccctctcttggtaaaaaggacgctcggcaaaccccaaaaaaacccgaagctaaattctttactacgccttcaaagtccgtgcgcaaggcctcccatacccccaaaaagtggccgaagaagcctaaggttccccagagcacttag

SEQ ID NO: 25017 - DNA, 495 bp, synthetic construct
  source 1..495: mol_type = other DNA; note = Synthetic coding sequence
atggccgagcccgccagcgtggccgccgagagcctggccggcagcagagcccgcgccgctagaacagtgttgggtcaggtggttctgccaggagaagagttattactgccagagcaggaggacgctgaaggtccaggtggcgccgtggaaaggcctctcagccttaatgctagagcgtgctctagagtgcgggttgtgtgtggacctgggctgcgccggtgtggagatagactgctggtgacaaaatgcggcagactgcggcacaaagagcctggtagcgggagtgggggcggtgtttactgggtcgactcccaacaaaagagatatgtgcctgtaaaaggcgatcatgtgattgggatcgtgacagctaaatccggagatattttcaaggtagatgtgggcgggagtgagccagcctctctttcctatctgtctttcgagggagcaacgaagcgaaatcggcccaatgtccaggcgatatcttcacgactttag

SEQ ID NO: 25018 - DNA, 2508 bp, synthetic construct
  source 1..2508: mol_type = other DNA; note = Synthetic coding sequence
atgacctgcaacaagcacggctgccggcaggccttccacgtgacctgcgcgcagtttgccgggctgttatgtgaagaagagggtaatggggcagataacgtgcaatactgtggctattgcaagtatcatttttccaagctcaagaagtccaaacgaggtagcaatcgcagttatgaccaatccctgtcggacagtagctcacattcacaagataagcaccacgagaaagaaaaaaagaaatacaaagaaaaagacaaacataaacagaaacacaagaaacagccagaaccttcaccggccttagtgccgtctctcactgtaaccaccgaaaagacttacactagcacgtccaacaacagcattagtggctcccttaagagactcgaggacacaacagctcgatttaccaatgctaacttccaagaagtgtctgcccacactagtagcggcaaagatgtgtctgaaaccagaggaagcgaaggcaagggaaaaaagtcgtcggcgcatagtagcggccaaagggggagaaaaccaggcggtggccgtaatcctggaactacagttagcgccgcctcgcccttccctcaaggatcctttagcggaacccctggctctgtgaagtcttcatccggcagctctgtgcaatcaccacaggactttctatcctttaccgatagtgatcttagaaatgactcctattcccacagccaacaaagtagtgcaaccaaagacgtgcacaaaggggagagtggctcacaggaagggggagtgaatagtttcagcaccctgatcggcctgccttccacgtctgctgtcacttctcagccaaagagcttcgaaaactcccctggagacctcggaaactcaagcttgcccaccgccggctacaaacgggcccagaccagtggtatcgaggaggaaacagtcaaggaaaaaaaacgcaagggcaacaagcagtccaaacacgggccgggaagaccgaagggtaacaaaaaccaggagaacgtgagccatctcagcgtcagctcggcttcacctacttcttccgttgcaagtgcagccgggtccattactagcagctcgctgcagaagtcacctacactgctcaggaatggcagcttacagtcactgtccgtgggctccagcccagtcgggtctgaaatcagtatgcagtatcgtcacgatggggcgtgcccgacaaccagtatctacaattctaatgacgtcgctgtgtcatttccaaacgtggtgagtggttccggctcctcgactcccgtgtcctcctctcacctgccccaacaatcctccggccatctacagcaagtgggggccctctcaccgtctgcagtaagtagcgctgctcccgccgtggccactacacaggcgaatacactgagcgggtcctccctctcccaagcgccaagccacatgtatggcaaccgctccaattcatcaatggcagccctcatcgctcagtccgagaacaatcagacagatcaggacctcggcgacaattccagaaatcttgtaggccggggctcgtctcctcgaggaagtcttagtcctcggtctcccgtatcttccctgcagattaggtatgatcagcccggcaactccagcctggagaatcttccccccgtagcagcctccatcgagcaactgttggaacgacagtggtcggaagggcagcaattccttctggagcagggcaccccaagcgacatcctcgggatgctgaagtctctgcaccagttacaagtggagaacaggcggttggaagaacagataaaaaacctgacggcgaagaaggaaagactccagcttctgaacgcacagctgagcgtgccctttcctactatcacagcgaatccttccccgtcccaccagatccacacattttccgcacagactgcccccacgacggactctctcaactcctcaaagtctccccacatcgggaattcctttctccccgacaattctcttcccgtcctgaatcaggatttaacttcctcgggacagagcacatcttccagctccgctctgtccactcctccacccgctggacagtcaccagcccagcaaggctctggggtctccggcgtgcagcaggttaacggggtcaccgtgggtgcgctcgccagcgggatgcaacccgtgacctctaccattccagccgtgagtgccgtggggggcattatcggcgcattaccggggaatcaattggcgatcaacgggattgtgggcgccctcaacggggtcatgcaaaccccagttactatgtcacaaaatccaacgcccctgacgcatacaaccgtgccgccaaatgccacacacccgatgcccgctacccttactaattctgcctccggtctcggtttactgagtgatcagcaacggcagattttaattcaccaacagcaatttcagcagcttctcaacagtcagcagctgactccaaatatggttaaagagttctctgctcaaattattgcctggaggccatag

SEQ ID NO: 25019 - DNA, 1620 bp, synthetic construct
  source 1..1620: mol_type = other DNA; note = Synthetic coding sequence
atggccaccagcgcccccctgcggagcctggaggaggaggtgacctgttccatttgtctggactacttgagggaccccgtcaccatcgattgtgggcacgtattttgccgatcgtgtactacagatgtccgtccgatttcagggtcgcgtccagtgtgccctctttgcaagaagccgttcaagaaagagaatatccggccagtgtggcagctcgcttcactagtagagaatatcgaacgcctgaaagttgataagggacgccagcccggtgaggtgacacgcgagcaacaggacgcaaagttatgcgagaggcacagggagaaattacattattactgcgaagacgatggcaaactcttgtgtgtgatgtgtagggagtctagagaacacagaccacatactgccgttctgatggaaaaagccgctcagccacaccgtgagaagatcctcaatcacttgtcaaccctccggcgtgaccgcgacaaaatacagggcttccaggcgaagggcgaagcagatattctggctgctttaaagaagctccaggatcagagacagtacatcgtggctgaatttgagcaggggcaccaattcctgagagagagggaagaacatctcctggaacagctggccaaactcgagcaggaattaacagagggacgagagaaattcaagtcacggggggtaggggagttggctcggctggctctagttattagtgagttagagggcaaagcccagcagccggcagcggagctgatgcaagatacaagggacttcctgaaccgatatcccagaaaaaagttttgggtcggtaaacctattgctcgcgtggtaaagaaaaagactggtgaattctcggacaaactgctgagcttgcagagaggcctgagagagttccagggaaaattgctcagggatctggaatacaaaaccgtcagcgtcacattggatccccagtccgcatccgggtatctccagctctcagaggactggaaatgcgtgacttatactagcttatacaagtcagcatacctccatccccagcaattcgactgtgagccgggagtgctgggctccaagggatttacatggggcaaagtgtactgggaagttgaggttgagcgtgaggggtggagcgaggacgaagaagagggggatgaagaggaggagggcgaggaagaagaagaagaagaagaggcgggctatggagatgggtacgatgattgggaaaccgacgaggacgaggaaagtctgggagacgaggaggaagaagaggaggaagaggaggaggaggtgttagagtcctgtatggtcggggtggcccgcgactctgttaaaaggaagggggatctgagcctgcggcctgaagatggtgtgtgggctctgcggctgtctagctctggtatatgggccaatacgtcgcccgaggctgaactgttccccgcccttcgacccagaagagtcggcatcgcgttggactacgagggcggtactgtgactttcaccaacgcagaaagccaggaactaatttatacattcacagccacctttactcgccgcttggttcctttcctctggctaaagtggccagggacaaggctgctgttacggccctag

SEQ ID NO: 25020 - DNA, 444 bp, synthetic construct
  source 1..444: mol_type = other DNA; note = Synthetic coding sequence
atgagcagcgagccccccccccccccccagccccccacccaccaggctagcgtaggtttgcttgatacacctaggagcagagaaaggtcaccttctcccctcagaggaaatgtggtaccctcacctcttccgacgcgccgaactcgtacattctccgctaccgtgagggcctcacagggcccagtctataagggagtttgcaagtgtttctgcagatccaagggacatgggttcatcacgcccgctgacgggggacccgacatcttcctgcacatctcagacgtggaaggcgagtatgttcctgtcgaaggtgatgaggtgacttacaaaatgtgtagtatacccccaaagaatgagaagctccaagcggtggaagtggtgatcacacacttggctcccggcactaagcacgaaacttggtccgggcacgtgatatcttcttag

SEQ ID NO: 25021 - DNA, 951 bp, synthetic construct
  source 1..951: mol_type = other DNA; note = Synthetic coding sequence
atgacccccagcgagggcgcccgggccggcaccggccgggagctggaaatgcttgacagcttactggccttgggcggtctggtccttttacgcgacagtgtagaatgggagggaagatcgcttctgaaggccctcgtcaagaagtcagccttatgcggcgagcaagtccacattctggggtgtgaggtgtccgaagaggaattccgagaaggatttgattctgacataaacaaccgcttggtctaccacgatttctttcgcgatcctttaaattggtccaagactgaagaggcatttccgggtggccctcttggtgctctgcgtgccatgtgtaaaagaaccgatccggtgccagtgactatcgccctcgactcccttagttggcttctgctgcgcctgccctgtaccactttatgccaggtgttacatgcggtgtctcaccaggactcatgccccggggactccagcagcgtaggtaaagtgtcagtccttggtctgctacacgaagagctgcacggacccggcccagtgggcgccctctcatcgctcgctcagacagaggtcacacttggtgggacaatgggccaggcctcagcacacatcctctgccgtaggcccagacagcgccctactgatcaaacgcagtggttctccatccttcccgatttctccctggacctgcaggagggcccgtcagtggagtcccagccatatagtgaccctcacattccgcctgtggacccgacaacacacctgaccttcaatctccacctgtcaaaaaaggagcgcgaagctagggattctctgatactaccttttcagttctcttcagagaaacagcaggcgctcttacgaccgaggccagggcaggctacctcccacatattctacgagcccgacgcctacgatgaccttgatcaagaagatcccgacgatgacctggacatatag

SEQ ID NO: 25022 - DNA, 951 bp, synthetic construct
  source 1..951: mol_type = other DNA; note = Synthetic coding sequence
atgacccccagcgagggcgcccgggccggcaccggccgggagctggagatgctcgattcccttctcgcattggggggtttggtgctgctcagggatagcgttgagtgggagggcaggtcactcctgaaagccttagttaagaagtctgccctatgtggagaacaggtgcatatcctgggttgtgaagtgtctgaggaggaatttcgcgaaggcttcgacagcgacatcaacaatcggctggtgtaccatgacttcttccgggaccccttgaactggtccaagacagaagaagcattcccaggcggacctcttggagcgttacgggccatgtgtaaaagaacagaccctgttcctgtgactatcgctctggactctctgtcctggctgttactgagactcccatgcaccaccctttgccaggtcttacatgccgtatcacatcaggatagttgtcccggcgattccagctcggttggtaaggtttccgtgctcggtctcctgcatgaggaactccatggccctggcccggtcggtgcactgtcaagcctcgcccagacggaggtcacactgggaggcaccatgggccaagccagcgctcacatcctgtgccggcggccccgtcagaggcccacagaccagactcagtggttttcaatcctccccgatttctcacttgatctccaggaggggccttcagtggagtcacaaccatattctgatccccacatccctcctgtggaccccaccacccaccttacctttaacctccacctttctaagaaggaaagagaagcaagggacagcctgattctgccattccaatttagctccgaaaaacagcaggctcttttgcgcccaagaccaggccaggctaccagtcacatcttttatgaacccgatgcctacgacgacctcgaccaggaggaccctgacgatgacctcgacatctag

SEQ ID NO: 25023 - DNA, 810 bp, synthetic construct
  source 1..810: mol_type = other DNA; note = Synthetic coding sequence
atgaaccaggaggacctggaccccgacagcaccaccgacgtgggcgatgtgaccaacacagaggaggagctgatcagagaatgcgaggagatgtggaaagacatggaagaatgtcagaataaactttccttgatcggtactgagactctgacagacagcaatgctcagctctccctgttgattatgcaggtgaaatgtcttactgctgaactcagccagtggcagaaaaaaactccagaaacaatcccactcacagaggacgtcctcatcacactgggcaaggaagagtttcagaagctgcgtcaagacctagaaatggtgttaagcactaaggaaagtaagaatgagaagctcaaagaagatcttgagagagaacagagatggctagacgaacaacagcaaattatggagagcctaaacgtattgcatagtgaactgaagaacaaagtggagaccttcagcgagagtcgaatctttaatgagttgaagacaaaaatgctgaatatcaaagagtacaaggagaagctcttatctacacttggcgagttcctggaggatcatttcccgctgccggacaggtccgtgaagaaaaaaaaaaagaatatccaggagtcctcagtgaacctgataactctgcacgagatgctcgaaattctcattaacaggttatttgatgtgccacacgatccatatgttaaaatttccgacagcttctggccaccctacgtcgagcttctcttgcggaacgggatcgcacttcggcaccctgaggatcccaccaggatcaggctcgaggccttccaccagtag

SEQ ID NO: 25024 - DNA, 1173 bp, synthetic construct
  source 1..1173: mol_type = other DNA; note = Synthetic coding sequence
atggccaccggcgacctgaagcggagcctgcggaacctggagcaggtcctgaggctgctgaattaccctgaggaggtggattgtgttgggctgattaagggagatcccgcagctagtctgcctatcatcagctattcatttacgtcctattccccgtacgtgacagagttgattatggaatccaacgtggagttaatcgctaagaacgacctacggttcatagacgcagtgtataagctcctaagggaccagtttaactataagccgatactgaccaaaaaacagttcatccagtgtggcttcgctgaatggaagattcaaatcgtgtgcgacattctgaattgtgtgatgaaaaaacacaaggaactttcttcccttcaaaaaattccgagccagcagcggaagaagatcagcagcgggaaaagcgagccaccgctcggaaacgagaagatctccgccgaagctgttggggtcgatatctccggaagattcatgacctcagggaaaaagaaggcagtggtcatcagacacctttacaatgaggataacgttgacatctctgaagacaccctgtcaccgattacagatgttaatgaggctgtagatgtctccgacctgaacgccacagaaatcaagatgccagaggtgaaggttccagagattaaggccgaacaacaggacgtaaacgtgaacccagaaattaccgccctgcagacaatgcttgccgagtgccaagagaatttgaagaagctgactagcattgagaaacgtttagattgcctggagcagaagatgaaaggcaaggtcatggtcgacgagaacacttggacgaacctgctctcacgcgtcacactgttagagacagagatgcttctgtctaagaaaaatgacgagtttatagaattcaacgaagtgtccgaggattacgcttcatgtagcgacatggacctgctcaacccccaccgtaaaagtgaggtcgagaggccggcctccatccccctctcgtctgggtactcgacggcctcctcagatagtaccccaagggctagcacagtaaattattgtgggctaaacgagatttctgaggaaaccacgatccagaagatggaaagaatgaagaagatgttcgaggaaacggcagagttgttgaagtgcccaaaccactacctgtag

SEQ ID NO: 25025 - DNA, 381 bp, synthetic construct
  source 1..381: mol_type = other DNA; note = Synthetic coding sequence
atgcccttcttcggcaacaccttcagccccaagaagacccccccccggaaatccgctagtcttagtaatttacacagccttgaccgatctaccagagaggttgaactggggctcgagtacgggtctccaactatgaaccttgctggccagtccctgaagttcgagaacggtcagtggatcgcggaaaccggggtgagcggaggcgtcgacagacgtgaagtgcagaggttgagacggcggaaccaacaactggaggaggagaataatctcctgcgattgaaggtcgatatcctcttagatatgctctccgagagtaccgccgagagtcacctcatggagaaggaattggatgagctgagaatcagcagaaagcgcaaatag

SEQ ID NO: 25026 - DNA, 711 bp, synthetic construct
  source 1..711: mol_type = other DNA; note = Synthetic coding sequence
atgcaggtgcaggacgacggcgtgaacctgatccccttcgccaagtgttcccgggtcgtaagtcgctccccccctcccaggttgccttctcagagtctgaggcccatgcctcagagatacggtgacgtcttttggaaaaatctgaatcagcgccccacccctacgtggctggaagaacaacatataccgcccatgctccgagcaacaggctgcagccagttgggcttgtatccccctgaacagctgccccccccagagatgctatggcgacggaaaaaaagaagaccatgtctggaaggaatgcagcagcagggcttgggtggagtccctgcaagagtgagggctgtgacttatcatctggaagatctgaggcggagacaaagcatcatcaacgaactaaagaaggcccaatggggatctagtggcgccgcctctgaaccagtagtgctcggcgaggaagggtgcggattcccctctacgaacgagtacccggatctggaagaggagcgggccacctacccacaggaagaagatagattcctgacacctggtcgcgcccagttgctctggtcaccctggtctccactcgaccaggaggaggcatgtgcgagtcgtcagctccactctttggcctcctttagcaccgtgactgctcgcagaaatccgcttcataacccttggggcatggagctcgccgcatcggaggaatag

SEQ ID NO: 25027 - DNA, 1680 bp, synthetic construct
  source 1..1680: mol_type = other DNA; note = Synthetic coding sequence
atgaaccccctgttcggccccaacctgttcctgctgcagcaggagcagcaggggctagctggccccctcggggatagtctggggggagaccattttgctgggggaggcgatctcccgcccgccccgcttagcccagctggcccagccgcttactctccccctggtccaggcccggcacccccggcagctatggccttgaggaatgacctgggttccaatatcaacgtgctgaagaccctcaacctacgttttaggtgcttcctggctaaggtgcatgaacttgagcggaggaatagactgttggagaaacaacttcagcaggcgctggaagaaggcaaacaggggcgtaggggtctgggccgccgagaccaggctgtccaaaccggttttgtttctcctatacgcccgctggggctgcagctgggtgctagaccagccgcggtctgcagtccttctgctcgcgtcttgggatctccggcccggtccccagcagggccactggcccccagtgcagctagcctatcttcgtcatcaacttccacaagcaccacttacagtagctctgctaggttcatgcctgggaccatttggtccttttcacacgctcgccgactgggaccagggctggaacccaccctggttcagggcccagggctgtcgtgggtgcaccccgacggagtgggagtccagatcgacactatcacgccagaaatacgggccttgtacaatgtccttgccaaggtgaagagggagcgtgacgaatataaacgaaggtgggaggaggaatacacagtccgtattcagctccaggaccgcgtcaacgagctgcaagaggaagcccaggaggcagacgcctgtcaggaggaattagccctgaaggtggagcaactgaaagctgagcttgtggtattcaagggcctgatgtccaacaacctgtccgaactggacacgaaaatccaagaaaaagctatgaaagtggacatggacatatgtcgccggattgatatcacggccaagctgtgcgatgtcgcacagcagagaaactgtgaggatatgattcagatgttccaagtgccctctatgggcggaaggaagagagagaggaaggcagccgtggaagaggatacatccttatcagagagtgaagggcctcgacagccggatggagatgaggaggaatccacggctcttagcattaacgaggagatgcagcgcatgctcaaccaactgcgagagtacgatttcgaagatgattgcgatagcttaacttgggaggagacagaagagacacttttactctgggaggacttctcagggtatgctatggctgcggcggaggctcagggggagcaggaagactcattagagaaagtaataaaagatacagaatctctgtttaaaactcgtgaaaaggagtaccaggagaccatcgatcagatcgagctggagctggctacggccaagaatgacatgaatcggcaccttcacgaatacatggagatgtgctcaatgaagcgcggacttgatgtacagatggagacgtgtaggcgattaatcacacagtccggcgacagaaaatcacccgcttttacagccgtaccgctatctgatcctcctcctccaccttctgaggccgaagactcggacagggacgtgtcaagtgatagctccatgagatag

SEQ ID NO: 25028 - DNA, 1182 bp, synthetic construct
  source 1..1182: mol_type = other DNA; note = Synthetic coding sequence
atggccagcggccgggcccggtgcacccggaagctgcggaactgggtcgtcgaacaggtcgagagcggccaattcccgggagtttgttgggatgataccgcaaagacgatgttccgaattccgtggaagcacgctgggaaacaggactttcgggaagaccaggacgccgcgttctttaaagcatgggcaatttttaaaggaaaatacaaggaaggggacaccgggggccccgctgtgtggaagacgcgtctgaggtgtgcactgaacaagtctagcgagtttaaggaagttcctgaacgcggaaggatggacgtggccgagccctataaggtttatcagctgctgcccccaggaattgtgagtggccaacccggaacacagaaagtccccagcaaacgccagcactcgagcgtcagctctgagagaaaagaggaggaagacgccatgcaaaattgcacactcagcccgtctgtgctgcaggattctctgaacaacgaggaggagggcgctagtggcggcgccgtccacagcgacattgggtcttcttccagctcaagttcaccagagcctcaggaagtaaccgacaccactgaagccccatttcagggtgatcagcgcagcttggagtttctgctccctccagaacccgattattcccttctgttgacctttatctacaatggccgcgtagtgggcgaagctcaggtacaatccctcgattgtcgccttgttgctgagcccagcggatccgaatcgtccatggagcaagtcctgtttccaaagcccggaccattagagcccacacagaggttgctctcacaattggagcgcgggatccttgttgcgtctaacccaaggggattgtttgttcagagattatgccctatccctatatcttggaatgctccccaggcaccacccgggcctggaccacacctactcccgtctaatgaatgcgttgagctttttagaacggcctacttctgtcgagacctcgtaaggtattttcagggtctgggacccccgcccaagtttcaggtgacactgaacttttgggaggagtctcacggctcatctcacacgccgcagaatcttatcacagtgaaaatggaacaagcctttgcgcggtacttattagagcagacacccgaacaacaggccgctattctcagcctggtatag

SEQ ID NO: 25029 - DNA, 2454 bp, synthetic construct
  source 1..2454: mol_type = other DNA; note = Synthetic coding sequence
atgtggagcctgaccgccagcgagggcgagagcaccaccgcccacttcttcttaggggccggcgatgagggactgggtactcgtggcatcggaatgcggcccgaagagagcgattcggaactgctcgaggacgaggaggatgaggttccccccgaaccccagataatagttggcatatgcgccatgaccaagaagtcaaagagtaaaccaatgacccagattcttgaaagactgtgccgcttcgactatctaacagtggtcatacttggcgaggatgtgatccttaatgagcccgttgaaaattggcctagctgccactgcctcattagcttccactccaaaggttttcccttggacaaagccgtcgcatactcaaaactcaggaatcccttcctaatcaacgacttagccatgcagtactatatccaagataggcgcgaagtctaccgaattctccaagaagaagggatagacctcccccgatacgctgttctgaatagagaccctgctcgtcctgaagagtgtaatctgatcgagggtgaagatcaggtagaggtgaacggcgccgtctttcccaaacccttcgttgagaagcccgtctctgcagaagaccacaatgtgtatatttactatccttcctctgccggaggcggttcacaaagactgtttaggaagataggttcaagaagcagcgtgtacagtcccgagtctagtgtgcgcaagacgggatcttacatctacgaagagttcatgcctacagatggcaccgacgtcaaggtttacactgtgggccccgattacgctcacgccgaggccagaaagtcccctgcattggacggtaaggtggaaagggacagtgaagggaaggaaattcaatacccagtgatgctcaccgctatggagaagttggtcgcccggaaggtctgtgtggccttcaagcagactgtctgtgggtttgacttgctgcgagctaacgggcatagcttcgtatgtgacgtcaacggcttcagcttcgtcaaaaactctatgaaatactacgatgattgtgcaaagatccttggcaacaccatcatgagggagctggcaccacaattccaaatcccctggagtatccccaccgaggccgaggacatccccattgtccccactactagtggcacgatgatggagttgcgatgtgtgatagctatcatcagacatggcgacagaactccaaaacagaagatgaaaatggaggtgaagcaccctaggttcttcgctctgttcgaaaagcacggcggctataagacaggcaagttaaagcttaaacgaccagaacagctgcaggaggtactggatattacccgcttgctgttggccgagttggaaaaagagccaggaggtgaaatcgaagagaaaacaggaaagcttgaacagctgaagtccgttctggaaatgtacggccactttagtggcataaatcgcaaggtgcaactgacctactacccccacggagtgaaagccagtaacgagggacaggaccctcagcgggagacgctggccccctccctcctcctcgtcttgaaatgggggggtgaactgacccccgctggccgggtgcaggcagaggagcttggaagagcctttagatgcatgtatcctggagggcagggcgactacgccggattccccgggtgtgggctcctgcgtctccatagcactttcaggcacgacctcaagatttacgccagtgatgaggggcgagtacagatgacggccgccgcgttcgctaagggcctgctggccctcgaaggggaattaacccctatcctcgtccagatggtcaagtcagccaacatgaatggtctattggacagtgacggagacagcttgagttcctgccagcatagggttaaagctagactgcatcacatactgcagcaggacgcgccatttggccccgaagattacgatcagctggcacctactcggagcacgtctttgctgaacagtatgactattatccagaatcccgtcaaagtttgcgatcaggtgtttgcactgattgagaacctgacacatcaaattcgtgagcgtatgcaggaccccaggtctgtcgatctgcaactatatcattcggagactttggagttaatgctgcagcggtggtcaaagctggaacgcgacttcaggcagaagagcggccgatacgacatatctaaaattccggacatctatgactgtgtgaaatacgacgtgcaacataacggcagtcttggccttcagggcaccgccgaactgttgcgcctgtccaaggcactcgctgatgtagttatcccacaagaatacggaataagtagggaagagaagttggagattgctgtcgggttctgcctgccactgctgcgcaagatcctgctggatctccaacggacccacgaggacgaaagtgtgaataagcttcatccgctgtag

SEQ ID NO: 25030 - DNA, 417 bp, synthetic construct
  source 1..417: mol_type = other DNA; note = Synthetic coding sequence
atgatcctgcagcagcccctgcagcggggcccccagggcggcgcccagagattacctagggccgccctcggtgtcacgtggggtttagacgcttccagtccactccggggggccgttcctatgtctacaaagcggcgcctggaagaggaacaagaacccttgaggaagcagtttttgagtgaggaaaatatggccactcacttctcccagttaagtcttcataacgaccacccgtactgtagtcctcctatgacatttagtcccgctttgcccccgcttagaagtccgtgctccgaattgctgctgtggcggtaccccggctccctgattcccgaagcactgcggctgctgagactcggcgatacacccagccccccttatcccgccaccccagctggtgacattatggaattgtag

SEQ ID NO: 25031 - DNA, 4302 bp, synthetic construct
  source 1..4302: mol_type = other DNA; note = Synthetic coding sequence
atgtggagcctgaccgccagcgagggcgagagcaccaccgcccacttctttctcggcgccggggacgagggcttgggaacccggggcattgggatgaggcctgaggaaagcgactccgaactgctggaggatgaggaagacgaagttccacccgaaccacagatcatcgtggggatctgcgccatgactaagaaatccaagtccaagccaatgacgcagattctggagcgcctatgtcgctttgactacctcaccgtggttattctgggagaggacgtgattttgaacgagccggtggagaactggccaagttgccattgcctgattagttttcactccaaagggttccctttggataaggccgttgcctactctaaactgcgcaatccctttctcatcaacgatttggctatgcagtattacattcaggatcggagagaggtgtaccgcattctccaggaggagggaatagatttgcctagatacgcagtcctgaatagggaccccgctagacctgaggagtgcaacctgatcgagggcgaagaccaggtggaagtgaatggagctgtcttcccaaaaccgttcgtcgaaaagcctgtgtccgccgaagaccataacgtatacatctactaccccagctctgcaggaggcggctcgcagcggctgttccgaaagatcggctcgaggagtagcgtgtactctccggagtctagcgtcaggaagaccgggtcctacatttacgaagaattcatgccaaccgatgggacggacgtgaaggtgtacaccgtaggccccgattatgcccacgcagaggctcggaagtctcccgccctcgatggaaaagtggaacgggacagcgaagggaaagagatccgctatcccgtaatgttaacggcgatggaaaaattagttgcaagaaaagtatgcgttgcgttcaagcagactgtctgtgggtttgacttgctcagagctaatgggcattctttcgtgtgtgatgttaacgggttcagttttgttaagaactcaatgaagtattacgacgactgtgccaaaatactagggaatacaatcatgagagaattggccccccagttccagatcccttggtctattcccacagaagccgaagacatcccaatcgtcccaactacctcgggcacaatgatggaactgcgttgcgttatagcgattatcaggcacggtgacaggacccccaaacagaagatgaagatggaggttaagcatccgcgcttttttgcactgtttgagaaacacggcggctacaagactggcaagttgaagttaaaaaggcccgagcagctgcaggaggttttagacataaccagactgctgctcgccgagcttgaaaaggaaccgggaggcgagatcgaagaaaagaccggaaagctggagcagctcaaatcggtcctcgaaatgtatggccatttctccggaattaatcggaaggtacaacttacctactacccccatggagttaaagcttctaacgagggccaggatccccagagagaaaccctagccccctcactgctgttggtgctcaaatgggggggggagctcacgcccgctgggagggtgcaagcggaggagctcgggcgagcgttcagatgtatgtatcccggagggcagggagactacgctggattcccgggttgtgggctgcttcggttgcactctacattccgccacgatctgaagatttatgcttccgatgaggggagggttcagatgacagcagccgctttcgctaagggcttgctggctctggaaggcgagttgacacccatacttgtgcaaatggtgaaatctgccaacatgaatgggcttttagattcagatggcgatagtctcagcagctgtcagcaccgtgtgaaggctcggctccatcatatcttgcagcaagacgctccatttggccccgaggactatgaccagctggcacctactcggtcaactagcctgctgaatagtatgacaattatccagaatcccgtcaaggtatgcgatcaggtgttcgcgctgatcgagaacctgacacatcagatccgcgagaggatgcaggatccgagatctgtggatcttcagttataccattccgagactttggaactaatgctccaaaggtggagtaagctcgagagagactttaggcagaagtccgggaggtatgacatctccaaaattcccgacatttacgattgcgtgaaatacgacgtccagcataacgggtcactgggcctgcagggaaccgcggaattacttaggctatcgaaggccctcgcagacgtggtaatacctcaagagtacgggatttccagagaggagaaattagagattgcagtgggattctgcctgccactgttgcgaaagattcttttagatcttcagaggactcacgaggacgaatccgttaataagctccacccgctttgctatctacgctatagccgaggtgtgctcagtcccggacggcacgtccgcactaggctgtatttcaccagcgagtcgcacgttcattctctgttaagtgtctttaggtatggggggttgctggacgagacccaagatgcccagtggcagagggccttggactatttgtccgctataagtgagctgaattacatgacacaaatagtgattatgctctacgaggataacactcaggaccctttgtctgaggagcgattccacgtcgagctacatttcagccccggtgtaaaaggggtggaggaggaggggagcgctcccgcgggttgcggattcagaccagcctccagtgaaaatgaagagatgaaaactaatcaagggtcaatggagaatctgtgccctggaaaagcctcagatgagccagaccgtgcactacagacatcacctcagccccctgagggacccgggctgccgcgaaggtcccctctcattaggaaccgaaaagcgggttccatggaagtattgtctgagacttccagcagccgccctggaggttataggttgtttagcagctcacgccccccgacagaaatgaaacagtcaggattgggttcccagtgtactgggctgttctctaccaccgtgcttggtggatccagctccgcccctaacctccaggactacgcccgttcccatggcaaaaaactccctcccgcatcccttaagcacagagatgaattactcttcgtgcctgcagttaaacgattcagtgtgtctttcgccaaacatcccacaaatggcttcgagggctgctcaatggtccctaccatctacccgctggaaactttacacaacgccctgtccctgagacaggtgagcgagttcttgtctcgagtatgccagagacacaccgacgctcaggctcaggcatccgctgcattattcgacagcatgcattcctcccaggcgtctgacaatcctttcagcccaccccggaccctgcacagccccccactgcagcttcagcagagatctgaaaaacctccctggtatagcagcggaccaagctccaccgtgtcttcagccggcccatcatcccctacaaccgtcgacgggaatagtcaattcggcttttctgaccagccttctctgaattcccatgtagcagaagagcaccagggcctgggattactacaggaaacaccaggcagcggcgcccaggaactgagcatagagggagaacaagaactttttgagcctaaccagtccccccaggttccccctatggaaacctcccaaccctatgaggaggtctcccaaccatgtcaggaagttcccgatatcagtcaaccctgccaggacatcagtgaggcactgtcccagccatgtcagaaggtccctgacatctctcaacagtgccaggagaaccacgacaacggcaaccacacctgccaggaagtcccacatatctcccagccttgtcagaagtcgtcacagctttgtcagaaagtgtcagaagaggtatgtcaactgtgtcttgaaaacagcgaagaggtcagtcaaccttgccaaggcgtgtcagttgaggtgggcaaactggtgcataaatttcacgttggcgtggggtcactcgtccaggagaccctggtggaagtgggatctccagctgaggaaattcccgaggaagttatccagccttatcaagaattttctgtcgaggtcggaagattggcgcaggaaacgtctgctattaaccttctcagtcaggggattcctgaaatcgacaagccttctcaggaattccctgaagagatcgacctgcaggcccaggaggtccctgaagagatcaactag

SEQ ID NO: 25032 - DNA, 435 bp, synthetic construct
  source 1..435: mol_type = other DNA; note = Synthetic coding sequence
atggccgaggtgcaggtgctggtgctggacggccggggccacctgttaggccgactggccgccatcgttgccaaacaggtgttgctggggcgaaaggtggtggtagtgagatgtgaagggataaacatctcaggaaatttctatcggaataagctgaaatatctggctttcctccggaagcggatgaacactaatccatccagggggccatatcacttccgcgcccccagtcgcattttctggcggactgtgaggggtatgttgccccataagaccaagcggggccaggctgccctggataggctgaaggtttttgatgggatccccccaccctacggtaataggccaaggcggacctggagacggaagctgacaaatacacagcgctcgtcacgtccaacggattcctggagcgaacccaacaaggactgttag

SEQ ID NO: 25033 - DNA, 408 bp, synthetic construct
  source 1..408: mol_type = other DNA; note = Synthetic coding sequence
atggccgccctgcggcccctggtgaagcccaagatcgtgaagaagcgcacaaaaaaattcattcggcaccagtctgacagatatgtgaaaattaaacgcaactggaggaaaccgagggggattgataaccgcgtaaggaggcggtttaaagggcaaatcttgatgccaaacataggctacggaagtaacaagaaaacgaagcatatgctgccctcagggttccgcaagttcctggttcacaacgtcaaagagctcgaggtattgctgatgtgcaataagtcttactgtgctgaaatcgctcacaacgtgtcctccaaaaaccgaaaagcgattgtcgaaagggctgcccagcttgcaatcagggtaacaaatcctaacgcacggctccgctccgaggagaatgaatag

SEQ ID NO: 25034 - DNA, 408 bp, synthetic construct
  source 1..408: mol_type = other DNA; note = Synthetic coding sequence
atggccgccctgcggcccctggtgaagcccaagatcgtgaagaagcgtaccaaaaaatttatccggcatcagtctgaccggtacgtgaaaattaaacggaactggcggaaacctcggggcatagataatagggtgcgaaggcggtttaagggacagatcttgatgcctaatattggctacggctccaacaaaaaaaccaagcacatgctgccctccgggttccggaaatttttggtccataacgttaaagaattggaggtgctgctcatgtgcaacaagtcctactgcgctgagatcgcccacaatgtttcgtccaagaacagaaaagcaattgtggaacgcgctgctcagctggcaattagggtaacgaacccaaatgcccgccttcgctcagaggagaatgaatag

SEQ ID NO: 25035 - DNA, 684 bp, synthetic construct
  source 1..684: mol_type = other DNA; note = Synthetic coding sequence
atggagccccagggctaccccgccttcggctgggaccacagcctgcataaacgaaagcgtctgcctcctgtgaagagatcactggtctattacttaaagaatagagaagttaggcttcaaaacgaaacgtcctactcaagagtgctgcacggatatgctgctcagcagcttccttccctcttgaaggaacgcgagtttcacctagggaccctgaataaagtatttgcctctcagtggttgaatcacaggcaggttgtgtgtggtacaaagtgcaatacgctctttgtggtcgatgtgcagaccagtcagatcacaaagattccgattctgaaagatcgagaaccaggcggggtgacccagcagggatgtgggatccatgccattgagctgaatccgagccggacactattggctactggcggggacaaccctaatagtttggcgatttaccggttacccacattggacccggtctgcgtgggggacgacgggcataaggactggatcttctcaattgcatggatcagcgacaccatggctgtatctggttcccgagatggaagcatggggttatgggaggtcacagatgatgtgctcacaaagtcagatgcccgacataatgtgtctcgggtgccagtctatgcccacattacccacaaggccctgaaagacattcctaagtag

SEQ ID NO: 25036 - DNA, 1554 bp, synthetic construct
  source 1..1554: mol_type = other DNA; note = Synthetic coding sequence
atgacccggctgggcaccgtgccccggaaggccctggagatgagctgtgccatccagaatcagctggcacggatactcgccgagtttgagatgaccctggaaagagatgttctccagcccctcagcaggttgtccgaggaagaattacctgccatcctgaaacacaagaagagcctgcagaagctagtgtcagactggaataccctgaagagcagactcagtcaggctacgaagaacagcggcagcagccaggggctcggtggctcaccgggatcccacagtcatactacgatggcgaacaaggtggaaacgctgaaagaggaagaagaagaacttaaacggaaggtcgaacaatgccgagacgaatatctagccgacctgtaccactttgtcactaaggaggacagctatgcaaattattttattcgactcctggagatccaggcagattaccacagacgcagtctgagcagcctggataccgcacttgccgaactaagagagaatcatggccaggctgatcactctccttcgatgacagcaacccatttccccagagtgtacggagtgagcctggccacccatctgcaagagcttggcagggagatcgccctgcctattgaggcctgcgtgatgatgttgctgtctgaaggaatgaaagaagagggcttattcagactcgcagctggagcctccgtcctcaagaggctcaaacagacgatggctagcgaccctcattccctggaagaattttgttccgacccacacgccgtggcaggagcgctgaagagctacttgcgcgagctcccagagccattgatgaccttcgacctctacgatgattggatgagggctgccagtctgaaggagcctggtgcacgcctccaggcactacaagaggtctgcagcagactgccacccgagaatctcagcaatttacgttacctgatgaaatttttagcaagacttgccgaggagcaggaagttaacaagatgaccccatccaacattgcaatcgtgctcggacccaatctcttatggcctccagaaaaggagggcgaccaggcacagctggatgcggctagtgtttctagcatacaggtggtgggcgtcgttgaggctctgattcaatccgcagacactctgtttccaggtgatattaacttcaacgtgagcggcctttttagcgccgttaccttgcaggacactgttagcgatcgcctggcttctgaggaactgccgagcactgcagtccccactccagccaccacccccgcccccgctcctgcccccgctcccgcccccgcccccgccctcgctagcgccgcgaccaaggagcggactgagtcagaggtgcccccgaggccagcatccccaaaggttacccgctcaccccccgagacagccgcccctgtggaggatatggctcggaggagtccaaggggcgcaaccgggcgcaaagagcgctttgcttgctcctacggaactgactcttcactggctgatatgttctttgtccgactggtgaacaagttattttggactaaactgtag

SEQ ID NO: 25037 - DNA, 918 bp, synthetic construct
  source 1..918: mol_type = other DNA; note = Synthetic coding sequence
atggacctgagcggcgtgaagaagaagagcctgctgggcgtgaaggagaataataaaaagtcctctacccgggctccaagcccaacaaagagaaaagatcgctctgacgaaaaatctaaggaccgtagcaaggataaaggagccaccaaggagtcctcggagaaggatcggggcagagacaagacccgaaagaggagatcagccagctctggttcaagctcaacccgaagtcgcagttccagcacgagtagcagtggtagttctacatctacgggctcctcctctgggagtagctcatcatctgcctctagccggtccggatcaagttctacatcgcgttctagttcctcttcctcgtcctccgggtccccaagcccctcacggaggcggcacgacaatagacgcagatctagatctaaaagcaaacctccgaaaagagatgaaaaggagcgtaagagaaggagcccgtctccaaaacctactaaggtgcatattgggagattgactcgtaatgtgacgaaggatcacattatggaaattttctcaacgtatgggaaaattaaaatgatcgacatgcccgtggagagaatgcacccacacctatccaaagggtacgcatacgtcgaatttgagaatcccgacgaggcagagaaagccctgaagcacatggacggcggacagatcgacggacaagagatcacagcgactgccgtgttggccccatggccacgaccgcctcctaggcggttttcgccaccaagaagaatgctgccgcctccccctatgtggcgaagatcccctcccagaatgaggcggcggagcaggagccctcggcggagatcaccagtgcggagacgcagtcgaagccccggaaggaggagacatagatcccgctcttcgagtaactcctcccggtag

SEQ ID NO: 25038 - DNA, 927 bp, synthetic construct
  source 1..927: mol_type = other DNA; note = Synthetic coding sequence
atgatccacgacgcccagatggactactacggcacccggctggccacctgctccagcgacaggagcgtcaaaatatttgatgtcagaaatggcgggcagatcctgatcgccgacctacggggccatgagggcccagtttggcaggttgcctgggctcaccccatgtacgggaatatcctggcttcatgttcgtacgacagaaaggttatcatatggcgcgaagaaaatgggacgtgggagaagtcgcacgagcacgcaggccacgattcgtctgtcaatagtgtgtgctgggctccacatgactacggactgatcctagcctgtggctcttccgacggcgctatttctctgttaacttataccggggaaggtcaatgggaggttaagaagatcaacaatgctcacaccatcggatgcaatgccgtcagctgggcacctgcagtggtgccaggatccctgatcgaccatcccagtggtcagaagcccaattacattaagagattcgctagcggcggatgtgacaacctaattaagttgtggaaggaggaagaggacggacagtggaaggaagagcagaaactggaggcccacagtgactgggtcagagacgtcgcttgggccccgtcgattgggttgcctaccagtactatcgcatcttgcagtcaggacgggcgtgtctttatttggacctgcgatgatgcttcatctaacacatggtcaccaaaacttttgcataagtttaatgatgtggtatggcacgtgtcctggtccatcacagccaacattctggccgtgtctggcggagacaacaaggtgactctatggaaggagtccgtggatggacagtgggtctgtatttccgacgttaacaaggggcagggcagtgtctcagcttcagtcacggaaggtcagcagaacgagcaatag

SEQ ID NO: 25039 - DNA, 1542 bp, synthetic construct
  source 1..1542: mol_type = other DNA; note = Synthetic coding sequence
atgagcatcgagatcgagagcagcgacgtgatccggctgatcatgcagtaccttaaggaaaactctctgcacagagcactggctacattgcaagaggagaccactgtctctctgaacaccgtggactcaattgagtcgttcgtagccgacattaattcggggcattgggataccgtgctacaggccatccaatccctgaaactgcctgataaaaccctgatcgacctctatgagcaggttgtcctggagcttatcgagctgcgcgaactgggcgccgctcgatccctactgcggcagacggatcccatgatcatgttaaaacagacccagcctgagcggtacatccacctggagaatttgctggccaggagctactttgacccaagagaggcttatcccgatggaagttccaaggagaaacgacgcgccgctattgctcaggcgctggcgggcgaagtgtccgttgtgcctccaagcagactgatggcgttactgggccaggcacttaagtggcaacagcaccagggattgctccctcccggcatgactattgaccttttccggggaaaagccgcggtgaaagacgtcgaagaggaaaagttcccaacacagctgagccgacatattaagttcggacagaagtctcatgtggaatgcgctcgcttctcccccgatgggcagtatctcgtcaccggttccgtagacgggtttattgaagtttggaatttcacgacagggaagatccggaaagatttaaagtaccaggcccaggataactttatgatgatggacgatgcagttctttgcatgtgcttcagcagggacacggaaatgttagctacgggagcccaggacggaaaaattaaggtgtggaagatccaatctgggcagtgtctgcggcgcttcgaacgagcacattcaaaaggagttacctgcctgagtttctccaaagactcatcgcagattctgagcgctagttttgaccagacgatacggattcacggcctcaaaagcggaaagactttgaaagaatttagaggtcattcctccttcgtcaacgaggctaccttcacacaggatggtcattatattatctctgcgtcctctgacgggacggtgaaaatttggaatatgaagaccaccgagtgttccaatacatttaagtccttaggctctacagcggggactgatattacagtgaatagcgtgatcttactgccgaagaatcccgagcattttgttgtatgtaatcgctccaatacagtcgtgatcatgaatatgcagggtcaaatcgttagaagctttagctccgggaaacgcgaaggcggtgattttgtgtgctgcgccctgagccctaggggtgagtggatttattgcgtgggggaggactttgttctgtactgtttctcaactgtgactggtaaactagagagaactttaaccgtgcacgaaaaagatgtgattggaattgctcaccacccgcaccagaatctgattgccacgtacagcgaagacggattactgaaactctggaagccatag

SEQ ID NO: 25040 - DNA, 2136 bp, synthetic construct
  source 1..2136: mol_type = other DNA; note = Synthetic coding sequence
atgagcagcgtgcagagccagcaggagcagctgagccagagcgacccctctcctagccctaatagctgttcgtcatttgagctgatcgatatggatgcaggctcactatacgaaccagtgagccctcattggttttactgcaagatcatagacagcaaggagacctggatacccttcaactccgaggatagtcagcaattggaagaggcctacagttctggaaaaggatgcaacggtcgtgtagtccccacagatggaggcagatatgatgtgcacttgggagagaggatgaggtacgccgtctactgggatgaactggcttcagaggttcgaaggtgtacttggttctataagggcgataaggacaataaatacgtgccttattctgagtccttcagccaggttctggaggaaacatacatgctggccgtcactcttgacgagtggaagaagaagctcgagtcccccaatcgggagattatcatactccataacccgaaactgatggtccattaccaacctgtggccggcagcgatgactggggttcaactccaacagagcagggtagaccccgcaccgtaaaacgaggcgtggagaatatcagcgtcgatattcattgtggagagccgctgcagattgatcatcttgtgttcgtggttcatgggattggtccggcgtgtgatttgcggttccgtagcatagtgcagtgtgtgaacgacttccgaagcgtttctctcaacctgctgcagactcactttaagaaagctcaggaaaatcagcagatcggaagagtggaattcctgcctgtcaattggcactccccactccacagtactggagtggacgtcgacttgcagcgcattaccctgcccagcataaacagattgcgccacttcacgaatgataccatccttgacgtgttcttctataatagtcctacatactgtcagaccatcgtcgacacagtcgctagcgaaatgaacagaatttacactttatttctccagcgaaatccagactttaagggcggggtatccatcgccgggcatagccttgggagtctaatcctgtttgacattctcacaaaccagaaggatagtctaggtgatatcgattcagagaaagacagtctgaacatcgtaatggatcaaggtgacacacccacgctggaagaggacctcaagaaactgcagttgtctgagttctttgatatattcgaaaaagaaaaggtcgataaggaggccctagccctctgcaccgacagggacctgcaggaaatcggcattcctctgggtcccagaaaaaaaatcctgaactacttttctacacggaaaaactccatggggattaagcgccccgctcctcagccagcctctggcgcgaacattccaaaagagagcgaattctgttcctcatctaacactaggaatggggattatctggacgtcggcattggtcaggtgtctgtgaaataccccagacttatatataagcccgagatcttttttgctttcggctcccccattgggatgttccttactgtgagggggttaaagcgaattgacccaaattatcggtttcccacctgtaaagggtttttcaacatctatcatccttttgaccccgtcgcctaccgcatcgaacctatggtcgtgccaggggtcgagttcgagcccatgctcatcccccaccacaagggcaggaaaaggatgcacttggaactccgcgaaggactcaccaggatgtccatggatcttaagaacaatcttttgggcagcctgcgaatggcatggaaatccttcactagggccccttatccagccctacaggcatctgagactcctgaagagacagaagctgagcctgagtctacgtcagagaagccctcagacgtaaatacagaagagacgtccgtagccgtcaaggaagaggttttgcctattaatgtcggcatgctgaatgggggtcaaaggatagactatgtacttcaggagaaaccaattgagtcattcaacgagtatttatttgcgctccaaagtcatctttgttactgggaatccgaggacaccgtgctgttagttcttaaggagatctatcagactcaaggcatatttttggatcagcccctgcagtag

SEQ ID NO: 25041 - DNA, 3351 bp, synthetic construct
  source 1..3351: mol_type = other DNA; note = Synthetic coding sequence
atgtacggcagcgcccggagcgtgggcaaggtggagcccagcagccaatccccaggaaggtcaccccggctgccccgctcacctaggctaggccacagacgcactaactctactggcgggtcatctggttcatccgtcggggggggctcaggaaagacactgtctatggaaaatattcagagtctcaacgcagcttacgctacttctggcccaatgtacctgtccgatcatgaaaatgtcgggagcgagaccccaaaatctactatgactctgggacgttctggcggcaggctcccctacggcgtgagaatgacagctatggggagctcacctaacattgcaagtagcggggtggccagcgatacgatcgccttcggcgagcaccacttgcctccagtgagcatggccagcaccgttcctcacagcctgaggcaggcgagagacaacacgataatggacctccaaacacagcttaaagaggtcctgagagaaaatgatctgcttagaaaggatgtggaagtgaaggaaagcaagctgtcaagtagcatgaactctatcaagactttctggagccccgagcttaagaaggaaagggctcttcgtaaagatgaggcatcaaaaattaccatttggaaggagcagtatcgcgtcgttcaggaagaaaaccagcacatgcagatgactattcaagccctacaggacgaactgagaatccagagagacctgaaccagttgtttcagcaggatagcagtagccgcaccggcgagccctgtgtagcagagctcaccgaggagaacttccagagattgcatgccgaacacgaacggcaggcaaaggagctgtttctgcttcgcaaaaccctggaggagatggagctgcgaattgagactcagaagcagaccctgaacgcgcgggatgaatctattaaaaagctgctcgagatgctccagagtaaagggctctcagcaaaggctacagaggaggatcacgagcgaactcgcaggttggcggaggccgaaatgcatgtgcatcacttagagtccctactcgagcagaaagaaaaagagaactctatgctcagggaggagatgcatcgcagatttgagaatgcacctgattcagccaagaccaaggcactgcagacggttattgaaatgaaggacagcaagatttcatccatggaaagagggctccgggacctggaggaagagatccagatgctgaaaagcaatggcgcactatctacagaggagcgtgaagaagaaatgaagcaaatggaagtgtatcggtcccactcaaagttcatgaagaataaagtcgaacagctgaaagaagaacttagttccaaggaggcgcaatgggaagaactgaagaagaaggcagccggcttgcaagcggagatcgggcaagttaagcaggaactctcccgaaaggacacagaactcctggctttgcagacaaaattggagaccctgactaaccagttcagcgactccaaacaacacattgaggtgttgaaggagagtttgacggccaaggaacagcgggccgctatcctgcagacagaggttgatgcactccgattacgtctggaggagaaagaaacaatgctcaacaagaagactaagcagatacaggatatggcagaagaaaaggggactcaagctggcgagatccatgaccttaaagacatgctggacgtaaaggaacgtaaagttaatgtactacaaaagaagatagagaacctgcaggagcaactgagggataaagaaaagcagatgtcaagcctcaaggagcgtgtcaaaagtctccaagccgacacaaccaacacagacacggcgcttaccactcttgaagaagccctggccgaaaaagagcgtactatcgagcgtctgaaggaacagagagatcgcgatgagagagaaaagcaggaagagatcgataactataagaaggacctgaaggatctgaaggaaaaggtttctttgctgcagggtgacttgtctgaaaaagaggctagtctcctagacttgaaagaacacgcttcatccctcgcttcatctgggctgaaaaaagattcccgcctgaagacacttgagattgccctcgagcagaagaaggaggaatgcctaaaaatggagtcacagctaaagaaagctcacgaggcggcacttgaggccagggccagtccagaaatgagcgacaggatccaacacttggagagggagattacccgctacaaagatgagtcttcaaaagcacaggctgaagtcgacaggttgctggagatccttaaagaagtagagaatgagaaaaatgacaaggacaagaaaatagcggagctggaaagacaagtgaaggatcaaaacaaaaaggtagccaacttgaagcataaggagcaggtagagaaaaaaaagagcgcccagatgctcgaggaagccaggaggagagaggataacttaaatgattcatcacagcagctgcaagactctctgagaaagaaagatgataggatcgaggagttagaggaggcactcagagaaagtgtccagatcacagctgagagagagatggtcctggctcaagaagaaagcgcccgcaccaacgccgaaaagcaagttgaggagctgctgatggccatggagaaagtgaagcaggaattggagtcaatgaaggccaagctgtcctctacccagcagtcactggctgagaaggaaacccacctgaccaacctgcgggccgagcgcagaaagcacctggaagaagtgctggagatgaagcaggaagccttactggcagcaatatctgaaaaagacgcaaacatcgctttgctagagctgtcttcaagcaagaaaaaaacccaagaagaggtggccgccctcaagcgagaaaaagaccggctggttcagcagctgaagcagcagacccagaatcggatgaaactcatggcagacaattatgaagacgatcacttcaagagttcgcacagcaaccagacaaaccacaagccctcaccggaccaaataattcaaccacttttggaacttgaccagaacaggtcaaagttaaaactttacatcggccatctgaccaccttgtgtcacgatagggatcctctgatccttagaggacttacaccccccgccagttacaacctcgatgatgaccaggccgcatgggaaaacgagttgcagaagatgactagaggccagctacaagatgaacttgagaagggcgagagagacaatgccgaactgcaggaatttgctaacgcaatcttgcagcagattgccgatcactgcccagatatcctagagcaagtggtcaatgcccttgaggaaagctcttag

SEQ ID NO: 25042 - DNA, 1233 bp, synthetic construct
  source 1..1233: mol_type = other DNA; note = Synthetic coding sequence
atgcagaacatccacggcaaggagatcgacctgctgcggaccaccgtcaaagtaccagggaagaggctacctcgcgctactcccgccacagcgccaggaacttcgcctagagccaatggcctcagcgttgaacggtcaaacacacagctgggcggaggcaccgcctccgggcccgccgaagtcttatcatcatctccaaagttagatcctcctccatccccacattctaataggaagaaacatcgccggaaaaagagtacagggacgccgagacctgatggcccgagcagcgctaccgaggaggcagaggagtctttcgagtttgtggtcgtctcactgactggtcagacttggcacttcgaagcctccacagccgaggagagggaactgtgggtgcagagcgtacaggcacaaatactagcgtcattgcaggggtgccgctccgctaaagataaaacacgcttgggtaaccagaacgcggctttggccgtccaggccgtgagaactgtgagggggaactctttctgtatagactgcgacgcccccaaccctgactgggcctcacttaacctcggcgcacttatgtgcattgagtgttctggcattcatagacacttgggagcccacctcagccgggtgaggtctttggacttggatgattggccccccgaattgctcgccgtcatgaccgctatgggaaatgccctagcgaatagtgtgtgggagggcgcgctgggggggtattccaagcctggtccggacgcctgccgagaggagaaggaacggtggatacgggccaagtatgagcagaagttgtttttggccccactcccaagcagcgacgttcctcttggtcagcaattgcttagggcagtcgtggaagatgatctcaggctgctggtaatgctgctagcccatggctccaaagaggaagttaacgaaacgtatggcgacggagatggacgcaccgccctccatttaagtagcgctatggcaaatgtggtctttacccagctcctgatttggtacggtgtggacgtgcggagtcgagatgcaagaggacttacccctcttgcttatgccagacgcgccggatctcaagaatgcgccgacatcctgatccagcacggctgtccaggcgaaggctgcggtctcgcccccaccccaaatcgtgagcccgccaatggcactaacccttccgcggagctgcaccgttccccttctcttctgtag

SEQ ID NO: 25043 - DNA, 492 bp, synthetic construct
  source 1..492: mol_type = other DNA; note = Synthetic coding sequence
atgagcgacagccccgccggcagcaacccccggacccccgagagctccggcagcggcagtggcgggggaggcaaaagaccagccgtccccgcagccgtgagtctgctgcctccggctgacccactccgacaggctaatcgccttcctatacgcgtgcttaaaatgctgtctgctcacactggccatttgctgcatccagagtacttacagcctttgtccagtacgccagttagcccaatcgaactcgatgccaaaaagagccccctggcgctcctggcccagacatgtagtcagatcggctcccctgggagccttagcctacgaaacccccatacattaggcttgagccgttatcacccatacgggaaaagtcatctgtctaccgcggggggcctcgccgtgccatccttgccaactgccgggccttattacagtccctatgccctgtatgggcagagactagccagcgcttcagcattggggtatcaatag

SEQ ID NO: 25044 - DNA, 2736 bp, synthetic construct
  source 1..2736: mol_type = other DNA; note = Synthetic coding sequence
atgaacttccaggccggcggcggccagagcccccagcagcagcagtctctagccgcccccggcggcgggggagctgcagctcagcagctggtctgcggtggtcagtttggtggcgctggtcccggtgccggcgggggaggaggcccatcccagcaacttgccggcggacccccgcagcagtttgccctatctaattccgccgccatccgggctgaaatccagcgctttgaatctgtgcatcccaacatctacgctatttatgacctaatagaacggattgaagacttagctctgcaaaaccagattcgtgagcatgtcatcagcatcgaagattctttcgtgaacagccaggagtggaccttgtcccggtccgtacctgagctcaaagtgggaatcgttggaaacctgagcagcggcaagtctgcccttgtgcaccgatatctgacagggacttacgttcaggaggaaagtcctgaaggaggcaggttcaaaaaggagattgtcgtcgacggtcagtcctatctgcttctaataagggatgaggggggacctccagagctacagttcgctgcgtgggtggacgcagtggtcttcgtcttctcacttgaggatgaaatctccttccagacagtctacaactacttcctgcggttatgttcctttcgaaacgcatccgaagtcccgatggtgttagtgggcacccaggatgccattagtgctgctaaccctagagtcatcgacgacagcagggccagaaagctttccaccgacctgaaacgctgtacctactatgaaacatgtgccacatacggcctgaatgtggaaagggtcttccaagacgtggcacaaaaggtggtagccctgagaaagaagcagcaactggcaatcgggccttgtaaatctctgcctaactcaccaagccactccgccgttagtgctgccagcattcccgccgttcatattaaccaggccaccaacggtggcggctcagccttcagtgattacagctccagcgttccctctacgccgtccatttctcagagggaattacggatcgaaaccattgcggccagtagtacgccaaccccaatcagaaagcagagcaaacgtcggagcaacattttcacaagcagaaagggagctgacttggatcgagaaaaaaaagccgctgagtgcaaggttgactctattggttctggcagggccatccctatcaagcaaggtatcctgctaaagcgctcaggtaaatccctaaacaaagagtggaaaaagaaatacgtgacactgtgtgataacgggctcctgacctatcatcccagcctgcacgactatatgcagaacatacatggaaaggagattgatctattgcgtacgacagtgaaagttccaggcaagcgtcttcctcgggcgaccccggccacagcacctggtacatcccctcgggctaacggcttgagcgtcgagcgcagtaatactcagctggggggcggcacgggagctccgcatagcgcgtcatctgcgtccctacacagcgaaagacccctgagctcaagtgcttgggcaggcccgagaccggaaggccttcaccaaagaagctgctctgtgagcagcgccgatcagtggtccgaagctaccacttctttgcccccgggcatgcagcaccctgccagtggtcccgctgaagtgctgtcttcaagtccaaagctggaccctcctccttcccctcacagcaatcggaagaagcaccgccgaaagaaaagcaccggaacacccaggcccgacgggccctcttctgctactgaagaagctgaggaatccttcgaattcgtggttgtgtctctgactggccagacctggcatttcgaggcttctaccgcagaggagagggaactgtgggtacagagtgtacaggctcaaattctggcatctcttcaaggatgccgctctgcaaaagacaagactcggcttggcaatcagaacgccgccctagccgttcaggctgtccgaacggtgcgcggtaactctttttgcatagattgcgatgcacccaaccccgattgggcttccctgaatctaggagcccttatgtgtatcgagtgtagcggcatccacaggcacctgggagcacatctgtcccgggttcgttccctggatctggacgattggcctcccgagctgttggccgtgatgactgcgatgggcaacgccctcgccaatagtgtatgggagggcgcgctggggggatacagcaagccaggaccagatgcatgccgagaggagaaggagcggtggatccgagccaaatacgaacaaaagctgtttctggctcctttgccttccagtgacgtacctctggggcagcagctgctgcgtgcggtggtagaggacgacctgaggctgcttgttatgctgctggctcatggctccaaggaggaagtgaatgaaacctatggagatggcgatgggaggactgccctgcatctgtcaagtgcgatggctaatgtggtatttacccagctcctgatttggtatggggtagatgttagatctcgagatgctaggggactaactcccctggcctatgcacgtagggccggatctcaagagtgcgccgacatcctgatccagcatggctgccccggcgagggttgtgggctcgcccctacgccaaatcgggagcctgccaacgggaccaacccctcagcggagttgcatcggtccccctcgctgctgtag

SEQ ID NO: 25045 - DNA, 1059 bp, synthetic construct
  source 1..1059: mol_type = other DNA; note = Synthetic coding sequence
atggacatcgacaaggacctggaggcccccctgtacctgacccccgaggggtggagcctgttcctacaacgctactaccaggtggtacatgagggagctgaattgcggcatttggatacccaggtccagagatgtgaggacatactgcagcagctgcaggctgtggtgccacagattgatatggagggagaccgtaacatttggatagtaaagcccggggccaagtccaggggacggggtatcatgtgtatggatcatctggaggaaatgttgaaattagtgaacgggaatcctgttgtgatgaaggatggaaagtgggtggtgcagaagtatattgagaggcctctattgatatttggaacaaagtttgatctgaggcagtggttcttagtcaccgattggaatcctttgaccgtgtggttctatcgggactcctatatccgcttttcgactcagccattttctctgaaaaatctggataactcagtgcacctttgtaacaatagcatccagaagcacctagaaaacagctgccaccgccatccccttctcccccccgataacatgtggagttcgcagaggtttcaggcccacttacaggagatgggagcacccaacgcttggtccaccatcattgtacccggaatgaaagacgcagtgatacacgcgctccaaacttctcaagatactgttcagtgcaggaaggcttcttttgagctatatggagctgattttgtgttcggcgaagacttccaaccttggttgatcgagatcaatgcctctccaacaatggccccttccactgcggttaccgcgcgtctctgcgcaggcgtccaggcggacacgctgcgggtcgtgatcgaccggatgctggatcgaaattgcgacaccggtgcctttgagctgatctacaagcagcccgtcacaacctcccctgcctcaacaccacgcccctcatgtctactcccgatgtattctgatacaagggcccggtccagcgacgatagcaccgcttcatggtgggctctgcgcccctgtagaccacaagcacgcccctag

SEQ ID NO: 25046 - DNA, 507 bp, synthetic construct
  source 1..507: mol_type = other DNA; note = Synthetic coding sequence
atgaccgccaccctgcggccctacctgagcgccgtgcgggccacccttcaggcagcactttgcctggagaacttcagctcacaagtggtagagaggcataataaacccgaggtggaagtacgctcaagtaaggaactcctccttcaaccagtgacaatctctagaaatgagaaagagaaggtattgatcgagggctctattaattccgtccgggtgagtatcgccgttaagcaggccgacgagattgaaaaaatattgtgtcataaattcatgagattcatgatgatgcgtgcagagaacttcttcatcttacgaaggaagcccgtggagggctatgacatttctttcctcataacaaacttccatacagagcagatgtacaagcataagctcgtcgactttgtaatacactttatggaggaaatcgacaaggagatttctgagatgaagctgagtgtgaacgctcgggcccggatcgttgctgaagagtttctgaaaaacttttag

SEQ ID NO: 25047 - DNA, 993 bp, synthetic construct
  source 1..993: mol_type = other DNA; note = Synthetic coding sequence
atggagcggttcatggagcaggtggtgttcaagtacctgcgggccgaaccagaagatcactatttcctgatgacagagcctcctctcaatactcccgagaatagggaatacctggcagaaataatgttcgaaagcttcaatgttcccggcctctacatagctgtgcaagcagtgctcgctcttgctgccagttggaccagtcgacaggtgggcgagcgtaccctgacgggtattgttattgacagcggggacggagttacacacgtgataccagtcgctgaggggtatgtaatcgggtcatgtatcaaacatatcccaattgccggccgcgacatcacctactttattcagcaactcttacgtgagcgcgaggttggtatcccgccggagcagtctctcgagactgccaaggcgattaaggagaaatactgttacatctgtccggacatcgtcaaggaatttgccaagtatgatgtcgatccgcggaagtggattaagcagtacacaggcattaacgcgatcaatcagaaaaaattcgttattgacgtgggttacgaacgctttctgggccccgagatttttttccaccctgagtttgctaacccagattttatggagtccatcagcgatgtcgtggatgaggtgatccaaaactgccctatagatgtccgcagacccctctacaaaaacgtggttctgagtgggggcagcaccatgtttagagattttggacgcaggctgcagagagacctgaaacgggttgttgacgcgcgtctccgactgtcagaagagttaagtggcggccgcatcaaaccaaaaccagtggaggttcaagtggttacccaccacatgcaacggtacgccgtgtggtttggagggtctatgctagccagtacacctgagttcttccaggtgtgccacaccaagaaagactatgaggaatatggacctagtatctgccggcacaatccagtgtttggcgtaatgagctag

SEQ ID NO: 25048 - DNA, 894 bp, synthetic construct
  source 1..894: mol_type = other DNA; note = Synthetic coding sequence
atgaagaccctgagccccgaccggatccagccccacatcatgaccgacgtgcctgcaacatttacacaggccgaatgtaacggcgataaaccacctgagaacggccaacagacaatcacgaagatctccgaggagctgactgatgtcgactcacccctgccacactatcgagttgaaccctccctggagggcgcgctcactaagggatcacaggaggaacggcgcaaactacaagggaacatgctactaaactccagtatggaggataagatgctgaaggaaaatccagaggagaagctctttatcgttcataaggctattactgacttgagtttacaggagacttcggcggacgaaatgacattccgcgaaggccaccagtgggaaaagatcccccttagtggttcaaaccaagaaattagaagacagaaagagcgcattacagaacagccacttaaagaagaggaagacgaagaccgaaagaataaaggacaccaggctgctgaaattgaatggctcggatttcgaaagccctcccaggcagatatgctacattcaaagcatgacgaggagcagaaggtctgggacgaggagatcgatgacgatgatgacgataactgcaataatgatgaggacgaggtgagggtcatcgagtttaaaaagaagcatgaagaggtttcccagttcaaggaagagggcgatgcatctgaggacagtcccctcagcagcgcctcgtcccaggcggtaaccccagacgagcagcccacactggggaaaaaatccgatatctctagaaatgcatatagtagatataatacaatctcctatagaaagattaggaagggcaataccaagcagaggatcgacgaatttgagagcatgatgcacctgtag

SEQ ID NO: 25049 - DNA, 1074 bp, synthetic construct
  source 1..1074: mol_type = other DNA; note = Synthetic coding sequence
atggtgcagcccttcaccaccatccccttccccccccccccccagaacggaatacccaccgagtacggagttccgcacactcaggattacgccggacagaccggggagcacaatttaacactgtacggaagtacccaagcacacggagagcagagttccaacagtccctccacacagaacggctctctgacgcagactgagggtggtgctcagaccgacggacaacagtcccagacacagtcctccgaaaacagcgaatcgaagagtactcctaagcgcttacacgtgtcgaacattccttttcgatttagagatccggacctgaggcagatgtttgggcaattcggcaagatcttggatgtcgagatcatcttcaacgagagagggagcaaggggtttggtttcgtcacgttcgaaaattccgccgacgccgatagagcgcgggagaaactgcatggaacagtggtggagggtaggaaaatcgaggtgaataatgccaccgcaagggtcatgacaaataagaaaatggtgacaccatacgccaacgggtggaagttgagccctgtggtgggcgccgtgtacgggccggaactgtacgcagctagttccttccaggccgacgtctccttgggcaacgatgctgctgtccccctctccggcaggggcgggatcaacacatacatccctctcattatcccggggttcccctacccaacagcggctactactgccgccgcgttcagaggggcgcatttgagaggccgcggacggacggtctacggtgcagtgagggccgtacccccaacagcaattcccgcttacccaggcgtcgtctaccaggacggcttttacggcgccgatctatacgggggatacgcagcttatagatatgcccaacctgccaccgcgacggccgctaccgccgctgccgcagcagccgccgcttactctgatggctacgggagggtgtatacggccgatccttatcatgccctggcccctgcggcctcttatggcgtgggggcagtcgcttccctgtaccgtgggggatatagcagatttgccccctactag

SEQ ID NO: 25050 - DNA, 387 bp, synthetic construct
  source 1..387: mol_type = other DNA; note = Synthetic coding sequence
atggtgcagcccttcaccaccatccccttccccccccccccccagaatggaatccctacagaatacggtgtccctcatacccaggactacgcaggccaaaccggtgagcataacctcacgctgtatggcagcacacaagctcatggggaacagagctctaactctccaagcacccagaatggatctctaacaactgaggggggggctcaaactgacggacagcagagtcaaacccagagtagcgagaactcagaatctaagtccacccctaaaaggttgcatgtatccaacatcccatttagattcagggaccccgaccttagacaaatgtttggatttggcaagattctggatgtggagattatctttaatgaaagaggtagctag

SEQ ID NO: 25051 - DNA, 1071 bp, synthetic construct
  source 1..1071: mol_type = other DNA; note = Synthetic coding sequence
atgcagggcatcctgctgctggtgttcgccaagtaccagcacctgccttatatccagattctttctaccaaaagcactcccaccggtctctttggctattgggggaacaaaggaggcgttaacatttgccttaagctgtacggttactacgtgagcatcattaactgccacctacccccacacatatctaacaactatcagcggctggagcactttgacaggatcctggagatgcagaactgtgaaggccgggacatccccaacattctggaccacgatctgatcatctggtttggagatatgaatttccggatagaagattttggcttacacttcgtgcgagaatctatcaagaaccgttgctacggaggcctgtgggagaaggaccagctgagtatcgcaaaaaagcacgacccgttgctccgcgaattccaagaggggcggctcttgtttcctccaacctacaagttcgatagaaactctaacgactacgacacctccgagaaaaagcggaagccagcctggaccgaccggattttgtggaggcttaagaggcaaccatgcgccggccctgacacacctattcctccggcttcacatttctccctgtctttgaggggctatagtagccacatgacgtacggcatcagtgatcataagccagtctccggcaccttcgacctggagctgaagcccctggtctcagccccacttatagtccttatgcccgaagacttatggacagttgagaacgatatgatggtgagctacagttcaaccagtgattttccctcaagtccatgggactggattgggctgtacaaggtggggcttagagacgtcaatgactatgtgtcatacgcctgggtgggggactctaaagtgagttgttccgacaatctcaaccaggtttatatcgacatctccaatattcctacaactgaagatgaatttcttctgtgctactattctaactccctgcgttccgtagtgggcatatccaggcccttccaaatcccccctggatcacttagagaagatccactcggcgaagcccagccccaaatttag

SEQ ID NO: 25052 - DNA, 1752 bp, synthetic construct
  source 1..1752: mol_type = other DNA; note = Synthetic coding sequence
atgctgagcgagagcaaggagggcgaggagaaggaggaggtgaccatggacacaagcgagaataggcccgagaacgacgtgcccgagcccccgatgcccatcgccgatcaggtaagcaacgacgaccggcctgagggatctgttgaggatgaggaaaaaaaagagagctccctacctaaatctttcaagaggaagatttctgtcgtatcagcaaccaagggcgtacctgctggcaatagcgacaccgagggcggccaacctggccgtaagaggcgatggggcgcgtcaaccgccaccacacagaagaaaccctcaatctccatcaccacagaaagtctcaaatctctcatcccggatataaagccgctcgcaggtcaggaggccgtggtggaccttcatgctgacgattcacgaatttctgaggacgagacagagcgaaacggggacgatggaacacatgacaagggtctcaaaatctgcagaacagttactcaggtggtaccggctgagggccaggagaatggacagagggaggaagaagaggaagagaaggaacctgaggctgaacctcctgtacctccccaggtgtctgtcgaggtggcccttcccccccctgccgagcacgaggtcaagaaggtgacactgggggacactttgacccgaaggagtattagtcagcagaaatctggagtttctatcaccattgacgaccccgtgagaaccgctcaggtcccatctccacccaggggaaagatctcaaatatagtacacataagtaaccttgtcagacctttcacacttggtcagctgaaggagctgcttggaaggacaggaaccctggtggaggaagccttctggattgataaaataaaatcgcactgttttgtgacttactccactgtggaggaggcggtagctacaaggacagctctgcacggtgtgaaatggcctcagagcaatccgaagtttttatgtgctgattatgccgagcaagatgagctggactaccatagggggctcctggtcgaccgaccgtctgaaacaaagactgaggagcagggtatcccacgcccacttcacccacctcctcccccacctgtgcagcccccacagcacccacgtgccgagcaaagagaacaggaacgcgccgtcagagagcaatgggcggagagggagagagagatggaacggcgcgagaggacacggagcgagcgtgagtgggaccgcgataaagttcgagagggaccacgcagtcggagtagatcgcgggataggcggcggaaagaaagagcaaaatccaaggagaagaagtccgagaaaaaagaaaaggcacaagaggagccacctgcaaagctcctcgacgatctgttccggaagaccaaagctgctccctgtatctattggcttccgctgacagatagccagatcgtgcagaaggaagccgagagggccgagagagctaaggaacgggaaaagagacgtaaagaacaagaagaggaggaacagaaggagcgcgaaaaagaagccgaacgagaacgtaatcggcagttagaacgcgagaaacgaagagagcactctcgagaacgggaccgtgaacgcgaaagagagagggagagggacagaggcgacagagaccgggaccgggagcgggaccgggagcggggcagggaacgcgatcgtcgtgacactaagcgccactctcggtccaggtcgagaagtactcccgtgagagatcgcggaggccggcgctag

SEQ ID NO: 25053 - DNA, 1329 bp, synthetic construct
  source 1..1329: mol_type = other DNA; note = Synthetic coding sequence
atggccaacagcttcgccgcccggatcttcaccaccctgagcgacctgcaaacaaatatggcgaatctcaaagtgattgggattgtgatcggaaaaaccgacgtcaagggctttccggatcgcaagaacatcggttcagaacggtacactttttcattcactattagagattcacccgcacactttgtgaatgccgctagttggggtaacgaagactacataaaaagtctttccgacagttttagggtcggagattgtgtgatcatcgagaatccactgatacagaggaaagagatcgagcgtgaagagaagttttcgccagccactccctctaattgtaagctccttctctcggaaaatcactccacagtgaaggtctgttcctcctatgaggtggataccaaactgctctcactgatccatcttccagtaaaggaaagccatgattactacagcctcggcgatatagtagctaatggacacagcttaaacggaagaattatcaatgtgctcgccgcagtgaagagtgtgggagaaccaaaatacttcactacatctgaccgacgcaaaggacagagatgtgaagtgcggctctacgacgagactgagagttccttcgctatgacatgctgggataacgagtcaattttgcttgctcaatcatggatgcctagggagaccgtgattttcgcctccgatgttcggataaacttcgataaatttcgtaattgtatgaccgcaaccgtcatctccaagactatcattaccacaaatcctgacattcccgaggcaaatatcctgctgaatttcataagggaaaataaggagacgaatgtgcttgatgacgagatcgacagttacttcaaggagtctattaatctgtccacgatcgtggacgtctacaccgtcgagcaattaaaaggaaaagctctcaagaacgaaggcaaggcagacccgtcctacggaatcctttatgcctatatatcaaccttaaacattgacgacgagaccaccaaggtcgttcggaacaggtgcagctcctgcggctacattgtcaatgaggccagtaatatgtgtactacttgtaacaaaaattcgctggattttaaatcggtctttctctctttccatgttctgatcgatctcacggatcacaccgggaccctgcattcctgttcattaacgggctccgttgctgaagagacactgggctgcacattcgtgctgtcccacagagctcgctctgggcttaagatctccgtcctctcctgcaaactggccgaccctacagaggctagtaggaacctttcaggccagaaacacgtgtag

SEQ ID NO: 25054 - DNA, 627 bp, synthetic construct
  source 1..627: mol_type = other DNA; note = Synthetic coding sequence
atggccggcaccgcccggcacgaccgggagatggccatccaggccaaaaaaaaactgacaactgcgacagacccgatcgagaggttgcggctgcaatgcttagcacggggatccgccggcattaaaggtttaggacgggtcttccgcatcatggatgatgataataacaggacattggatttcaaagagttcatgaagggtttgaatgactacgctgttgtcatggagaaagaagaggtcgaagagttatttcgccggttcgataaggacggcaacggaaccatcgatttcaatgagtttctgttgacgctccgcccacccatgagccgtgctaggaaggaagttattatgcaggcattcaggaagctcgataagactggagatggagttatcaccatagaagacctccgggaagtatacaatgcgaaacaccacccgaagtaccagaatggcgagtggtcggaggagcaggttttccgaaagttcctagataactttgactccccctatgacaaggacggactggtgactcctgaggagtttatgaattattacgcgggggtatcagccagcatcgacaccgacgtgtactttataattatgatgagaaccgcctggaagctgtag

SEQ ID NO: 25055 - DNA, 627 bp, synthetic construct
  source 1..627: mol_type = other DNA; note = Synthetic coding sequence
atggccggcaccgcccggcacgaccgggagatggccatccaggccaagaagaagctaactacggctaccgaccccatcgagcgcctccggctgcagtgcttagccaggggtagtgctggcataaagggactgggacgagtgttccgcataatggatgatgacaacaataggaccctagacttcaaagaatttatgaaagggcttaatgactatgcagtggtcatggagaaagaggaggtggaagaactgttccgccgattcgataaggatggaaacggaaccatcgattttaatgagtttctgctcaccctgagaccccctatgtcaagggcacgcaaggaggtgattatgcaggcctttcgcaagcttgacaagaccggagatggagtgatcaccatcgaggatctgcgtgaggtctacaacgcgaagcaccaccctaagtatcagaatggtgaatggagtgaggaacaggtattccgcaagttcctagataatttcgactccccctatgataaagacggactagtgactccagaggagtttatgaattactatgcaggtgttagcgctagtatcgacactgatgtctatttcatcatcatgatgcggactgcttggaaactgtag

SEQ ID NO: 25056 - DNA, 789 bp, synthetic construct
  source 1..789: mol_type = other DNA; note = Synthetic coding sequence
cacagctacagcgagggcctgggccacccccgggtgagccaggccctggtgacctttcatcagcagaagccaattgagccaagacgcgagctcctgacacagccctgccgacaaaaagatccagccaacgtggattacgaagatctttttctttactcaaatgctgtcgcagaggaagctgcttgtccagtaagtgctcctgaggaggcttctcccaaacctgtgttgtgtcaccagtcaaaagagagaaagccctccgccgagatgaatcggatcacgaccaaggaagccacttcctcttgcccacccaaatcaccactcggggaaacacgccagaagttatggaggtctttgaaaatgcttcccgaacgaggacagagggtgaggcagcagaagagtcatctcgcaactgtgaacctgagttcacttctcgacgtgagaagaagcacagtgataagtgggcctggcacgggtaaagggagtcaggaccactccggggaccctacgtctggtgacagaggttatacagatccttgtgtcgccactagcttaaaatcaccaagccagccacaggcccccaaagataggaaggttccaactcggaaagctgagagatcagtcagctgtatcgaagtgaccccgggcgataggagctggcaccaaatggtcgtgcgcgccctttccagccaggaatctaaaccagagcatcagggattggctgaaccagagaacgaccagctgcccgaggaataccagcagccccctccatttgcacccgggtattgttag

SEQ ID NO: 25057 - DNA, 1941 bp, synthetic construct
  source 1..1941: mol_type = other DNA; note = Synthetic coding sequence
atgagctacaccggcttcgtgcagggcagcgagaccaccctgcagtccacatacagcgatacttcggcccagccgacctgtgactacggttacggcacttggaactccggcaccaatagaggatacgaagggtatggttatggttacggctacggccaggacaacacgaccaattacggctatggcatggcaacctcacatagctgggaaatgccttcatccgatactaacgccaatacaagtgcgtccggcagtgcctcagcagattctgtcttatcccgcataaaccagaggctcgatatggtgcctcaccttgagaccgacatgatgcagggaggcgtctatggctccgggggggagaggtacgatagttacgagtcctgtgacagccgagcggttctgtcagaaagagatttgtacaggtctggctacgactattcagaattggaccctgagatggaaatggcctacgagggccagtacgatgcttatcgcgatcaattccgaatgcggggtaacgatacgtttggaccacgcgcccagggctgggcgcgcgatgccaggtcagggcgacccatggccagcggatacggcagaatgtgggaggacccaatgggggccaggggccagtgcatgtcaggtgctagtcggctgccttcccttttctcgcagaatatcattcctgagtatggaatgttccaggggatgcgcggtggaggcgccttccccggagggtcgagattcgggttcgggttcggaaatggcatgaagcagatgcggcgtacgtggaagacatggacgaccgctgatttcaggacaaaaaagaaaaaacgaaagcaggggggctcccctgacgaaccggatagcaaagcaactcgaacagactgctctgataatagtgatagcgacaacgacgagggtacagaaggagaagctacagaaggattggagggaacagaagcagttgaaaaagggtcgcgagtcgacggcgaagatgaagagggaaaggaggacgggcgtgaggaaggtaaggaggacccggaaaaaggcgccctgactacacaagacgaaaatggacagacgaagcggaaacttcaggctggcaagaagtctcaggataagcagaagaaacgacaacgggatcgcatggtagagaggatacagttcgtttgctctctgtgtaagtatagaacattctatgaagatgaaatggcgtctcatctggacagcaagttccacaaggagcatttcaaatatgtcgggacgaagctgccaaaacagaccgctgatttcctccaggagtacgtgaccaacaaaactaaaaagactgaggaactccggaaaaccgtggaggacctggacggcctgatccatcagatctatagagatcaggacttgacccaagagatcgcgatggagcacttcgtgaaaaaagtggaagcagcacactgcgcagcttgcgatctgtttatccctatgcaattcggcatcattcagaaacatctgaagaccatggatcacaaccgcaaccggagactgatgatggagcagtcaaaaaaaagctctctgatggtggccagatccatcctgaataacaaactgatatcaaaaaagctcgaacggtatttgaaaggagagaatccttttactgacagccctgaagaagaaaaagagcaggaagaagccgaaggcggggcactggacgagggagctcagggcgaggccgcaggcatatccgagggcgcagaaggagtgccagcccagccccccgtcccccccgagcccgctcccggcgctgtaagccctcccccaccacctcctcctgaagaggaagaagagggagccgttcccctcttggggggagctttacagagacagatccggggtatccccgggctggatgtcgaggacgatgaggagggggggggaggcgctccttag

SEQ ID NO: 25058 - DNA, 1401 bp, synthetic construct
  source 1..1401: mol_type = other DNA; note = Synthetic coding sequence
atgcggggccccaacagcggcaccgagaagggccggctggtgatccccgagaaacagggattcgattttctctgtatgcccgtgttccatcctcggtttaaacgggaattcatccaggaacctgcgaaaaatcgccccggtcctcaaacaaggtcagatctgcttttgtccggacgggattggaatactctcatcgttggtaagctgagtccctggatccgtcccgattccaaggtggagaagattcggagaaacagtgaggcactggaagtacagtttattattacgggcacaaatcaccactccgagaaggagttctgcagctatttacagtacttagagtacctatctcaaaataggccacctcctaacgcttacgaactgttcgccaaggggtacgaggactatttacaatccccgctgcagcccctgatggacaaccttgagagtcaaacttacgaggtgttcgagaaagaccctatcaaatattctcagtaccagcaggccatttataaatgtctgctggaccgagtcccggaagaggagaaagataccaacgtgcaagtgctgatggtgcttggggccggcagaggtcccctcgttaatgcgtccctccgcgctgcaaagcaggccgatagacgcattaaattatatgctgtagaaaaaaatcctaacgccgtcgttacgctagagaattggcaattcgaagaatggggatctcaggtcaccgtagtttccagtgacatgcgcgagtgggttgcacccgagaaggccgacatcattgtaagtgagttgctgggaagtttcgcggacaatgagttgtccccagaatgccttgacggcgcacagcactttctgaaggacgatggagtgtctattccaggagaatataccagctttctagctccaatctccagttccaagctgtacaacgaggtaagagcctgccgagagaaggacagggaccccgaggctcagttcgagatgccttatgtcgtgaggctgcataactttcatcagctgtcggcgcctcagccatgcttcacatttagccatccgaatcgggatccgatgattgataataacaggtattgtacactggagtttcctgtcgaggtaaacactgtcttacacggttttgccggatatttcgaaacggtgctttaccaggacatcacattgagcattcgcccagagacccactcaccaggcatgttctcttggtttccaatcttatttccgatcaagcagcccattaccgtccgggaagggcagacgatctgcgtcaggttctggcgatgcagcaattccaagaaagtgtggtatgagtgggcagtgaccgcgcctgtgtgttccgccatccacaacccaacagggaggtcctacacgattggtctctag

SEQ ID NO: 25059 - DNA, 1863 bp, synthetic construct
  source 1..1863: mol_type = other DNA; note = Synthetic coding sequence
atgcggggccccaacagcggcaccgagaagggccggctggtgatccccgaaaagcagggctttgattttctgtgcatgcctgtctttcacccacggtttaaacgagaattcattcaggaaccagcaaagaacagacccggccctcagacgcggtccgatctgcttctcagtggcagggactggaacaccttaatagtggggaaactctccccatggattagacccgattctaaagtggaaaagataaggaggaactctgaagctgctatgcttcaggagctgaatttcggggcctacctcggactccccgcatttctgctgccactgaaccaggaagacaacaccaaccttgccagagtactgaccaaccacattcacacaggacatcacagctctatgttctggatgcgggtccctctggtggctcccgaggaccttcgagatgatatcatcgagaacgctccaaccacccacacagaagaatatagcggagaagagaaaacatggatgtggtggcacaatttccgcactctctgcgattacagtaaaagaattgccgtcgcactggagataggagctgatctgcccagtaaccacgtgatcgaccggtggttaggcgaacctataaaggcagctattctcccaaccagtatttttctgaccaataagaagggattcccagtgttgagcaagatgcaccaacgcttaatcttccgcctgctgaagctggaagtgcaattcatcatcaccgggacgaaccatcactctgagaaagagttttgtagttacctccaatatcttgagtacctctcacagaaccggccaccccccaacgcctatgagctgtttgcaaagggctatgaggactatttacagagccccctgcagcctctcatggacaaccttgagagtcagacatatgaagttttcgaaaaagaccctatcaagtacagccagtaccagcaggcaatctacaagtgtttattagacagagtgcccgaggaagagaaggataccaacgtgcaggtactcatggtgttgggggctggacggggccccttggttaacgcttcactacgtgccgcgaaacaagctgatcggcggatcaagctgtacgccgtggagaagaatcccaatgccgtcgtcacactagagaattggcagtttgaggaatggggatcccaggtgaccgttgtgtcctccgatatgcgagagtgggtggcccccgaaaaggctgatatcatagtgagcgaactcctgggctcattcgctgataacgagctgtccccagaatgtcttgacggcgcccagcatttcctcaaggatgatggtgttagtattccaggagagtatactagcttcctcgcccctattagttcttcaaagctgtacaatgaagttagagcatgcagggagaaggaccgcgaccctgaagctcagttcgaaatgccttatgtggtgcgcctgcacaattttcatcagctttccgctccacagccatgttttactttctcccatccaaaccgtgaccctatgatcgacaataaccggtattgtactctggagttccctgtggaggtgaacacggtgctgcacggctttgccggttacttcgagactgtgttgtaccaagatatcaccctcagtattcgacccgagacccacagtcctggaatgttcagctggttcccaatcctgtttccaatcaaacaacctattacagtgagagagggacagactatatgtgtgaggttctggcggtgttccaattctaagaaggtctggtatgagtgggctgtcactgcgccagtttgctcagcaattcataacccaaccgggagatcttacacgatcggtttgtag

SEQ ID NO: 25060 - DNA, 2271 bp, synthetic construct
  source 1..2271: mol_type = other DNA; note = Synthetic coding sequence
atgcccagcgtgagcaaggccgccgccgccgccctgagcggcagccctcctcagacagagaaaccgactcattacagatacctgaaagagttcaggacagagcagtgcccccttttctcccaacataaatgtgcccagcacaggccgtttacctgcttccattggcatttcctgaaccagagacgacggcgtcctctgaggagaagggacggcacattcaattactcgcctgatgtgtactgctctaagtacaacgaagcgactggcgtttgccctgatggcgatgaatctctgctaggagtgttatatcccctctgggcccccccccccgtccctgcccccgtgggcgctcccactgttcatcccttcctcgccaggtggtttagccatgtgccctgggagcctgccggctccgcagaccctagagccagctcaactcccgcaggcgggacaacatgggctaccggactgctgggagactttgacgcctgtggatcacagtccagagagtgtgtaaagggcgtctggtggactttgctaggattccgatgcccgtacctgcatcgcacaaccggagatacggaacggaagtaccacttgcggtactacaagactggcacatgtatccacgaaaccgacgcaagggggcactgtgtgaagaacggccttcactgcgcattcgcacacgggccattagacctgcgcccccccgtctgcgacgtgcgggaacttcaggcacaggaagcactccagaatggtcagctaggaggcggagaaggagttcccgatttgcaacccggcgtactggctagtcaggccatgatcgagaaaatactgagcgaggatccccgctggcaggcattgctgcccgtagcgctactgcggcaccgagtggcgcacttttcggacgcaaattttgtcctcggaagctacaagaccgaacagtgcccaaagccgccaaggctgtgcagacaggggtatgcttgcccccactaccacaatagtagggaccgccgcagaaatcccaggcgattccaataccgcagcacaccatgccctagtgtgaaacacggggacgagtggggcgagccttcacgctgcgatggcggtgacggatgccagtattgccactccagaactgaacagcaattccatcccgagggcccagttgggagccctgtgtcgggcgccttctcggttttttcacatgcaggactagtggctgacccatctctgtggtaccccgccgagtggagctggcatcatgtggggcacagccggacaattaaccccgagggggataaaccttctcgccttggccccgctccagaaaacattaagcgcggcaatgatttcgcctgcgatggacgcgcagacgctgcaggaatggccccacacgtgtgtgtcttccccatctacaaatccacaaagtgtaatgatatgagacagactggctactgccctcggggacctttttgtgcttttgcccacgttgagaagtccttaggaatggtaaatgagtgggggtgccatgacctgcacctaacaagcccttcaagcacagggagcggccagcccggaaatgccaagagacgggattcccctgcggagggagggccccggggaagcgagcaggactctaaacagggagtgcgggcccatggagtctacgtgttcgagcagaaccacctagctgtgttcgctgcagtgcatcctccagcaccatccgtttcatcttcagtagcatccagcctggcatcatctgctggatcaggctcatctagccccaccgcactcccagcgccccctgccagggctctgccactgggtccagcctcttctactgtcgaggctgtgttggcccttgagcccacaccctcttcccctactagctccgcagtacagggcgttgctggcgagctggggatgggttccggagggcagggctgttggtctcacgtggttggcgccctggcggcagttcccgcttggactcacagcggggacctcgaatgggatcctagcacaattaggaccagagtaaatgtgggtggcgggcccgctgcaagacccgcaatgaccctggcccgtgaaccccagctcttggtggtgggtggatgtcccacccggaattgttccggcccagctgcgagccctcagcagctgctcgatgacgccggccaggggggccgcggcgaacgagactcctctcaaaggcccctgcgcccacagactacccacagacaagatacaaggccggtgccatcttag

SEQ ID NO: 25061 - DNA, 549 bp, synthetic construct
  source 1..549: mol_type = other DNA; note = Synthetic coding sequence
atgacccccccccagcagcccccccccctgcggagcgagcccggcaccctcgggagcgccgccagcagctacagtcctttgggacttaacggggtacctggcagcatctgggactttgtgtccggatccttttctccgagccccagcccgattttgtccgctggacctcccagctcaagctcggcctctccgaacggtgccgagcttgcacgcgttagacgccaactggacgaggccaaacgcaaaattagacagtgggaagaaagttggcagcaagtgaaacaggtctgcgacgcctggcagcgcgaagcccaggaagcgaaagagagggctcgggtggcggattcggataggcagctcgccctgcagaagaaggaagaggtcgaggcgcaggtgatctttcagctgagggctaagcagtgcgtcgcatgcagagaacgcgcccacggagccgttctacggccatgccagcaccacatcttgtgcgaaccctgcgctgccacagccccagaatgcccgtactgtaaaggacagccactccagtggtag

SEQ ID NO: 25062 - DNA, 444 bp, synthetic construct
  source 1..444: mol_type = other DNA; note = Synthetic coding sequence
atggagggcgagcccccccccgtggaggagcggcggcggctgcaggaggaactgaacgagttcgtcgaaagtgggtgccggactctcgaagaagtgacagcttcgttagggtgggacttggactccctggatcccggtgaggaagaggcggccgaggacgaggtggtgatctgtccatacgattctaaccatcacatgccgaaatcatcactggcgaaacacatggccagctgcagactgcggaagatgggctacactaaagaagaggaagatgaaatgtacaacccggaatttttctatgagaacgtcaagattccatctatcactctgaacaaagatagccagtttcagatcatcaaacaggcacgaaccgctgtcggaaaagactcagattgttataaccagattatcggcgtctccatcaagagaaattacaagatctag

SEQ ID NO: 25063 - DNA, 522 bp, synthetic construct
  source 1..522: mol_type = other DNA; note = Synthetic coding sequence
atgggcaccttcgacctgtggaccgactacctgggcctggcccacctcgtgcgagcactgtcaggaaaagaggggcctgagacccgcctgagcccccagccggaacccgaacccatgctggaacccgaccagaaacggtcattggagtccagcccagcccctgagagactctgctcattttgcaagcacaatggcgaaagccgagccatctaccagagtcatgttttgaaggatgaagctggaagggttctgtgcccgatcctcagggattacgtctgtcctcaatgtggagccactcgggagagggctcacacccgacgtttttgcccactgaccgggcagggctatacttcagtttacagccacacgacaaggaactccgccggaaagaagctggtacgacctgataaggccaagacacaggacacaggacaccggcgcgggggggggggcggtgccgggttccgcggtgcaggtaagtcagaaccttccccttcttgctcaccttccatgtctacttag

SEQ ID NO: 25064 - DNA, 1722 bp, synthetic construct
  source 1..1722: mol_type = other DNA; note = Synthetic coding sequence
atgagcgccttctgcctgggcctggtgggccgggccagcgcccccgctgagcccgactctgcttgttgtatggagctgccagccgcggcaggcgatgcggtcagatctcctgcggctgctgccgccttaattttccctggcgggagcggcgagcttgaactcgctcttgaggaggagctggctctgctggctgcaggggagcgtccaagcgacccaggagagcacccacaggcggagcccggcagcctcgctgagggcgctggtccccagcccccccctagccaggaccctgaactgttaagtgtcatccgacagaaggaaaaggatcttgtattggcagctcggctgggaaaggcactcctggaaagaaaccaggatatgtcacgccaatacgagcagatgcacaaggaattgacagacaaactggagcatctcgaacaggagaagcatgagttacggcgcaggtttgagaaccgtgagggggaatgggaggggcgcgtgtcggagctcgagagcgacgtgaagcagcttcaggatgaactagaacggcaacaaattcacctgagagaggccgatcgcgaaaaaagccgagcagtccaagagttatctgaacagaaccagaggctgctggatcagttgtctagagcaagcgaggtggagcgacagctgtctatgcaggtacacgcattgcgtgaggacttccgggagaagaatagcagcaccaatcagcatatcattcgactggagagcctccaagcagaaattaagatgctctcagatagaaagagggagctggagcatcgtctgagtgcaactttggaggagaacgacttgctgcaggggaccgttgaggaattacaagaccgtgtgcttatcctcgaaaggcagggccatgataaggacctccagctgcatcagtcacagctggagctacaggaggtaaggctcagctgtcgccaactgcaggttaaagtggaggagctgacggaagaacggagcctgcaaagctcagccgcgacttccactagcctgttgagtgagatcgaacaaagtatggaggccgaggagttggagcaggaaagggagcagctcagactgcaattatgggaagcctattgccaagtgcgatacctgtgctctcatcttaggggcaatgatagcgccgactccgctgtttctactgactctagcatggatgagtcaagcgagacaagctccgcaaaggacgtcccagctgggtccctgagaaccgccttaaacgagctgaagcgcttgattcaaagtatcgtggatggtatggaaccaaccgtaaccctgctttctgtcgagatgacagccttaaaagaggaacgtgatagactgcgggtgaccagcgaagacaaagaacccaaggagcagttgcaaaaagctattcgggaccgcgacgaggccatcgcgaagaagaatgccgtagaactagagcttgcaaagtgcagaatggatatgatgtccctgaattctcagctgcttgacgccattcaacagaagctgaatttatctcagcagctggaagcttggcaagacgatatgcaccgcgtcatcgacagacagctgatggatacccacttgaaagagcggagccagcccgctgcagctctttgccggggtcactctgcaggccgcggcgatgaaccatccattgctgaaggcaagagactgttctccttcttccggaagatctag

SEQ ID NO: 25065 - DNA, 1086 bp, synthetic construct
  source 1..1086: mol_type = other DNA; note = Synthetic coding sequence
atggccctgaacgtggcccccgtgcgggacaccaagtggctgaccctcgaggtgtgtcgccaatttcagcgaggcacgtgttccaggtccgacgaagagtgtaaattcgctcatcctcccaaaagctgtcaggtagagaacgggcgagtgattgcttgtttcgactcactgaaggggcgctgctcacgggaaaattgcaaatatctccacccgcccacccacctgaaaacccaactggagattaatgggaggaacaatctgatccaacagaagacagccgctgctatgctcgcccagcagatgcagtttatgttcccaggaacccctcttcacccagtccctacctttcctgtgggccccgcgataggcaccaacaccgcaatctcgttcgcaccgtacctcgcccccgttacccctggagtcggtttggtgcctactgagattctgccgactactcccgttattgtccctggttcaccccccgtgacagtcccgggatccacagctacacaaaagctactgcgcacggacaagttagaggtctgtagggaattccagcggggcaactgtgcacggggagaaactgactgccggttcgcacaccccgcagacagcactatgatagatacctcagataatacagtgaccgtgtgcatggattacatcaagggaaggtgtatgagggagaaatgcaaatatttccacccgccagctcacctgcaagcaaagattaaggctgcacagcaccaggccaaccaggccgcagtcgctgcccaagccgccgccgctgcggccacagttatggcattccccccgggggccctgcaccccctgccgaagagacaggccctcgagaagtctaatgggacaagcgccgtgtttaatccgtctgtgctgcattaccaacaggcattgacctcagcgcagctccagcagcacgccgccttcataccaacagacaattccgagattattagcagaaatgggatggaatgccaggaaagcgctcttcgtatcactaaacattgttactgcacttactatcccgtgtcctcatccatcgaactcccacaaacagcatgctag

SEQ ID NO: 25066 - DNA, 3099 bp, synthetic construct
  source 1..3099: mol_type = other DNA; note = Synthetic coding sequence
atggccttcaccaactacagcagcctgaaccgggcccagctgaccttcgaatacttgcacacaaactcgaccacccacgagtttctgttcggggctctggctgagctcgtggataatgcacgcgacgctgacgctacgaggatcgacatctatgcagagcggcgagaggacttgaggggcggcttcatgctgtgtttcttagacgacggcgctggcatggacccctctgatgcagctagtgttatccagttcggcaaatctgccaaacgaacgcccgaatcaacccagatagggcaatatggcaatggcctgaaatcaggatctatgcgcattggaaaggatttcatactcttcactaaaaaagaggacacaatgacctgcctgtttttgtcacgaacatttcacgaggaagagggcatagacgaggtgattgtccctttacccacttggaatgcccgaacaagagaacccgtgactgataacgtcgagaagttcgcaattgaaaccgagttaatttacaagtattctcctttccgcacggaggaagaggtgatgacccagttcatgaagatccccggagattcaggaacactcgttattatctttaaccttaagctgatggacaacggagaaccggaactggatatcatttctaaccccagagatatccaaatggccgagacctctccagagggaaccaagccagaaaggcgttcttttagagcatatgctgcagtgctctacatagatcccaggatgcgaatcttcatccacggacataaggtacagaccaagcgactatcatgctgtctttacaaacctcgcatgtacaaatatacctctagtaggtttaagacccgagccgaacaagaagtgaaaaaagcagaacacgtggcccgaatcgctgaagagaaggccagggaagccgaatccaaagcccgcaccttggaagtgaggctgggcggagacctgaccagagactcccgcgtgatgctgcgccaggtgcagaacagagcaattaccttgcggagagaggcagacgtgaaaaagcggattaaagaagcgaaacagagggctctcaaggagcccaaggaattgaactttgtctttggcgtaaacatcgaacaccgtgacctagatggaatgtttatttacaactgtagcagactcatcaaaatgtacgaaaaggtaggcccacagctcgaaggtggaatggcatgcggaggagtcgtaggcgtggtcgacgtcccatatttagtgctggaaccaacccacaacaagcaggattttgctgacgcgaaagaatacagacaccttcttcgcgctatgggggaacacctggcgcagtactggaaagatattgccatcgctcagcgcgggattataaaattctgggacgagtttgggtatttaagtgccaactggaaccagcccccctcctccgagctccgttataaaagacgtcgcgccatggagatccccaccaccattcagtgcgacctctgtctgaaatggagaacacttccattccagctgtccagcgtcgaaaaagactacccggacacttgggtgtgcagtatgaaccctgaccctgagcaggataggtgtgaagcttccgaacagaagcagaaggttcccctgggcacattccgcaaggatatgaagacacaagaggagaaacagaaacagcttacagagaaaattcgtcagcagcaggagaagcttgaggccctgcagaaaacaactcctataagatcccaggcagatctgaagaagctgccattggaagtaaccacaagacctagcacagaagaacccgtgagaagacctcagcgccctaggagcccaccactcccggcagtgatcaggaatgcaccctctagacccccctcactgccaacccctagaccagcaagccaacctaggaaagcaccagtgatctcctccaccccaaagctccctgctttggccgctcgggaggaggccagtacttcacgcctgcttcagccacctgaggcccctcgtaagcccgccaacaccctcgttaagacagcctctcgccccgctccactggtccaacagctgagcccaagcctgttgcccaattcaaagtcacccagggaagtccccagtccgaaagttattaagacacccgtggtcaaaaagacagaatcgccaataaagctcagcccagcaacgccaagccggaaacggtcggtagctgtgtccgatgaggaggaggtggaggaggaagctgagcgtcgcaaagagcgttgtaagcgcgggcgattcgtggtcaaggaggagaagaaagattctaacgagttaagtgattcagcaggggaagaggattccgcggatctgaagagggcccagaaggataagggcctgcatgtggaggtgagagtaaatcgggagtggtataccggccgggtgacagccgtggaggtgggtaagcacgtcgtgcgctggaaggtgaaatttgattatgtgcccacagataccacacccagggatcgctgggtggaaaagggcagcgaggatgtgagattaatgaaacctccctctcccgaacatcagtctcttgacactcagcaggaaggcggcgaggaggaggtgggccccgtcgcgcagcaggccattgccgtggcagagccatcaacatccgagtgtttacgtattgagccagacacaactgccctgagcacaaatcacgagaccatcgacttattagtgcagatcttgaggaactgtctccgctatttcctgcctccttcgtttccgataagtaaaaagcagctgtcagctatgaactctgacgagctgatatcgtttccactgaaagagtatttcaaacagtatgaagtgggtctgcagaatttgtgcaacagctaccagagtcgagcagactcccgagctaaggctagtgaggagtccctgagaacgtccgagcggaaactgcgtgagaccgaggagaagctccagaagctgaggacaaatattgttgcgctcctccagaaggtgcaggaagatatcgacatcaatacagatgatgagctggatgcatacatagaggacctcattacaaagggcgactag

SEQ ID NO: 25067 - DNA, 5943 bp, synthetic construct
  source 1..5943: mol_type = other DNA; note = Synthetic coding sequence
atgaaccccaccaaccccttcagcggccagcagcccagcgccttctcagcatcctcctctaatgtgggtacactacccagcaagccccccttccggttcggtcagccaagtttgttcggacaaaattccacactatctggcaagagctctggtttcagccaagtgagttcattcccagccagctctggtgtaagccactcctctagcgtccaaacgttgggctttacacaaaccagctccgtgggacctttttctgggttggagcacacatccacattcgtggctacgtcaggtccatcatcatcaagcgttctgggcaacaccggatttagtttcaaaagccccacttctgtaggagcgttcccttctactagtgcgttcggccaggaggcaggggaaattgtgaactcaggcttcggcaagaccgagttctcttttaaaccgctggagaatgccgtctttaagccaatcctgggagctgaaagtgagcccgagaagacgcagtctcaaattgcctcgggcttcttcaccttttcccatcctatttcaagcgctccaggaggcctagcaccattttcatttccgcaagtaactagttcgtcagccaccacctctaactttacattctccaagccggtctcttccaacaacagtctttcagcctttacccctgcactgtcgaaccagaacgttgaggaagagaaacgtggcccgaaaagtatcttcggcagcagcaataattcctttagctcattccccgttagtagcgctgttctgggagaaccttttcaagcctccaaagccggcgtaaggcagggatgcgaggaggccgtgagccaggttgagccactcccatctctcatgaaaggcttgaagcgaaaagaagatcaggatcgatcccctcggcggcatgggcatgaaccagcagaagatagtgatccgctcagtagaggagatcacccgcctgacaaacgacccgtgcggctaaacagaccaagaggtggtacactgttcggacgcacaatacaagatgtctttaagagcaacaaggaagtgggccggttgggcaataaagaggctaaaaaggaaacgggcttcgtggaaagcgccgaatcagaccatatggccattccaggtggcaaccagtcggtgctagccccttcacggattcctggcgtgaataaagaggaggagaccgagagcagagagaaaaaggaagatagtctgcgaggcacccccgcgagacagtccaaccggagtgaaagtaccgacagcctgggtggacttagcccgagcgaagttaccgctatacagtgtaagaatatacccgattatctcaatgaccgcactattctggagaaccattttggtaagatcgccaaggtgcaacggatcttcacacgacggtctaagaagttggcggtcgtccacttttttgaccatgcctccgccgccctggcacgtaaaaagggcaaatctcttcacaaggatatggctatattctggcacagaaaaaaaatttcacctaacaagaaacctttttctctgaaagaaaagaagccaggcgatggagaagtatcacccagcacagaggacgcaccttttcaacattctccattgggaaaggccgctggccgcacgggggcgtcttcactgttaaataagtcttctccagtgaaaaagccctctctgctcaaggcacatcagtttgagggagacagcttcgactccgcttctgagggcagcgaaggccttgggccgtgcgtgctgtccctttccaccctcattggaactgtcgctgagaccagcaaggagaaatatcgccttttggaccagagagacaggatcatgcgacaggcgcgggtgaagaggactgatctggataaggctcgtacatttgtgggaacgtgcctcgacatgtgccccgaaaaagaacgttacatgagagagactcggtcacagctgtccgtgttcgaggtagtgcctggcacagatcaggtggaccatgcggcggccgtgaaggagtattcacgtagttctgcagaccaagaggagcccctgccacacgaactcagacccctgcccgtcctgtcccgcaccatggactacctggtcacccagatcatggatcaaaaagaaggatccctgcgtgactggtacgattttgtatggaacaggactcggggtatccgaaaggacattacacagcaacacctgtgcgaccctttgacagtatctttgattgaaaagtgcacccggtttcatatccattgtgcccatttcatgtgcgaagagcctatgtcctcgttcgatgcgaagataaataatgaaaacatgaccaaatgtcttcagagccttaaggaaatgtatcaggacctgcgcaacaagggggtcttctgtgcgagcgaggcggaattccagggttataatgttctgctgagtctcaacaaaggtgatattctgagagaggtgcagcaatttcatcccgcggtgcgaaatagctccgaggtgaagtttgccgtgcaggcctttgctgccctaaactccaacaactttgttcgcttctttaagttggtacagagcgcttcctacctgaatgcgtgtctattacattgctatttctctcagatcagaaaagatgccctgagagcactgaattttgcatatactgtgtcgacccagcgctccacaatctttcccttagatggagtggtgcgcatgctgctatttcgagactgcgaagaggctacagacttcttaacatgccacgggttgacggtatcagatggttgtgtggagctcaacaggtctgctttcttggaacctgaggggctgtccaaaacacgaaagtcagtgtttataactcgaaagcttaccgttagcgtgggcgagatcgtgaacggtggacctttgccgcccgtgcccagacacactcctgtctgctcgtttaatagccagaataagtacataggcgagtcgttagccgctgaacttcccgttagtacccagcgtccaggatcagacacagtagggggcgggaggggggaagaatgtggagtcgaaccagacgcccccctgagctccctgccacaatccttgcctgcacccgctccaagccccgtgcctctccctcctgtgctggcccttacccctagcgtagccccatctttattccagcttagcgttcagccagagccaccaccccccgagccagtccctatgtactctgacgaagatttagctcaagtcgtggacgagctgatacaggaggctctgcaacgggactgtgaagaggttggcagcgccggggcagcctacgcggcagccgctttgggcgtgtctaacgctgccatggaagaccttctcacggccgctactacaggaatcctgcgccacattgctgctgaagaagtctcgaaagaaagagagcgcagggagcaggaacgtcagagggccgaggaagaacgcctgaaacaggaacgcgaactcgttctgagcgaactgtcgcagggccttgctgtggaactcatggaacgtgtgatgatggagttcgtgagggagacttgctcccaggagctcaagaatgctgtggaaactgaccaacgtgtgagagtagctaggtgttgtgaggacgtctgcgcacatctggtcgacctgtttttagtggaagaaatcttccagactgctaaggaaacactgcaggaactgcagtgcttttgtaaatacctgcagcgatggcgcgaagctgtgacagcccgcaagaagctccgacgtcaaatgagagcctttcccgcggctccgtgttgtgttgatgtctcggatcgtctgagggctctggcaccttctgctgagtgtccgatcgccgaagagaaccttgccagggggctcctggacctaggtcatgcaggccgtctcggcatctcatgcaccaggctccgcaggctgagaaacaagacagctcatcagatgaaagtgcagcacttttaccagcaactgctctccgacgtggcctgggcgagtctggatctgcccagcctagtggccgaacatctcccaggcaggcaggagcacgtcttctggaaactcgtgctcgttttaccggatgttgaggaacagagtcctgagagttgcggcagaatactggccaattggctcaaagtcaagttcatgggcgacgagggatccgtcgatgacacctcctcagacgcaggggggattcagaccctttcgctgtttaatagcttgagctccaaaggtgaccaaatgatcagcgttaatgtttgcattaaggtcgcccacggtgccctttctgatggggccatagatgccgtggagacccagaaagacttgttaggcgccagcggcctgatgctgcttttacctcccaagatgaagtccgaagacatggccgaagaggacgtgtactggctctccgcgcttctgcagctcaagcagctcttgcaggctaagcctttccagccagccttgcctctggtggtccttgtcccatcacctggcggagacgccgtcgagaaagaagtagaggacggattaatgcttcaggacctggtgtcagccaagctgatctccgactataccgtcacagaaatccccgatacaatcaacgacctgcaggggagcactaaggtcctgcaggctgttcagtggctggtgtcgcactgtccgcactccctagatttgtgctgtcagaccctcattcaatacgttgaagacggtattggacacgaattcagcgggcggtttttccatgaccggcgcgaaagacgccttggaggtcttgcttctcaagagcctggagcaattattgagctctttaactccgtgcttcagttccttgccagcgtcgtctcctccgagcagctttgtgacctgtcttggcccgtgacagaatttgccgaagcaggcggcagcaggttactaccacacctacactggaatgcccccgagcaccttgcctggcttaaacaggccgtcctgggcttccagttgccccagatggacctgccccccctgggtgccccatggttaccagtgtgcagtatggtcgtccagtacgcaagccagatcccttcttcacgccagactcagccagtgctccaatctcaggtggagaacttgctccaccggacatattgcaggtggaagtctaaatctccttcaccagtacatggagctggacccagcgtgatggaaataccttgggacgacttgatcgcgttgtgtataaaccataaactccgcgattggacccctcctcgactgcctgtaacttccgaagccctttccgaggacgggcagatctgcgtttattttttcaagaacgacctcaagaaatacgatgtccccttgagctgggaacaagcccgcctccaaacccagaaggagctgcaactgcgagaggggcgtctggctatcaaaccatttcatccgtcggctaacaatttcccaatcccactcttgcacatgcaccgcaactggaagcgtagtactgaatgtgcccaggagggcagaataccgtctacagaagatctgatgcgcggggcctccgcggaggagctgctggcacagtgtctttcttccagtctcctcctagaaaaagaagagaataaacggtttgaagatcagctgcaacagtggctcagcgaggattctggcgcctttactgacttaaccagcctgcctttgtaccttccacagaccctggtgtccctgtcccatacaattgagcccgtgatgaaaacctcggttaccacaagcccccagtccgatatgatgagggaacagctgcagttgtccgaggcaactggcacgtgcctcggcgagcgcctcaaacacctggagagactcatccggagttccagggaagaggaggtagcaagcgagcttcatctgtctgccctgctggacatggtggatatttag

SEQ ID NO: 25068 - DNA, 513 bp, synthetic construct
  source 1..513: mol_type = other DNA; note = Synthetic coding sequence
atgggcaagcggtacttctgcgactactgcgaccggagcttccaggacaatctacataacagaaagaagcatctgaacggcctgcaacacttaaaggctaaaaaagtttggtacgatatgtttcgggacgctgcagccatcctgctagatgagcaaaacaaaaggccttgccgcaagtttctcctgaccggccaatgtgattttggctcaaattgtagattcagccatatgtccgaacgggacctgcaggaattgtccattcaggtggaggaagaaagaagggcgcgggaatggctgctagatgcgccagagctccccgaaggtcacctcgaggactggctcgaaaagcgggcaaaaaggctcagctcagcaccttcctctcgggccgagcccatccggaccactgtgtttcagtatccagtgggctggccccctgtccaggagcttcctccatcgctgcgtgccccaccgccaggcgggtggccactacagccaagagtccagtgggggtag

SEQ ID NO: 25069 - DNA, 291 bp, synthetic construct
  source 1..291: mol_type = other DNA; note = Synthetic coding sequence
atgtgccacaccagctgcagccccgcctgccagcccacctgctgcatccacagtccttgccaggctagttgctacgtaccggtttcttgccaaagctcggtctgcatgcccgtgagctgcaccagaatcgtgtgcgtagcgccatcgtgccaacctagtgtttgtgtgcctgtgagttgtaggccaatcatatacgtcactcctagctgccaaagttctggctgttgtcagccgccttgcacaacagcactctgcaggcctatctcatgctctacccccagctgctgttag

SEQ ID NO: 25070 - DNA, 879 bp, synthetic construct
  source 1..879: mol_type = other DNA; note = Synthetic coding sequence
atggccgccagcaccatgagcatccggagcagcgcctacagcgactcttggcaggtggatgattgtcctgagtcttgctgcgaaccgccatgctgcgctacctcatgctgtgcccccgctccatgcttaacccttgtctgtacacccgtgtccagagtgtcaagcccatgttgccaggttacttgtgagcctagcccgtgtcagtccggctgtacttcatcttgcacaccatcgtgctgccaacagtcctcctgccagcccgcctattgcaccagctcaccatgtcagcaggcttgctgcgttcccgtctgttgcaagccggtgtgctgtgtgccagtttgctgtggcgctagcagctgttgccaacaaagcagttaccaaccggcgtgctgtgcgtctagttcatgccagccagcttgttgtgtgcccgtttgttgcaagcccgtgtgttgtgccccgacctgttcagaggactcatatagctgctgccagcagagttcatgtcagcccgcctgttgcacatccagcccttgtcagcagtcctactgtgtgcccgtctgctgcaagccagtttgttgtaagccgatatgttgcgttcctgtgtgctcaggcgcaagctcgttgtgctgtcagcagtctgggtgccaacctgcgtgttgtaccacttcctgctgtagaccatcatcttctgtgagtctgctgtgtaggccagtgtgtcggccagcatgctgtgtccctgtgagctcctgttgtgcccccacgtcctccagacagccatcttattgtcgccaggcctcgtgcgtgtctttgttgtgccgccctgtgtgctccaggcccgcgtgttactctttttcctcagggcagaagtcctcatgttag

SEQ ID NO: 25071 - DNA, 1608 bp, synthetic construct
  source 1..1608: mol_type = other DNA; note = Synthetic coding sequence
atgaagaagatcagcctgaagaccctgcggaagagcttcaacctgaacaagtcaaaggaagaaactgatttcatggttgtccaacaaccttctttggcttctgacttcggtaaagatgactcactttttggctcatgttatgggaaagatatggcgtcatgcgacattaatggggaggacgagaagggcggcaaaaaccggtccaaaagcgaatccctcatgggaacactgaaacgacggctatcggccaaacagaagtcaaagggtaaggccggaactcctagcggctcctcagctgatgaggatacattcagttccagctcagctccgatcgtgttcaaagatgttagagctcagaggcccattcgaagtacgagcttgaggtctcaccactacagtccagcgccctggccccttcggcccaccaatagtgaagaaacatgtatcaagatggaagtccgggtgaaggcactcgtgcactcctcctctccgtcacctgctctgaatggagttagaaaagactttcatgacctgcaatcggagaccacctgccaggagcaggctaattccttaaagagttcagcttctcataatggtgacctgcatcttcaccttgacgaacacgtgccagttgtgataggattgatgccacaggactacattcagtacactgtgcccctcgatgaagggatgtacccactggagggaagtcggtcctactgtctcgacagtagtagtcccatggaagtttccgccgttcccccacaggtgggtggcagggcatttcccgaagatgagagtcaggtggatcaggaccttgtggtggcccctgagatctttgttgaccagagtgtaaatggacttctgattggaacaactggcgtgatgttgcagtcgccccgtgctgggcacgatgacgttccacccctctctccattactgccccctatgcagaataatcagattcaaaggaacttctccggactcaccggtaccgaagcacacgtggccgagtcgatgcgctgccaccttaactttgaccctaattctgcaccaggagtcgctcgcgtgtatgacagtgtccaatcctccggcccgatggtagtgaccagccttacggaggaactgaagaagctggccaagcagggttggtattggggcccaatcacccgttgggaggccgagggcaagctagccaacgtgccagacggttcttttcttgtgcgcgattcttccgacgatcggtacttgctctcactgtctttccgcagccacggtaaaacgctgcataccagaatcgagcactccaatggaaggttctccttctatgaacagcctgatgttgaagggcacacgagtattgtggacctgatcgaacattcaattcgcgactctgaaaatggcgcattctgctactcccggtcacggctgcccggtagtgctacttatcctgtaagactgaccaatcctgtaagccgttttatgcaggtcagatcacttcaatacctatgccgatttgtgattcgccaatacacgcgcattgacctcattcagaaactgcccctacccaataaaatgaaggactatctgcaggaaaagcactattag

SEQ ID NO: 25072 - DNA, 1260 bp, synthetic construct
  source 1..1260: mol_type = other DNA; note = Synthetic coding sequence
atggccgccagcagcctggagcagaagctgagccggctggaggccaagttgaagcaggagaaccgggaggccaggcgccggatagatctcaacctggacatctcaccccagcgtccccgtccaacgttacaacttcccctggctaatgatggaggttcaaggagcccctcctcagagtcttcaccacagcaccctacaccccccgctcggcctagacacatgctcggactgccttccacactcttcaccccaaggtcaatggagtccattgagattgatcaaaagctgcaggaaattatgaaacagaccgggtatctgaccatcgggggccagcgctaccaggctgagatcaatgatctagagaacctcggagaaatgggtagcggcacatgcgggcaggtttggaagatgaggtttagaaagaccgggcacgtcattgccgtgaaacaaatgcggagatcgggcaataaagaggagaacaagcggattctgatggacctggacgtggttctcaagagccatgactgcccctacatagtacagtgctttggtacattcatcaccaacaccgacgtgttcatcgctatggaactgatgggaacgtgtgccgagaaactcaaaaagcgaatgcagggaccaatccccgaaagaatactcggcaagatgacagtggcgatcgttaaagccttgtattacttgaaagaaaagcacggcgtgatacacagggacgttaaacctagtaatattctgcttgacgaaaggggacagattaagctttgcgattttggaattagtggacgtctggtggattctaaagcaaagacccggagtgccggatgcgcggcttatatggcaccagagcgcatagaccctcctgatcccacgaagccagattatgatatccgtgccgacgtctggtcactcggtattagtctcgtggagcttgctaccggccagtttccatacaaaaactgtaagaccgattttgaagtgctgaccaaggtgctgcaggaagaaccacccctgttacctggccacatgggattctccggggactttcagagctttgttaaggattgtcttactaaagaccaccggaagaggccgaaatacaacaaactgctcgagcacagtttcatcaaaagatacgagaccctggaagtggatgtagccagctggtttaaggacgttatggcgaagacggagtctccacgcactagtggtgtgctgtctcagcctcatctgccttttttccgctag

SEQ ID NO: 25073 - DNA, 963 bp, synthetic construct
  source 1..963: mol_type = other DNA; note = Synthetic coding sequence
atgagcaagagcgccagccccaaggagcccgagcagctgcggaagttgtttatagggggccttagtttcgagaccacagatgaaagtctccgctcccatttcgaacagtggggtacactgactgattgtgtagtgatgcgcgatcctaatactaagcgttcccgcgggtttggcttcgtaacatacgcaactgtcgaggaggtggatgccgccatgaacactaccccacataaagtggacggtcgagtggtggagcctaagcgtgctgtgtccagagaggatagccaacggcccggcgcccacctgaccgtgaaaaagattttcgtgggcgggataaaggaggataccgaggagcatcacctgagagactacttcgagcagtatgggaaaatcgaggtgatcgaaataatgactgatcgcggtagcggaaagaagagaggctttgctttcgtgactttcgacgatcacgatagcgtggacaagattgtcattcagaaatatcacactgttaaggggcacaattgcgaagtgcgaaaggccttgccaaagcaggagatggcctccgcctcttcaagtcagcgtggtcgtagggggagcggcaactttggaggcgggagaggggacgggttcgggggaaatgacaactttgggcgagggggcaatttcagtggtagaggcggttttggcggatcctgtgggggcggaggctacggaggctccggtgacggctataatggattcggaaacgacggaagtaacttcggggggggaggatcttataatgatttcggaaattacaataaccaatcaagcaacttcggccccatgaagggcggaaactttgggggtcggagttccggcccctacggggggggcggtcagtacttcgcaaagccacaaaatcagggcggctacggagtctcatccagcagctccagttacgggtcgggccggagattttag

SEQ ID NO: 25074 - DNA, 1737 bp, synthetic construct
  source 1..1737: mol_type = other DNA; note = Synthetic coding sequence
atggagctggagaacatcgtggccaacagcctgctgctgaaggccagacagggaggatacggaaaaaaaagcggcaggtctaaaaaatggaaggaaatcctaaccctgccacctgtcagccagtgtagcgaactgcgccatagcattgagaaggattactcttccctctgcgacaaacagcctatcgggcggcgcctgtttcggcagttctgtgatactaaacccactctgaagcgacatatcgaatttctcgatgcagtcgctgagtacgaagtagcagacgacgaagaccgatctgattgcgggctgtcgatactggatcgctttttcaacgataaactggctgccccgttacccgagatcccccccgatgtggtcactgagtgtaggctgggtttgaaagaggagaatccaagcaagaaggccttcgaagaatgcacaagggtggcccataactacctgcgcggggaaccattcgaagaataccaggagtcttcttactttagtcagttccttcagtggaaatggctggagcgccaacctgttaccaaaaacactttcagacattacagagtccttgggaaaggggggttcggcgaggtttgcgcatgtcaggttcgggctacggggaagatgtatgcctgtaagaaactacagaagaaacgtatcaagaagcgcaagggagaggccatggctctgaatgagaagaggatcttggagaaggtccaatctagattcgtggtatcattggcttatgcttatgaaaccaaggacgcactgtgcctggtcttaaccattatgaacgggggggacctgaaattccacatctacaatctgggtaacccggggttcgatgaacagcgcgcagttttctatgcggcagagctctgttgcggactggaggacttgcagcgggaaagaattgtgtatagggaccttaaacccgaaaatattctcctcgacgaccgcggacacatcagaatctctgatctcggcctggccaccgagattcccgaaggccaacgggtcagaggccgcgtcggcactgtgggatacatggcgccggaggtggttaacaacgaaaaatacacattcagtccagattggtgggggctggggtgtctgatctacgagatgatccaaggacattccccgttcaagaagtacaaagagaaggtcaagtgggaggaagttgatcagcgtattaagaacgacactgaggagtatagcgaaaaattcagcgaggatgctaaatctatctgccgaatgctactcaccaagaacccaagcaaacggctgggctgccgtggcgagggagccgccggcgtgaaacagcacccggtttttaaggatatcaattttcggcgcctggaggccaatatgctcgagcctcccttctgtccagacccccatgcagtctactgcaaagatgtgttggacatcgagcagttcagtgtggtaaaaggcatatacctggataccgctgatgaagatttttatgcccgatttgccacaggctgtgtgagcataccatggcaaaacgaaatgatcgaatccggatgctttaaggatattaataagagcgagtcagaagaagccctcccgctggatttagataagaacatccatactccggtttcacggcccaatcggggcttcttctaccgcctttttcgccgggggggatgcctgactatggttccatctgagaaagaggtagagcccaagcagtgctag

SEQ ID NO: 25075 - DNA, 2625 bp, synthetic construct
  source 1..2625: mol_type = other DNA; note = Synthetic coding sequence
atgaaccagcggagccacctgggcaccacctacctggacaccgccaaaggagctgtggaaacgttcatgaaactgcgtgcgagggacccagcttctcggggtgataggtatatgctcgtgacattcgaggaaccaccctatgctattaaggcgggctggaaagaaaaccacgctaccttcatgaacgagttgaagaatctgcaggcagaagggctgaccactttaggacagagtttgagaacagcctttgacctcctaaacttgaatcgcctggttacaggaatcgacaactacggtcaggggcgtaaccccttctttctggagcccgcaatcattatcactataacagacgggagcaagctgactacaacctctggagtccaggacgagctgcacctaccattaaacagtccccttcccggatccgagttaacaaaagaaccttttaggtgggaccagaggttgtttgctcttgttctgcggctacctggaaccatgtctgttgagtctgagcagctaactggggtacctcttgatgattctgctattactccaatgtgtgaagtaacaggtggacgatcttattccgtctgctcacctcggatgcttaaccaatgtctggagtccctggtgcagaaggtccagtctggcgtggttattaactttgaaaaggctggacccgatccgagcccggtggaggatgggcaacctgatatttcccgcccgttcggatctcagccatggcactcttgccataagctaatctatgtgaggccaaaccctaagactggtgttccaattggtcattggccagtgccagaatctttttggccagatcagaattccccaaccctgcccccgaggacctctcacccagtggtaaaattcagttgcacagattgtgaaccaatggtgatcgacaaactgccatttgacaaatatgaactggaaccatctccactgacgcagtttatcctggaacggaaatcccctcagacctgttggcaggtgtacgtctctaactccgctaagtattccgagctggggcaccctttcgggtacctcaaagcctctactgccctcaattgtgtgaatctgtttgtgatgccctataactaccccgttctcctcccactccttgacgatctgtttaaggttcataaggccaaacctaccctgaaatggcgccagtcctttgagagctacttgaagactatgccaccctactatctgggacctctgaagaaagctgtgagaatgatgggcgcacccaacttaatcgctgactccatggagtatggcttgtcctattcggtaatctcgtaccttaagaaactctcccagcaggccaagatagaaagtgatagggtaatcggtagcgtaggcaagaaagtggtccaggagaccggaatcaaagtgaggtcgcgcagccacgggctatcaatggcctatagaaaagactttcagcagcttctgcaaggcatctcagaggacgtaccccacagacttttggacctgaatatgaaggagtatactgggttccaggtggcgctgttaaacaaggacctcaagccgcagaccttcaggaacgcctatgacataccacggagaaatctgcttgaccatctcactcggatgagaagtaatctgctgaagtcaaccaggagattcctgaaaggccaggacgaggaccaagttcactcagtgcccatcgctcagatgggcaactatcaggaatatctcaaacaggtgccctcacccctcagagagctggaccctgatcagcccaggaggctgcacacctttgggaatccatttaagctggataaaaaaggtatgatgattgatgaagccgatgaattcgtcgcaggcccccagaataagcataaacggccgggcgagccaaatatgcaggggattccgaaaaggcgcagatgtatgagccccttgttaagaggcaggcagcagaaccccgttgtgaataatcatatcggcggtaaagggcccccagctcccactacccaagcccagccagatcttataaaaccactgcctttgcacaaaataagtgaaacgaccaatgattctattattcacgatgtcgtagagaaccacgtcgctgaccaactgagctccgatattactcccaatgccatggacactgagtttagtgcaagtagccccgcaagcctactggagcgcccaacaaaccacatggaggccctgggacatgaccatttaggcactaatgatttaactgtgggcgggttccttgaaaaccacgaagagccccgcgacaaggagcagtgtgccgaggaaaacataccagcatcttccctaaataaagggaaaaagctaatgcactgccgctctcacgaggaggtcaatactgaactgaaggcacagatcatgaaggagattagaaagcccgggcgcaagtacgagagaatcttcaccttgctcaaacacgtccagggaagcctgcagacgagacttattttcctccaaaatgtgataaaagaggccagtcgatttaagaagagaatgcttatcgagcagctcgaaaattttcttgacgagatccatcgtcgtgccaaccagatcaaccacataaactctaattag

SEQ ID NO: 25076 - DNA, 2340 bp, synthetic construct
  source 1..2340: mol_type = other DNA; note = Synthetic coding sequence
atggccgactacagcaacaagctgtactaccagctggagcaggagacaggcattcaaaccgggtatactaggacgggatccatcttcctggcccaaacacaggatcggctgatttcattaaagcgcattaacgccggccttaacgtgattggaatccccagcgagatcatttctccgaaaaaggtcgctgagctgcatcacctgctgaatgtccacgacttagttggagcaatgcatgtgcctgaggatgcggtggtctcctcagccgacgtcgcacttgcactggctagtgctgcatcccagaacggcgtgcagatctacgatcggaccagcgtgcttcacgtgatggtcaagaagggccaggtcacgggagtcgagaccgacaagggccagatcgagtgccagtactttgtgaactgtgcggggcaatgggcctatgagctgggactttcaaatgaagagcctgtgtccattcccctgcacgcatgtgaacacttttaccttttaactaggccactggaaactcccctacaaagctccacgccaaccattgtggacgctgacgggagaatctacataagaaattggcagggcggaattttgagcgggggtttcgagaaaaatcccaaaccaatctttaccgaggggaaaaatcaattagagatccaaaatctccaggaggattgggaccacttcgaaccccttctgtctagcctgctgcggaggatgccggagctggagactctcgagataatgaagttggtcaactgccccgaaacttttacgccagatatgcggtgcatcatgggcgaatctcccgccgtgcagggctacttcgtcctggccggaatgaacagcgccgggctgtcgttcggtggaggggcaggcaaatacctcgccgaatggatggtgcatgggtacccttccgagaacgtgtgggaattagacctgaagaggttcggagcacttcagtctagccggactttccttcggcaccgtgtgatggaagtcatgccattgatgtatgatcttaaagtccccaggtgggatttccagactggccgtcaattgcgtacctcccccctttacgaccggctggacgcacagggagcaagatggatggagaaacacggttttgaacgacctaagtacttcgtgccaccagacaaggacctgctggccctggagcagagcaaaacgttttataagcctgactggttcgatatcgtggagagcgaagtgaagtgttgtaaggaggcagtctgtgtgattgacatgagctctttcacaaagttcgaaatcacatctaccggagatcaggcccttgaggtgttacagtatctcttctctaacgatcttgatgtgccagtaggccatatcgtccacactggcatgcttaacgagggcggtggctacgaaaatgactgcagtatcgcccgtttaaacaaaaggtcttttttcatgatttctccgactgatcagcaggttcactgctgggcttggttgaagaagcatatgcctaaggactctaatctgcttctggaggatgtgacttggaagtataccgcactgaacctaatcgggccacgcgctgtcgacgtgctcagcgagctgtcctacgcaccaatgacacccgatcattttccgtctctcttttgtaaggagatgagcgttggctatgcaaatggtatcagggtgatgagcatgactcacaccggagaaccaggtttcatgctgtatatccccatcgagtacgcattgcacgtctataatgaagtgatgtctgtaggacagaagtacggcattcgcaatgctgggtactacgctttgcggagccttcgcatcgaaaaattcttcgctttttgggggcaagatatcaataatcttactacccccttggagtgcggaagagagtcacgcgttaaacttgagaaaggaatggactttatcggccgggatgccctactgcaacagaagcaaaacggagtctataaacgactcactatgttcatcctggacgaccacgattcagacttggatctgtggccctggtggggggagccgatttaccgcaacggacaatacgtgggcaaaaccacgagttccgcatacagttatagtctggaacgccatgtgtgtttgggcttcgtgcacaatttctctgaagacacgggtgaggagcaagttgttacagctgacttcattaataggggtgaatacgagatcgatatcgccggatacaggtttcaagcaaaggcaaagttgtaccctgtcgcgtccctcttcactcagaagcgacggaaggatgatatggagctttccgatctgcacgggaaatag

SEQ ID NO: 25077 - DNA, 1191 bp, synthetic construct
  source 1..1191: mol_type = other DNA; note = Synthetic coding sequence
atggccacccgggtggaggaggccgcccggggccggggcggcggcgccgaggaggcaaccgaggccgggcgcggaggacgcagacgctctcccagacagaagcttgaagagtcccgttcggtccagaagcagatgaagatactgcagaagaagcaggctcagatagttaaagaaaaggttcatctgcagtccgagcactctaaagccatactcgctcggagcaagctggagtcactgtgccgcgaactgcagcggcacaataagacactgaaggaggagaatatgcagcaagctcgcgaggaggaggagaggagaaaggaagctactgcccatttccaaattacccttaacgagatccaggcccaattagaacagcacgatatacataatgctaaactacgtcaggaaaacatagaactgggggaaaagctgaagaagctaattgaacagtatgccttaagggaagagcatattgacaaagtattcaagcataaagagctgcagcagcagctcgtggatgcaaaactccaacagacaactcaacttataaaggaagctgatgagaagcatcagcgcgagcgggagttcctcctcaaagaggccacagagagcaggcacaagtatgaacagatgaagcagcaggaggtgcagttgaagcagcagctttctttatacatggacaagtttgaagagttccagacaacaatggcaaaatccaacgaattatttacaacctttaggcaagagatggaaaaaatgacgaagaagatcaaaaagttggaaaaagaaacaatcatctggaggacaaaatgggagaacaataacaaagcgcttttgcagatggccgaagagaaaaccgttcgcgacaaagaatacaaggccttgcagatcaaactagaacggttagaaaaactgtgccgtgcccttcagactgagcgtaatgaacttaacgagaaggtggaagtactgaaggagcaggtcagcatcaaggcagctatcaaggccgcgaacagggacctcgccacccctgtcatgcagccttgtacagcacttgatagtcacaaggagcttaacacatccagcaagcgagcgctgggagctcatttagaagccgagccaaagtcacaacgatcagccgttcaaaagccaccctcaactggttcggctccagctatcgagtccgtcgactag

SEQ ID NO: 25078 - DNA, 1443 bp, synthetic construct
  source 1..1443: mol_type = other DNA; note = Synthetic coding sequence
atggccggctacctgagcgagagcgacttcgtgatggtggaggagggcttttccacaagggacctactgaaagaactcacgcttggggcctcacaggctacaacggacgaagttgccgcgttctttgtggcggatctcggcgcgattgtcaggaaacacttctgttttttgaaatgcctccccagggtccgaccattttacgcggttaagtgcaactcaagtcccggagttctgaaggtactggcccagttaggcctgggtttttcatgtgccaacaaagccgagatggagctcgttcaacacatcggcatacctgcctccaagatcatttgcgcgaacccctgcaaacaaattgcgcagatcaagtacgcagccaaacacggaatccaactcctctccttcgacaatgagatggaactggcaaaggtggtgaaatctcatcctagcgcaaaaatggttctctgtatcgcgacagacgacagccatagtctttcctgtttgtcgctgaagttcggcgtatccttgaagtcgtgtcggcacctgttagagaatgccaaaaagcaccacgtagaggtcgtcggtgtctccttccacattggctcgggctgcccagatccccaggcctatgcacagtctattgccgacgcccggttagtgtttgaaatgggcaccgagctcggacacaagatgcatgtcctggacctgggcgggggcttccctggcactgagggcgcaaaagttagattcgaagagattgccagcgtcatcaatagtgctcttgacctgtactttcctgaaggatgcggagttgacatatttgctgaactgggacgctactacgtgacttcagcctttacagtggctgtctcaatcattgccaaaaaggaggtgctgctagatcagcccgggcgggaagcgcctctccctccccctcacattgcaacatgcgcagctagcgaaccttcccctcctgctgaagagaatggctctacttcaaagactatcgtgtaccatctcgatgaaggtgtttacggcatcttcaattccgtgcttttcgataacatttgtccaaccccgatccttcagaagaaaccctccaccgagcagccactctattcctcaagtctatggggccctgcagtcgacggatgcgactgtgtagcagagggactctggctgccccagttacacgttggggattggctggtttttgacaacatgggtgcatacacggtgggtatgggaagccccttctggggaacacaggcttgccatattacctacgcgatgtcccgggtggcctgggaagccctccgccgccagctcatggcagcagaacaggaggacgatgttgaaggagtttgcaagcccctgagttgtggctgggagatcacggacaccctctgtgtggggcccgttttcacccccgccagcatcatgtag

SEQ ID NO: 25079 - DNA, 3774 bp, synthetic construct
  source 1..3774: mol_type = other DNA; note = Synthetic coding sequence
atggcccacttcagcagcgaggaccaggccatgctgcaggccatgctccgacggctgtttcaaagtgttaaggagaaaataaccggcgccccaagtctggagtgtgccgaggaaatccttctccatctcgaagaaaccgacgaaaacttccacaactacgagtttgtaaagtatctccgccagcatatcgggaacactttgggtagcatgatagaggaggaaatggagaagtgtacgtctgatcggaaccagggagaggaatgcggttatgacactgtagtgcagcaggttacgaaaaggacccaggaatctaaggaatataaggagatgatgcactacctaaaaaacatcatgatagcagtggtcgagtctatgatcaacaaattcgaagaagacgagactagaaaccaagagcgccagaagaagatacaaaaggaaaaatcacattcctaccgtactgacaactgcagcgatagtgattcatccctgaaccaatcttacaagttctgtcagggcaagctccagctaatcctggaccagcttgacccgggacagcctaaagaagtaagatatgaggcccttcagactctgtgttcagcccctccgagcgacgtgttgaattgtgaaaactggactacactatgcgagaaacttacagtttcactttcagaccccgaccctgttttctccgacaggattctgaagttctgtgcacagaccttcttgctgagccccctgcacatgactaaggagatctacacctctctggctaaatatctggagtcctactttctctcgagagagaatcacattcccactctgagcgctggggtggatataacaaatcctaacatgaccaggttgctgaagaaagtccgactgttaaacgagtatcagaaagaagcaccaagtttctggattcgccatcccgagaagtacatggaagagatcgtcgaaagcacactttccctgttaactgtgaaacataaccagagtcatgttgttagtcagaagatattggacccaatatatttcttcgccttggttgacacaaaggccgtctggttcaagaagtggatgcatgcacactactcaagaactacagtccttaggctattggagaccaagtataagtctctggttaccactgccatccagcagtgcgtacaatatttcgagatgtgcaaaactcgaaaggccgacgaaactctgggtcacagtaagcattgcagaaacaagcagaaaaccttctattacctcggccaggagctgcaatatatctatttcattcactcattgtgcctgctcggtcgattactgatctataagcagggaaggaaactgttccctatcaaactaaaaaacaaaaaaggcctagtaagcctcatcgacctcctagtgctgtttacccagctgatttattattctccctcttgccccaaaatgacttctgctgcacatagcgagaattatagtccagctagcatggtgactgaagtgctgtggattctatctgatcaaaaggagtgtgctgttgagtgtctctacaataacatagttatcgagacactgctccagcccatccataatcttatgaagggcaatgaagcttccccgaactgtagcgagacagccctcatccacatcgccgggatcctcgctcgcattgcctcagtggaggagggcctgatcttgctgctatatggggctaatatgaacagctccgaggagagccctaccggagcacatattattgcgcaatttagtaaaaaactgttagacgaggacatctcaatattctccggttcggagatgctcccagtagtgaagggggcatttattagcgtctgtaggcacatctatagtacatgcgagggacttcaggtgctcatcacatataatcttcacgagtctatcgccaaagcctggaagaaaacctcccttctctcagagcgcatccctacacctgtggagggctctgacagcgtcagctccgtatctcaggagtcccagaatattatggcttgggaggacaacctgctcgatgacctgttgcacttcgctgcaacacctaagggcctcctactccttcagcgaactggtgccattaatgagtgcgtcactttcatatttaacagatacgctaaaaagctccaggtctccaggcacaaaaagtttgggtacggcgtgttagtaacccgagtggcctccactgcagcagggggaatagccctgaaaaagagtggttttattaatgagttaataactgaactttggtcaaacctcgaatacggccgagacgatgttagggtgacacatccaagaaccacccctgtggaccctatcgatcgctcatgtcagaagagttttctggcgctggttaacttactttcgtaccctgcgatctacgagctggtgcgcaatcaagacctgccaaacaaaactgagtacagcttacgtgaagtcccaacctgcgtgatagacattattgatcgcctaatcattttgaactcagaggccaaaatcagatccctgttcaactatgaacagagtcacatttttgggcttcgtgacttcatcatcgacggactatctgttgaacgcaatcatgtgctcgtcaggatcaatctcgtcgggggacctctggagcgtattctcccaccacgcctgttagagaagtcagataatccttacccctggcccatgttctccagttatcccctgcccaattgttatctgtccgacatcacccgcaatgcggggatcaagcaggataacgatctggataaactcctcttatgcctgaagatttcggataagcaaactgagtggatcgaaaattgccagaggcagttttgcaagatgatgaaagccaagccagacataatctccggagaagccctgattgagcttctggagaagtttgtattgcacttaaccgaatctccatccgaatgctactttccgtccgtagagtatacggccacagacgccaatgtgaagaatgaatctctgtccagtgtgcagcagctagggatcaaaatgaccgtgcgatacggtaagtttctgtctctcctgaaggatggtgccgaaaatgatctgacatgggtgttgaaacattgtgaacgcttcctgaagcagcaacaaacatctattaagtctagcctgctttgcttacagggtaactatgcggggcatgattggttcgtctccagcctttttatgattatgttgggcgacaaagaaaagacattccagtttttacatcagttcagtcgattgctgacatccgctttcctgtggctgccccggttgcatatcagctcttacctcccaaacgataccgtcgaaagtggaatccatccagtatacttttgtagcacacattatattgagatgctgttaaaggccgagctaccattggtgttcagcgctttccacatgagcgggtttgcaccttctcaaatctgcctccaatggattacccagtgcttctggaactatctggattggattgaaatctgccactatatcgccacatgcgtgttcctgggtcctgactatcaggtgtacatctgcatagcagtttttaagcacctgcagcaggatatcctgcagcacacccaaacacaggacctccaagtctttctgaaagaagaggccttacatggattccgggtgtccgactatttcgagtacatggagatcttggaacaaaactaccgaacagtgttgttgcgggacatgcggaacataaggcttcagtcaacgtag

SEQ ID NO: 25080 - DNA, 612 bp, synthetic construct
  source 1..612: mol_type = other DNA; note = Synthetic coding sequence
atggccaccccctacgtgaccgacgagaccggcggcaagtacatcgccagcacccagagaccggacgggacctggagaaaacagaggagggtgaaagaaggctacgtgccccaggaagaagtgcccgtttacgaaaacaaatacgtgaagttctttaagagtaaacccgaacttccccccggactgtctccggaagccacagccccagttactccaagccgccccgagggaggcgagcctggcttgtcaaagactgctaagagaaaccttaagcggaaggagaagaggcgtcaacaacaagagaaaggcgaggctgaagccctatcccgcacactggacaaagttagcctggaagagaccgcacagttgccctcagcccctcaaggctcacgggcggccccaaccgctgcgtctgatcagcccgattctgccgccactacagagaaagctaagaagatcaaaaacctgaagaagaagctgcgccaggttgaggagctccagcaacggatccaggccggagaggtttcccagccaagcaaagagcagctggagaagcttgcacgacgccgggctctggaggaagagttggaggacctcgaactcgggttatag

SEQ ID NO: 25081 - DNA, 729 bp, synthetic construct
  source 1..729: mol_type = other DNA; note = Synthetic coding sequence
atggccgccgtgaaggccagcaccagcaaggccacccggccctggtattctcacccagtgtatgctagatactggcagcactaccaccaggccatggcttggatgcagagccatcataatgcgtaccgcaaggctgtggagtcctgttttaacctcccctggtatctgcccagcgcccttctgccacaatcttcttacgacaatgaggccgcatatcctcaaagcttttacgatcatcacgttgcctggcaggattacccttgctctagttctcactttaggaggtctggacagcatccccgctattctagcaggattcaggcgagcaccaaggaagaccaggcactgtccaaggaggaggagatggagactgagtctgacgcagaggtggagtgcgacctctccaatatggagattactgaggagcttcggcagtacttcgccgagacagagagacaccgtgaggagcggcggagacaacaacagctcgacgccgagaggctggatagctacgtgaacgccgaccacgacctgtactgtaacacaaggcgctccgtagaggctccgactgagaggcccggtgaaagaagacaagccgagatgaaaagactttacggagactccgctgctaaaattcaggccatggaggccgccgtgcagttgtctttcgacaagcactgcgacaggaagcagccaaagtattggcccgtgattccattgaagttctag

SEQ ID NO: 25082 - DNA, 738 bp, synthetic construct
  source 1..738: mol_type = other DNA; note = Synthetic coding sequence
atgatcggcgtgagcttcgaggaggccaagagcatcatcaccggcgcgaaactatctacgcgtttggagtccgcttgggaaattgctttcattcgccagaagtctgataacatccagcctgagaatctcagctgtacatcccttatcgaagcttccggtgagtacggaccccaagcgagtacactgtcactgttctcttcacccccggaaatcctcatccctaagacatccagcacaccgaaaactaacaacgatattctgagcagctgtgaaatcaaaaccgggtacaacaagacggtgcagatccccatcaccagcgagaatagcactgtgggtttgagcaatactgacgttgcatcggcatggaccgagaattatggcctccaggaaaagatatccctaaatccctctgtgagattcaaagctgagaagctggagatggctctgaactatctgggcatccagccaacaaaggagcagcaccaggcccttagacagcaggtgcaggcggactccaagggaacagtgagtttcggcgattttgtgcaggtcgcccggaaccttttttgcctgcaactggatgaagttaatgtcggtgctcatgaaatttccaatatcctcgactctcagctactcccctgcgatagctccgaggctgacgagatggaaaggctcaagtgtgagagggacgatgccctgaaagaggtcaataccttgaaatggcctggtcagaactag

SEQ ID NO: 25083 - DNA, 1020 bp, synthetic construct
  source 1..1020: mol_type = other DNA; note = Synthetic coding sequence
atgatggacagccagctggtggccggcgtggccttcaagaagaccttctcctatgcaggttttgagatgcaacccaaaaaatatcataaccccaagatcgcccttcttaatgtggagttggagctgaaggctgagaaggacaacgcggagatccgggtccatacggttgaggattatcaggctatcgttgacgcagagtggaatattctgtacgataagttagagaaaatccaccattccggagcgaaggttgtcttgtccaaacttcctattggtgatgttgccacgcaatatttcgcagaccgggacatgttctgtgcgggccgggtgccagaagaagaccttaagcgcacgatgatggcctgtgggggctccattcagaccagcgtcaatgcactgtccgctgatgtgttgggccgttgccaggtctttgaggaaactcaaataggaggggagcggtacaattttttcactggttgtccaaaagccaagacttgcacattcattctgcgtgggggtgccgagcagtttatggaagaaacagagagatcacttcacgacgcgatcatgatagtgagaagggctattaagaacgatagcgtcgtggccggtgggggcgcaattgagatggaattgtcaaaatatctcagggattactcccgcaccatacctgggaagcagcagctgctgatcggcgcctacgccaaggctctcgagatcataccgagacaactctgcgataacgctgggttcgacgctaccaacattctcaataaactgagggcacgccacgcccagggcggtacatggtatggcgttgatattaacaacgaggatattgccgacaactttgaggcgtttgtttgggaaccagccatggtccggataaatgccctcacagcagcatcagaggctgcttgcctgattgtatcagtcgatgagactataaaaaaccccaggtctacagtggatgctcccactgcagccggtcgggggcgaggccgcgggcggcctcactag

SEQ ID NO: 25084 - DNA, 768 bp, synthetic construct
  source 1..768: mol_type = other DNA; note = Synthetic coding sequence
atggccagcagcgacctggagcagctgtgcagccacgtgaacgagaaaattgggaatataaagaaaaccctgtcccttcgtaactgtggccaagagcccaccctgaagacggtacttaacaagattggggacgaaataatcgtgatcaacgagctgctgaacaagctagagctcgaaatccagtaccaagaacagactaataatagcctaaaagagctctgcgaaagtctggaagaggactataaggatatagagcacctcaaggagaacgtgcccagccacctgccacaggtgacagtaacccaatcgtgcgtgaaaggtagcgacttggatcccgaagagcctatcaaagtagaggagccagagcctgttaaaaaacctcctaaggagcagcgatcaattaaagagatgccttttatcacctgcgatgaattcaacggggtgcctagttacatgaagagccgcctgacctataaccaaatcaacgacgtgatcaaggaaattaataaggctgttatctcaaaatataagattctacaccagcctaaaaagagcatgaatagtgtgactcgaaatctctaccatcgttttattgatgaagaaaccaaggatactaaaggcagatactttattgtggaagcagacattaaggaatttacaactctgaaggccgacaagaagttccatgtgctgctgaacatacttagacactgcaggagactcagcgaagtgcggggtggcggccttaccaggtatgtaatcacctag

SEQ ID NO: 25085 - DNA, 441 bp, synthetic construct
  source 1..441: mol_type = other DNA; note = Synthetic coding sequence
atggtgaacagctgctgcggcagcgtgtgcagcgaccagggctgcgaccagggactatgccaagaaacttgttgccggccctcatgttgtcagactacttgttgctgtccttcgtgtgtcgtctcaagctgctgccgtccgtcatgtagccagacgacctgttgccagacaacttgctgccggccttcctgttgccacccagtgtgctgccaaaccacatgccgaccaagttgcggcgtctctagctgttgtagacccctgtgttgtcagaccacctgccatccttcttgcgggatgagctcctgctgtcgccctctatgctgtcagacaacctgccggcctagctgtggggtatccagctgttgtcgacccttgtgttgtcagaccacgtgttgcagagcaacctgttgtaggccatcatgttgtggctcctcatgctag

SEQ ID NO: 25086 - DNA, 1296 bp, synthetic construct
  source 1..1296: mol_type = other DNA; note = Synthetic coding sequence
atgaccagcgactgcagcagcacccactgcagccccgagagctgcggaaccgcctcaggctgcgccccagcctcaagctgcagcgtcgaaactgcatgtctgcctgggacatgcgccacatcccgctgccagactcctagctttctgtctagaagcagaggtttaaccggctgtctgcttccctgctatttcactggcagttgtaacagtccttgcctggtgggcaattgtgcatggtgcgaggacggggttttcacttcaaacgaaaaggaaacaatgcagtttttaaacgacaggctcgctagttacctggagaaagttagaagccttgaggagactaacgcagagctggaatcacgcattcaggagcagtgcgagcaagatatccccatggtctgtccagattaccagcgatacttcaacacaattgaggatctacagcagaaaatcttgtgcacaaaggccgaaaactcacgtcttgcagtacagctcgacaactgtaagctggccacagacgactttaaatccaagtacgaaagcgaactcagtctgaggcagctcctggaagccgacatatcctcgcttcacggcattctggaagaattgaccctctgcaaatctgatctggaggcacatgtcgagtccctaaaggaagatcttctttgcttaaaaaagaaccatgaggaggaggtcaatctcttgcgcgaacaactcggcgacagactctctgtcgagctggatactgcacccactctcgacctgaaccgtgttctcgacgagatgcgctgtcaatgtgaaactgtgctggccaataatcgtcgggaggccgaggagtggctggctgtccagacggaagaacttaaccagcagcaactgtcttctgccgaacagcttcagggatgccagatggagatcctcgagctcaagcgcaccgcctcggctctggaaatcgagctccaggcccagcaaagtttaactgagtcattagaatgtaccgtcgccgagaccgaggcccaatatagcagccagctggcccagatccagtgtctgattgacaacctggaaaatcagctagccgagatacgctgtgatctcgaacggcagaaccaggagtaccaggtgctcctggacgtgaaggctcggttggaaggtgaaattaatacatactggggtctgctcgacagtgaggattccaggctgtcatgcagcccgtgttctacgacctgtacttcatccaacacgtgtgagccatgctccgcgtacgtcatttgtacagtggagaactgctgcctatag

SEQ ID NO: 25087 - DNA, 471 bp, synthetic construct
  source 1..471: mol_type = other DNA; note = Synthetic coding sequence
atgggctgctgcggctgcagcggcggctgcggcagcggctgcggcggatgcggaagcggaagcggcggctgcggcagtggctgcggggggtgtgggagctcatgttgcgtgccaatctgctgctgcaagccggtttgctgctgtgtacccgcgtgcagctgctctagctgcggatcatgcggcgggtcgaagggtgggtgtggaagctgcggatcatctaaaggcgggtgcggatcatgcgggtgttcgcagagtaactgttgtaagccctgttgcagcagtagcggatgcggcagtttctgctgccagagttcctgtagtaagccctgttgctgtcagtcatcctgctgccagagctcctgctgcaagccatgttgttgccagagcagctgctgtcagagctcatgtttcaagccttgctgctgtcaatcgagttgctgtgtccctgtttgctgccagtgcaagatctag

SEQ ID NO: 25088 - DNA, 609 bp, synthetic construct
  source 1..609: mol_type = other DNA; note = Synthetic coding sequence
atgggctgctgcggctgcagcggcggctgcggcagcggctgcggcggctgcggtagtggatgtggcggttgtggttctggatgtggcgggtacggctcaggttgtggaggatgcgggtcttcttgctgcgtaccagtgtgctgttgcaagcctgtgtgttgctgcgttccagcctgttcctgtagttcctgcggcagctgcggcgggtcgaaaggagactgcgggagctgcggcggcagcaagggcgggtgcggatcctgcggaggctccaagggaggctgcggctcatgtgggggatcaaagggggggtgtgggtcatgtgggggctccaagggtgggtgcggctcctgtggcggaagcaagggtggatgtggctcctgcggcgggagcaaaggaggatgcggatcctgcggatgctcccagtgtaactgctgtaaaccctgctgttgcagtagcggctgcggctcttgttgccagagttcctgctgcaatccttgctgctgtcagtcgtcatgttgcgtcccggtgtgttgccagagtagctgttgtaagccttgttgttgccagtcgagctgttgtgtgcctgtgtgctgccagtgtaaaatatag

SEQ ID NO: 25089 - DNA, 498 bp, synthetic construct
  source 1..498: mol_type = other DNA; note = Synthetic coding sequence
atgggctgctgcggctgcagcgagggctgcggcagcggctgcggcgggtgtggatcaggatgtggcggatgtggaagtggttgtggtggctgtgggtcatcatgctgtgtcccagtatgttgttgcaagcccgtctgttgctgcgtcccggcatgcagttgcagctcctgtggctcctgcggcggttccaaaggcggatgtggctcatgcgggggctctaagggtgggtgcgggtcttgtggcgggtctaaaggtgggtgcggttcttgtgggtgtagtcagtgctcgtgctacaaaccatgttgctgctcatctggctgtggtagctcctgctgccagtccagttgctgcaaaccttgctgctgccagagctcatgttgcaagccatgctgctgcagctctggatgcggcagctcgtgttgccaatcgagttgctgtaatccctgttgttcccagagcagctgttgtgtgcctgtttgctgtcagtgcaagatctag

SEQ ID NO: 25090 - DNA, 3105 bp, synthetic construct
  source 1..3105: mol_type = other DNA; note = Synthetic coding sequence
atggccagcgtgttcatgtgcggcgtggaggacctgctgttcagcggcagtcgctttgtttggaatctgaccgttagcacactgcgtagatggtacactgagcgtttacgggcttgccaccaggttctgcggacctggtgtggcctgcaggacgtgtatcagatgaccgagggacggcattgccaggtccacctgctggacgataggcggctggaactcctggtccagcccaaactcctcgcccgcgagttgctcgatcttgttgcctcccattttaacttaaaggaaaaagagtacttcggaattacattcatcgacgatacaggccaacagaactggctccagttagaccacagggtcctggatcatgatctgccgaaaaagcctggaccaaccatcctgcacttcgcagtccggttctatatcgaaagcataagttttctcaaagacaaaacaaccgtggagctgttctttctgaatgctaaggcctgtgtgcataaaggtcagattgaagtagagtctgagaccattttcaaacttgcagcttttatcctacaggaggccaagggggactatacctcagatgaaaatgcacggaaagacctcaaaaccctgcctgcattccctaccaagaccctgcaggaacatcctagtcttgcatactgtgaggaccgagtgatcgagcattatctcaagatcaaaggactgacgcgaggacaggccgttgtccagtacatgaagatcgtggaggcactgccaacgtatggagttcactattacgcagttaaagataaacagggtttgccgtggtggctcggaatcagctacaagggcatcggtcagtacgatatccaggacaaagttaagccgcgcaagctctttcaatggaagcagctcgagaatctgtactttcgcgagaagaaattcgcagttgaggtgcatgacccgcggagaattagcgtgtcacgcagaacttttggacagtccgggttgttcgttcaaacttggtatgcaaattcttcgcttatcaagagtatctgggtaatggccatatctcagcaccagttttacctcgatagaaaacagtccaaggctaagatacctagcgcccgttcactggatgaaatcgcgatggacctaacggagacgggcacccaacgcgcctcaaagctggtcaccctcgagactaaatcacagtttatcatggcctctaacggctcattgattagctctgggtcccaagattccgaagtgagtgaggagcaaaaaagggagaagatactagagctgaagaagaaggagaaactcctgcaggaaaaactattaaaaaaggttgaagagctgaagaagatctgcctgcgtgaggcagagctcacaggcaagatgcctaaagaatatcctttaaatattggggagaaacccccgcaagtgcgtagaagagtgggaacagcgtttaaacttgatgacaaccttctaccatccgaggaggatcctgctctccaagaactggagtcgaattttctcatccagcagaaattagtggaagctgcaaagaaacttgctaacgaaccggacctgtgtaaaactgttaaaaagaaaagaaaacaagactatacagacgcaatgaagaaacttcaagagatagaaaacgcaataaacgagtacaggatcagatgcggcaaaaaaccgtcgcagaaggccaccgttttgcctgaagatataattcctagtgagagcagtagcctgtccgacaccaccacgtatgatgatccatcggatgcctttaccttccccgggcagcgctcgtcgagtgtgccccattcacccagaatactgccccccaagtccctgggtatcgaaaggatccattttcggaagagtagtattaatgagcaattcgtggacacccgccagtcgagggaaatgctgtctactcactcgtcgccctacaagaccctagaacggcgtccccagggaggccgttccatgcctactacccccgtgttgactcgaaacgcctatagctcaagtcacttagagccggaaagcagtagtcagcattgtcggcagcgcagtggtagcctcgaatctcagtctcacctgttgtctgagatggattccgacaaacccttcttctctctctcaaaatctcaacgatcctcatcaacagagatcttagacgatggcagtagctacacaagtcaatccagtaccgagtattactgtgtgactcccgtgaccggaccctactacacaactcagacgcttgacactagaacccgcggtagacggagaagtaagaaacagaatgtctccacgtctaactctggctctatgcccaacctggcccagaaggattcgctgcgaaatggggtttacagtaagtcacaggaacctcccagcagttcatactatatcgctggttatacaccctacgctgaatgcgacttttactactccggaggatacgtatacgagaatgacaccgaaggccaatatagcgtgaatcctagctacagatcttccgcccactacggctacgagcggcagagggactactcgcgctcctttcatgaggacgaggtggatcgcgtcccgcacaacccgtatgccaccctgcggctgccgaggaaggccgctgctaagtcggaacacatcacaaaaaatattcacaaagctctggtggctgaacacctgagaggctggtatcaacgggcttctgggcagaaggaccagggccacagtccacagacttccttcgattctgacagaggtagccagcgctgtctgggattcgctggccttcaggtgccatgcagcccttctagtcgggcaagcagctattcttcagtgtcttctacgaacgccagtggaaactggcggactcagctcactatcggactatcggactacgagactcccgcccattctagctatacttcttgctacggtaatgtctataatccacttccttctccaagtcgccagtacacagagatctcccagctggacggcacagatggtaatcaattagaggacaatctcgagtcaagtgagcaaaggttgttttggcacgaggactccaagccagggacgctggtctag

SEQ ID NO: 25091 - DNA, 501 bp, synthetic construct
  source 1..501: mol_type = other DNA; note = Synthetic coding sequence
atgctgagccagagctgcaacctggaccccctgaccgagacctacggaattcctttctatctacagtacctggcgcattggcccgaatattttattgtggcagaagctcctggcggcgaactcatgggatacatcatgggaaaagctgaggggagcgttgcaagagaggagtggcatggtcacgtcaccgccctttcagtggcacctgagtttaggaggctgggcctggctgccaaactgatggaactcctagaggagatttcagagaggaagggtggatttttcgtggacctcttcgttcgagtatctaaccaggtggcggtaaacatgtataaacagttgggctactctgtctacagaactgttatcgagtactactctgcgtccaatggtgagccagacgaggatgcctacgacatgcggaaagcactatccagagacactgaaaaaaagagtatcattcctctgccccatccagtgcgtccagaagacattgagtag

SEQ ID NO: 25092 - DNA, 399 bp, synthetic construct
  source 1..399: mol_type = other DNA; note = Synthetic coding sequence
atgcgggccagcccctgcatcagccagcccgccgccagctggcaccccagacctagcgccctccggcctacggcgggctcaggaccagacacaagaaccccagggactgtcgaagacggttcagcaccttgtccggcgttcaggtctcctgcggtgtccccctgcggtgaagagccgtgttgcttccagatctcgcctgccgaggagacgctcgagctggggaggcttgtgtcacccggaaattgcgacactttgtcaccccgcgccgccggattctacgcctgccacgtaagatcacttatcccctgtcgttcaacgaaagggcggtggccattgacggcaagtgctgccggtctgtcccggcacgctcagtgcgggccctccttaggcctgggatag

SEQ ID NO: 25093 - DNA, 375 bp, synthetic construct
  source 1..375: mol_type = other DNA; note = Synthetic coding sequence
atgcgggccagcccctgcatcagccagcccgccgccagctggcacccaagaccaagtgctctgcggcccacagccggaagcggaccggacaccaggaccccgggcactgtggaggacgggtccgctccctgccctgctttcaggagcccggcagtgagtccctgcggggaggagccttgctgtttccagatatctcctgcggaggagacacttgagctcgggagactggtctccccagggaattgcgacaccctgtcaccacgcgcagccggcttttatgcgtgtcatgtcagatccctgataccatgtaggtccactaaaggcagatggccccttacagcctcggccgccggactgagcagtttctcagggtag

SEQ ID NO: 25094 - DNA, 336 bp, synthetic construct
  source 1..336: mol_type = other DNA; note = Synthetic coding sequence
ctgatggacctggacagcggcgacgtgaagcggcgggtgcacctgttcgaaactcagcgacgcactaaggaagaagaccctataatccctttctccgatgggcccatcataagcaagtggggggcaatcagccgatcgtcaaggactggctaccatacaacggatcccgtgcaagcaacagcgtcccaggggtctgcgacaaagcccatatccgtcagtggaggagtgcacatggccacacgcccacatcatcaacacactatgttgaaaggtaccgactcactcctcctgatttacctggtgattgagagcatcccggttctcggcacattctag

SEQ ID NO: 25095 - DNA, 399 bp, synthetic construct
  source 1..399: mol_type = other DNA; note = Synthetic coding sequence
atgcgggccagcccctgcatcagccagcccgccgccagctggcaccctaggccatccgccttacgacctacagccggctctggccctgatacgcggacgcctgggacagtggaagacggctcagcaccctgtcccgcttttaggtctccagcagtctctccgtgcggcgaggagccatgttgcttccagatctcaccagcagaagaaaccttggagttaggccggctagtatcacctggaaattgtgatactttatctccccgggcggccggattctatgcttgtcatgtccgatctctgataccttgccgatccacaaaggggcgatggccattaactgcgagcgccgccggcctgagccggcacgcacaatgcggcccttccctggggctcgggtag

SEQ ID NO: 25096 - DNA, 375 bp, synthetic construct
  source 1..375: mol_type = other DNA; note = Synthetic coding sequence
atgcgggccagcccctgcatcagccagcccgccgccagctggcacccacgtcctagcgcccttcggccaacagcaggatctggacccgacacgcgaactcctggcacggtagaagacggctcagccccgtgtcccgccttccgctcaccagccgtctcaccgtgcggggaggagccttgctgctttcagatctccccagcagaggagaccctggagctcggccgcctggtatcccccggaaactgtgatacactgtccccccgagcagctgggttttatgcctgtcacgtaaggagcttaattccatgtagaagcacaaagggacgttggcctttgaccgccagtgctgctggactgagctccttttctggatag

SEQ ID NO: 25097 - DNA, 1038 bp, synthetic construct
  source 1..1038: mol_type = other DNA; note = Synthetic coding sequence
atgctgcccaacaccggccggctggccggctgcaccgtgttcatcacaggcgccagtcgcggaattgggaaggccatcgccctaaaagccgcgaaagatggggccaatatcgtcatcgcagctaagacagctcagccacatcccaagctgctcggcactatctatacagcagccgaagagatcgaagcagtcggcggcaaggctctaccatgcatcgtcgatgtaagggatgaacagcagatttcagcagccgtggaaaaggccatcaagaaattcggcgcctacaccatagctaaatacggcatgagtatgtacgtgctcgggatggcggaggagttcaagggagagattgcggtcaatgctctgtggcccaagaccgcgattcacacggccgctatggatatgttgggcggccctggtattgaaagtcagtgtaggaaggtagatatcatcgctgacgcagcttactccatctttcagaagcctaagtcattcaccggaaattttgtgatcgatgagaacatattgaaggaagaagggattgaaaactttgatgtctatgcgatcaagccaggccaccctctgcagcctgatttttttcttgacgaataccccgaggccgtgtcaaaaaaagtcgagtctacaggcgccgtcccggaattcaaggaagaaaaacttcagctccaacccaagccacgctcaggagccgtagaggagacatttaggatcgtgaaggacagtcttagcgatgacgtggttaaggcaacccaggctatttacctttttgagctatccggggaggacggcgggacttggttcctggacctaaagtcaaaaggtgggaatgtggggtatggcgagccctccgaccaagccgacgtcgtcatgagcatgacgaccgatgattttgtgaagatgttttccggaaagctcaaacctaccatggcctttatgtcaggcaaattaaagatcaaaggaaatatggcactggccataaaactggagaaacttatgaatcaaatgaatgccaggctctag

SEQ ID NO: 25098 - DNA, 1257 bp, synthetic construct
  source 1..1257: mol_type = other DNA; note = Synthetic coding sequence
atgctgcccaacaccggccggctggccggctgcaccgtgttcatcacaggcgcgtctcggggcattggtaaggccatcgcactgaaggccgcgaaagatggagccaatattgtaatcgctgctaaaacggcccaaccccacccaaaattgcttggaacaatttatacggccgctgaagaaatagaggccgtaggcggaaaagccctgccctgcattgtggacgtgcgggacgagcagcagatctctgcagcagtggagaaagctatcaagaaattcggagggattgatatcctcgttaacaatgcatccgccatctccctgactaacaccctggatacacctactaagcgtctggacctcatgatgaacgtcaacaccaggggcacttacttggcaagcaaagcctgtataccttatctaaagaagagcaaagtggcacacatactgaatatttctcctcccctcaatctgaacccagtctggttcaagcagcactgcgcttatactattgcaaaatatggaatgagcatgtatgtgttggggatggctgaggaattcaagggggaaatagcagtgaatgcgctgtggccaaagaccgctatccatacagccgctatggacatgctgggcggccccggtatagagtctcagtgcaggaaagtggacattatcgccgacgcggcttactctattttccagaagcccaaaagcttcaccgggaatttcgttattgacgagaacatcttgaaagaagagggaattgaaaattttgatgtttacgctatcaaacctgggcatcccctccaacccgacttctttttggatgagtatccggaagcggtgtccaaaaaggttgagtccaccggagcggtcccagagtttaaggaggagaaattgcagctgcaaccaaaacctcgctctggggccgtcgaggagacctttcgcattgttaaagattcactgagtgatgacgtcgtgaaggcaacccaggctatttatttattcgaactatcgggggaggatggcggcacctggttcctcgatcttaaatctaaaggcggtaacgtgggatacggcgagccatcagatcaagcagacgttgtaatgagtatgaccaccgacgatttcgtgaagatgttttcaggcaaattgaaacctaccatggcctttatgagcggcaaattaaagataaaaggtaatatggctctggctataaagttggaaaagttgatgaaccaaatgaacgcgcggttatag

SEQ ID NO: 25099 - DNA, 1077 bp, synthetic construct
  source 1..1077: mol_type = other DNA; note = Synthetic coding sequence
atgcccggctgcgagctgcccgtgggcacctgccccgacatgtgcccggcagcggagagggcccaacgggaaagggaacatcgactgcaccggttggaggttgtgcctggatgtcgtcaagatccgccaagagctgacccgcagagagccgtcaaggagtattcaaggccagcagctggcaaacccagaccccctcctagtcagttacggcccccttccgttctcctggctaccgttcgatatcttgcgggggaggtagcggaatcagccgatatcgctagggccgaagtcgcatcatttgtcgcagaccggctccgcgccgtgctcctcgatttggcattacaaggagccggggatgcagaggcagcagtggtgctggaggctgcacttgccactctcctgaccgtcgtagcccggttgggccccgatgccgcccgcggccccgcagacccagtgctactccaagcacaggtacaggaaggcttcggatccctccgaagatgttacgcccggggcgcgggccctcaccccagacagcccgcatttcagggcctgtttctgctctacaatctggggagcgtagaggcccttcacgaggtgttacagctgcccgcagccctgcgagcctgcccccccctgcgcaaagctctcgcagttgatgccgccttcagagaggggaatgcagctcgcctgttccggctcctgcagaccctgccttacctgcccagttgcgcggtacagtgccacgttggacatgcccggagggaggctctcgcccggttcgctagagcctttagcaccccaaaaggccagaccctccccctcggcttcatggtcaacctgttggctcttgacggcctgcgcgaggcaagggacctgtgccaggcgcatggactgcctctggatggggaagaaagggtagtgtttctacggggaaggtatgttgaggaaggactgccaccagcctcaacatgcaaagtactggtcgagtccaaactgcgaggcagaacgcttgaggaagtggtcatggcggaagaagaagacgagggcacggataggcccggcagtcccgcttag

SEQ ID NO: 25100 - DNA, 150 bp, synthetic construct
  source 1..150: mol_type = other DNA; note = Synthetic coding sequence
atgagcagctgcgtgagcagccagcccagcagcaaccgggccgccccccaggacgaactgggaggccggggatcatcttcctctgagtcccagaaaccatgcgaagctctaaggggcctgtccagcttgagcatacacctggggatgtag

SEQ ID NO: 25101 - DNA, 2598 bp, synthetic construct
  source 1..2598: mol_type = other DNA; note = Synthetic coding sequence
atgcccgccgtgagcctgccccccaaggagaacgccctgttcaagagaatcctgagatgttacgagcacaagcaatatcggaatggccttaagttctgcaagcaaatcctgagtaaccctaaatttgcagagcatggcgagacactggcaatgaaaggacttactcttaactgtttaggaaaaaaagaggaagcttatgagttggttagaaggggactgaggaacgaccttaagagtcacgtctgctggcatgtttatggtctgttgcagcgcagcgacaaaaagtacgatgaggccattaagtgctaccggaacgcactgaagtgggacaaagacaacctccaaatcttgcgtgacctgagcttgctgcagatacagatgcgcgatcttgagggataccgagaaactagatatcagctgttgcagttgagacctgcacagcgggcctcctggatagggtacgccattgcctaccatcttctggaggactatgaaatggccgcaaaaatcttggaggagtttaggaagactcagcagaccagtccggacaaagttgattacgaatatagcgagttactgctgtatcagaatcaggtcctcagggaagcaggtctgtaccgagaggccctggaacacctctgtacatatgagaagcaaatctgtgataaactggccgttgaggaaaccaagggggagttattattgcagctctgtcgcctggaggatgccgccgacgtctaccgcggccttcaggagaggaatccggagaattgggcctactacaaaggcctcgaaaaggctctcaagccggccaacatgctagagaggttgaaaatctacgaagaggcatggaccaagtatccaagaggactcgttcccaggaggctgccactgaattttctcagcggcgaaaagttcaaggagtgtctcgataagttcctgcgaatgaacttttccaagggatgtccccccgtgtttaataccttaaggtctctatataaggacaaggaaaaggtcgctattatcgaggagctggtggtaggctacgagacctctctgaagtcttgtaggctctttaaccctaatgatgatgggaaggaggagccaccaacaacactgctttgggtacagtattatctggctcagcattatgataagatcggacaacccagcatcgctctggagtacatcaacaccgctattgagtctacacccaccctcattgagctcttcttggtaaaggcaaaaatctacaagcatgccggcaatattaaggaagcagctcgctggatggacgaggcacaggcccttgacacagctgatcgctttatcaatagtaagtgtgccaaatatatgctaaaggcaaacttaatcaaggaggctgaagagatgtgctccaagtttacaagagaggggactagcgccgtggagaacctgaacgagatgcagtgcatgtggtttcagacagaatgtgcacaggcatataaagccatgaacaaatttggggaagcactgaaaaagtgtcacgaaatcgagcggcacttcatcgaaataacagacgaccaattcgatttccacacctattgtatgcgtaaaatcacactccgaagctacgtcgatctccttaagctagaggatgtgcttaggcagcatcctttctattttaaggcagctcgcatcgcgattgaaatctaccttaagcttcacgataatccgctaactgacgaaaacaaagagcacgaggctgatacagctaacatgtctgataaggaactgaaaaaactccggaataagcagcgaagggctcagaaaaaggcacaaatcgaggaagagaaaaagaatgccgaaaaagagaagcaacaaagaaatcagaagaaaaagaaagacgatgacgatgaagaaataggtggacccaaggaggagttgatcccggaaaagcttgcaaaggtggagacacccctggaggaggctatcaaattcctgaccccattgaagaatctcgtcaaaaacaaaattgaaacccatctctttgcgtttgagatctattttcgaaaagagaagttcctgctgatgttgcagtcagtgaaacgagcattcgccattgacagtagtcacccttggctgcacgaatgtatgatcagactattcaacacggtctgcgaaagtaaggacctgtctgataccgtgcggacagtgctgaagcaggagatgaacagactctttggcgccactaatcccaaaaacttcaatgaaacatttctgaagcggaattccgatagtttaccccatcggctgtcagccgcaaaaatggtatactacttagaccctagttcccagaaacgcgcgattgagctggctactacgctggatgaatccctgacgaatcgaaacctgcaaacatgtatggaagtcctcgaggccctgtacgacgggagtctgggagactgcaaggaagcagccgagatatatcgggctaattgtcataaattgtttccatacgcccttgccttcatgcctccaggctatgaagaagatatgaaaatcacagtgaatggagactcaagtgccgaagccgaagagctggctaatgaaatttag

SEQ ID NO: 25102 - DNA, 1797 bp, synthetic construct
  source 1..1797: mol_type = other DNA; note = Synthetic coding sequence
atgggcggctgcttcagcaagcccaagcccgtggagctgaagatcgaagtggtcctccccgaaaaagagcgagggaaagaagagctgtcagcctccgggaaaggcagccctcgggcctaccaggggaacggaacagcccgtcacttccacaccgaggaaagactgagcaccccacatccatacccttctccccaggactgtgtcgaggccgctgtgtgtcatgttaaagacctggagaacgggcaaatgcgcgaagtggagctgggctggggtaaggtgctgctggtgaaggataatggagaatttcatgccctggggcataagtgcccgcactacggcgcaccacttgtaaaaggtgttctgagcaggggtagggtccggtgtccgtggcacggtgcttgtttcaacattagcacaggcgacttggaggattttcccggcctcgactcactccacaagttccaggtgaagattgagaaagagaaagtttacgtacgcgcttcgaaacaggccctccagttgcagagaagaacaaaggtgatggcaaaatgcatttcaccttccgccggctactctagttccactaacgtcctgatagtgggcgcgggtgccgctggactggtgtgcgcagaaaccctccgccaggagggtttttccgatcggatcgtgctctgtactctggatcgtcacctgccttacgaccgccctaaactaagcaagtccctggacacacagccagagcagctggccctgcgccccaaagaattcttcagagcctatgggatcgaggtgctgacagaggcgcaagtggtgacggtcgatgtgagaaccaagaaagtggtttttaaagacggattcaagctggaatattccaaactgcttcttgctccaggatcaagccccaaaaccttatcgtgtaagggcaaggaagtggaaaatgtattcacgatacgaactcctgaggacgccaacagggtagtgcgcctggcacgcggccgaaacgtggtggtggtcggcgccggcttcctgggaatggaagtggcggcttaccttactgagaaggctcacagtgtatcagtggtggaactggaggaaaccccttttcggcgattcctgggcgagcgcgtgggccgcgctctcatgaaaatgttcgagaataatagagtaaaattttacatgcagaccgaggtgagtgagctcaggggccaagaaggcaaactgaaggaagtggtgttgaagtcctccaaagtggtacgggcggacgtgtgtgtggtgggtatcggtgccgtgccagccaccggcttcctcagacagagtggtatcggactcgattctagaggttttatacccgttaacaagatgatgcaaactaacgtgcccggagtgtttgcagcaggcgacgctgttaccttccctttagcctggaggaacaatagaaaggtcaacattccccattggcagatggctcacgctcagggtcgggtggcagcacagaacatgctggcgcaggaagctgagatgagtacggtcccatacttatggactgccatgttcgggaagtctctgagatatgccggctatggcgagggattcgacgacgtcattattcagggtgacctggaagaacttaagttcgtggccttctacaccaagggagatgaggtgatcgccgtggcctccatgaactatgatccaatcgtttctaaggtggcggaggtcctcgcgagtggccgagcaatccggaagagggaggtggaaactggtgacatgagctggctgaccggcaagggctcctag

SEQ ID NO: 25103 - DNA, 1818 bp, synthetic construct
  source 1..1818: mol_type = other DNA; note = Synthetic coding sequence
atgggcggctgcttcagcaagcccaagcccgtggagctgaagatcgaggtcgtcctgccagaaaaggaacgcggtaaggaggaactctctgcatccggaaagggctccccacgcgcttaccagggcaacggtacagcacggcacttccacactgaggaacgtcttagtacccctcatccctaccccagccctcaggattgcgttgaggcggctgtgtgtcatgtcaaagatctggaaaatggccaaatgagggaagtggagctggggtgggggaaagtgctcctagtcaaggacaacggtgagtttcatgctctgggccataaatgtccacattatggcgcgcctctggtcaaaggggtattatcaaggggaagagtgcggtgcccgtggcacggcgcctgttttaatatctcgaccggcgaccttgaagacttccctggcctggactctctccacaaatttcaggtgaaaatcgaaaaagagaaagtgtatgtccgagcgagcaagcaggccttgcagctccagaggcggacaaaggtgatggccaagtgcatctcaccatccgcaggctattcgtcttctacaaatgtcttaatagtgggagcgggggcagccgggctcgtgtgtgcggagactctgcgccaggaaggattctccgaccggatagtcctctgtaccctggacaggcatctgccatacgaccgacccaaacttagcaaatctctcgacacccaacctgagcaactggcactgagacctaaagagttcttcagagcttatggaattgaggttctcacagaggcgcaggtggtgaccgtggatgtaagaaccaagaaagttgtgttcaaggatggttttaagctcgagtacagcaagctgctcctcgcccccgggagcagccctaaaaccttaagctgcaaaggtaaggaagttgagaatgtgtttacaatccgcacccccgaagatgctaaccgcgttgtgcgactggctcgggggcggaacgtggtggtagttggggccggctttcttggaatggaggtggccgcctacctgaccgaaaaggctcacagcgtgtccgttgtggagttggaggaaacaccctttagaagattcctaggggaacgcgtgggtcgcgctttaatgaaaatgtttgagaataacagagtcaaattctatatgcagacagaagttagcgagttacgcggtcaggagggcaagctgaaagaagtcgtcctgaaatcttcaaaagtggtcagagccgacgtgtgtgttgtgggaatcggggcagtcccagctactggattcctgcgtcaatccggaatcgggttagattctcgaggtttcatacccgttaataaaatgatgcagaccaatgttccaggtgtcttcgccgcaggagacgcagtaacatttccgttggcttggagaaataaccgcaaagttaatatcccacactggcagatggcccatgcacaggggcgagtggcagcccaaaacatgctggcgcaggaagctgagatgagcacagtcccctacctttggacggcgatgtttggcaaaagccttcgctatgcagggtatggggaagggtttgatgatgtaatcatacagggagacctagaagagctcaagttcgtggccttctacaccaagggtgatgaagttatcgccgtggcgtcaatgaattatgatccaatcgtcagtaaggttgccgaggtcctcgcaagcggacgcgccatccgtaaaagagaagtggagctttttgtgctgcattccaagacaggtgacatgagttggctgacaggcaaaggatcctag

SEQ ID NO: 25104 - DNA, 1374 bp, synthetic construct
  source 1..1374: mol_type = other DNA; note = Synthetic coding sequence
atgaaccagccctgcaacagcatggagccccgggtgatggacgacgatatgctcaaactggcagtgggggatcagggacctcaggaagaagccggacagctggctaagcaggaagggattctctttaaggatgtgttgagtctgcagctcgactttaggaacatcctgcgaatcgacaatctttggcagttcgaaaaccttcggaaactgcagctcgacaacaatataatagagaaaattgagggtctcgaaaatctcgcccacctggtgtggcttgatttgtcattcaacaacatagaaaccattgagggcctcgatactctcgtgaacctggaggacctctctctgtttaataataggatctcaaaaatagactcccttgatgcgctggtgaagctgcaggtcctgtcactaggaaataatcggattgacaatatgatgaacataatctatcttagaagattcaaatgcctcaggacgctgagcctgagtaggaatcctatcagcgaagccgaagactacaagatgttcatttgcgcctacttgcccgatcttatgtaccttgattaccggagaattgacgaccacactaagaaactcgccgaggcaaagcatcagtactcgatcgacgaactgaagcatcaagagaaccttatgcaagcgcagctcgaagatgaacaggcgcagagggaggagttagagaaacacaagacagcgtttgtcgaacatttgaacggctctttcctcttcgacagcatgtacgcagaagactccgaagggaataacctgtcctacctgccaggagttggagaactcctggagacctacaaggataagttcgttatcatctgtgtgaacatctttgaatacggcctcaagcagcaggaaaaacgcaaaacagagttggacaccttttctgagtgcgtgcgggaggccatccaggagaatcaggaacaggggaagaggaagatcgctaagttcgaggagaaacacctatcttcactgtcagctattagagaggagctagaattaccgaacatcgagaagatgattctagagtgctctgctgacatctctgaactcttcgacgctctgatgacactggaaatgcagctggtggagcaactggaggagacaatcaatatgtttgagcgaaatatcgtggacatggtcggactatttattgagaatgtgcagtcattgatggctcagtgtagggatttggagaatcatcaccacgagaaacttttggagatctctatcagcacgctcgaaaaaattgtggagggcgacttagatgaggacctccccaatgatctccgcgcgggaagatttcagaagttcaattacgttgaagcttccggtacattctag

SEQ ID NO: 25105 - DNA, 1374 bp, synthetic construct
  source 1..1374: mol_type = other DNA; note = Synthetic coding sequence
atgaaccagccctgcaacagcatggagccccgggtgatggacgacgacatgctgaagttggctgtgggagaccaggggcctcaggaggaggcagggcaactggccaagcaggagggaatcctgtttaaggacgtcctcagtctccagcttgactttagaaacatcctacgcatcgacaacctttggcaatttgagaacctccggaagttgcaacttgataacaatataatcgagaagatcgagggactggagaacctggcccacttagtgtggttggatctgagttttaacaacatcgaaaccattgaaggcttggataccctcgtgaacctggaagacttaagtctgtttaataacagaatctcgaaaatagattccctagacgctcttgtgaaactacaagtactatccctggggaacaacagaatcgataatatgatgaatatcatctacctgcgtcgctttaagtgcctccggaccttatcactgagccgcaatccaatttccgaggccgaagattataaaatgttcatatgcgcctacctccctgacctcatgtacctggactataggcgaatcgacgaccacacaaagaaactagcagaagcgaagcatcagtactctattgacgagcttaaacatcaggaaaacctgatgcaggcccagctggaagacgagcaagcccagcgggaggaactggagaagcacaagactgcatttgtcgaacacctcaacggctctttcctcttcgacagcatgtatgcggaggactccgaggggaacaatttgtcttacctacctggagtgggagaattattggaaacatacaaggataaatttgtaattatctgtgtgaatatttttgagtatggtctgaagcagcaggaaaagaggaagacagagctcgacacattttccgaatgcgtgagagaagccatccaggagaatcaggaacagggcaaacgcaagattgccaaatttgaagaaaagcatctttcctccctttccgccatccgggaagagctggaactgcccaacatcgagaaaatgattcttgagtgctccgcagacatttccgagttattcgatgccctgatgacgctggaaatgcaattggttgaacaactcgaggagacgatcaatatgttcgaaagaaacatcgtcgacatggtggggttattcatcgagaacgtgcagtctctgatggcacagtgccgcgacctcgagaaccatcaccacgagaaattgttagagatctccatttcaactttggaaaagattgtcgagggtgacctcgacgaagatctccctaatgacctccgagcaggccggtttcagaaattcaattatgtggaagctagcggcacattctag

SEQ ID NO: 25106 - DNA, 1572 bp, synthetic construct
  source 1..1572: mol_type = other DNA; note = Synthetic coding sequence
atgaaccagccctgcaacagcatggagccccgggtgatggacgacgacatgttgaagttagcggtgggagaccaaggcccacaggaagaggccggacagctagcgaagcaggaaggcatcctctttaaggacgttctgagtctacaactagactttcgcaacattctacgtatagataatctctggcagttcgaaaatctgcgaaaactgcagcttgataataacatcatcgaaaaaatcgagggcctcgaaaacttagcacacctggtgtggctggatcttagcttcaataacattgaaactatcgaaggtctggacactctggtgaatctagaggacctgagcctgttcaataacaggattagcaaaattgatagcctggacgctttagtcaaattacaggtgctgtctctcgggaataaccgcatagacaacatgatgaacataatttacttgaggcgctttaaatgcctaaggactctttcactgagccgaaatcccattagtgaagccgaggattacaagatgtttatttgtgcctaccttcctgatttgatgtacctagactaccgcaggattgatgatcacacaaaaaagctcgctgaggctaagcaccagtattccatcgacgaacttaaacatcaagagaacctgatgcaggcacagctcgaggacgaacaggcccagagggaggaacttgaaaagcataagacagccttcgtggaacacctgaacggctccttcctgttcgattcaatgtacgccgaggactccgagggcaataatttgtcttacctgccgggagtaggagaactgctggaaacctacaaagacaagtttgtcatcatctgtgtgaatattttcgagtatggactcaagcagcaagagaaacgaaaaacggagctggacacattcagtgaatgtgtccgggaagcgatccaggagaatcaggagcagggcaagcgcaaaatcgctaagtttgaggagaaacacctgtcgtccctgtcagccatccgcgaagaactggagctccccaatatagagaaaatgatcctggaatgttcagccgatattagcgaactcttcgatgccctgatgaccctggagatgcagctggttgaacagctggaggaaacaatcaacatgtttgagcggaacatagtagacatggtcggtttgttcatcgaaaatgtccaatctttgatggcacaatgtagggacctagaaaatcaccaccatgaaaagttattggagatatccatttcaacactagagaagattgtggagggcgacctggacgaggatctgccaaatgatctaagggctctgttcgtggataaggacaccattgtgaacgccgtcggggcatctcatgacatccatctcctgaagatagacaatagagaagacgaactcgtcactaggattaactcctggtgtactaggcttattgatcgaatccacaaggatgagataatgagaaatcggaaaagagtaaaagaaattaaccaatatatagatcacatgcaatctgagttggataatctggagtgcggcgacattctagattag

SEQ ID NO: 25107 - DNA, 1572 bp, synthetic construct
  source 1..1572: mol_type = other DNA; note = Synthetic coding sequence
atgaaccagccctgcaacagcatggagccccgggtgatggacgacgatatgttgaagctcgctgttggggaccagggaccacaagaagaagcaggacaactggccaaacaggagggaatcttgtttaaagacgtcctgtccctgcagcttgacttcaggaacatactgaggatagacaatctgtggcagttcgagaatctgcgcaagttgcaactcgacaataatattatcgagaagatcgaaggactggagaatctagcccatcttgtgtggttagatttgtctttcaataatatagaaacaatcgaaggcctggatactctggtgaacctggaggacctgagcttgtttaataatcgaattagtaagatcgattcactggatgcactggtaaaactacaggtactgtccttgggtaataatcgaatcgataatatgatgaacatcatctatcttagacggtttaaatgcttacgaaccctttcactgtccaggaatcctatttctgaagccgaggattataaaatgttcatctgtgcatacctcccggacctgatgtatcttgattatcggcgtattgacgaccacaccaagaagcttgccgaggctaagcaccagtatagtatcgatgaactgaagcaccaggagaacctaatgcaggcacagctcgaagatgaacaggcacagcgggaggagcttgagaagcacaaaactgcattcgtggagcacctcaatggcagttttttgttcgactccatgtacgcggaggactccgagggcaataacctgtcttatctacccggggtaggcgaacttctagagacatataaggataagttcgtaattatctgcgtaaacatttttgagtacggtcttaaacaacaggagaaacggaagactgagctggacactttttccgaatgtgtcagagaagcaattcaggagaatcaggagcagggaaagcgcaaaatagctaagtttgaggagaagcacctgtcttcactgtcggcaatccgtgaggagttggaactgccaaatatagaaaagatgatcctcgaatgctcagcagacatctccgagctgttcgatgctttgatgacacttgaaatgcagctggtcgaacagcttgaggagacaattaacatgttcgaacgcaatatcgtggatatggtcggtctcttcatcgagaatgtacagtcactgatggcacaatgcagggaccttgaaaatcatcaccacgaaaagttgctcgagatctcaatctccaccctcgagaaaatcgtcgagggagatctcgatgaagatctccctaacgatctccgagccctgttcgtggataaggacaccattgtgaacgccgtgggagccagtcacgatatccacctactcaagattgataatagggaggacgaactagtgactagaattaacagttggtgcacccgtttgatagaccggattcacaaggacgaaatcatgagaaacagaaagcgtgtaaaagaaataaaccagtatatagaccacatgcaaagtgaactcgacaatctggagtgtggggatattcttgattag

SEQ ID NO: 25108 - DNA, 1842 bp, synthetic construct
  source 1..1842: mol_type = other DNA; note = Synthetic coding sequence
atggccaccatccccgactggaagctgcagctgctggcccggcggcgccaggaagaggccagcgtgcgcggcagagaaaaagcggaacgggagcggctgtcccagatgccagcatggaaacgcggactcctcgagagacggagggcgaagctaggtttgagtccgggtgaaccctccccagtcctgggcaccgtggaagctggccctccggatcctgatgagtcagcggtgttattagaagccattggaccagtccatcaaaatcggtttatcaggcaagagcgccagcagcagcagcagcagcaacagcgcagtgaggaactactcgccgaaagaaaacctggcccccttgaggctagagaacgtagaccttcccccggcgagatgagggatcagagccccaagggacgggagtcccgggaagagaggctcagcccacgagagactcgcgaaaggcggttgggaatagggggtgctcaggagctgtccctgaggccacttgaggctcgggattggaggcagagtcccggtgaggtgggcgaccgatcctcccgccttagtgaggcttggaagtggagactcagccctggcgagacacctgagaggagcctgagactggccgagtcccgggaacaaagtcctaggcggaaggaggtcgaaagtagactcagccctggcgagtcagcgtaccagaaacttggcctgaccgaagcccataaatggaggcctgattctcgagagagtcaggagcagtctcttgttcaactcgaggcgactgagtggcgcttgcgcagcggagaggagcgtcaggattatagtgaagaatgtggtcggaaggaggaatggcctgttcctggcgttgctccgaaggagacagccgagttgtctgaaacgttgacccgagaagcccaggggaactcatcagccggagtggaggccgctgaacaaagaccagtggaggatggcgagcggggcatgaagccgactgagggctggaaatggacactgaattccggtaaagctcgggagtggacgccgagagacatcgaggcccaaacacagaaaccagagccaccggagagcgcagagaagctcttagagtctcctggggtagaggccggcgagggggaagccgaaaaggaagaggccggcgcccaaggcaggccactgagggccctgcaaaactgttgttcggtaccatccccattgccacccgaagatgccggaacaggaggcctccgacaacaggaagaagaggctgttgaactccagccaccccccccagcccctctctcccctccaccacccgctccaactgcaccccagccgcctggcgatcctctcatgtccaggttgttctatggtgtgaaagcgggccctggagtcggcgccccccgcaggtccggtcatacgtttactgttaacccgaggcggagtgtcccaccggctacacccgcaacgccaacatctccagcaacggtggatgctgccgtgccaggagcaggcaagaagcgctaccccaccgccgaggaaattctggttctgggtggctatctacgactgtccaggtcatgtctagccaaaggaagcccagagcggcaccataaacagctgaagatcagtttctcagagactgccctcgaaacaacctatcagtacccctccgagagcagtgtactggaagaactgggtccagagcccgaagttccatctgcccctaatcctcctgccgcccagcctgatgatgaggaagacgaagaggagcttctgcttctgcagcctgagctacagggggggctacgaacaaaggcgctcatcgttgacgagagctgtaggaggtag

SEQ ID NO: 25109 - DNA, 390 bp, synthetic construct
  source 1..390: mol_type = other DNA; note = Synthetic coding sequence
atggccgagctgatccagaagaagctgcagggcgaggtggagaagtaccaacagctccagaaagacctatctaaatctatgtcaggacgccaaaagctggaagctcagctgacggaaaacaacattgtaaaggaggaattggcactgcttgatggttcaaatgtagtgttcaagctcctggggcctgtgttagtgaagcaggagctgggagaagcacgggctacagttggcaaacgtctagactacataacggccgagatcaaaagatacgagtcccaacttcgggatcttgaacggcagagcgaacagcagcgagaaacacttgcccaactgcagcaagagttccagagagctcaggccgctaaggctggggcccctggaaaggcctag

SEQ ID NO: 25110 - DNA, 390 bp, synthetic construct
  source 1..390: mol_type = other DNA; note = Synthetic coding sequence
atggccgagctgatccagaagaagctgcagggcgaggtggagaagtaccaacagttacaaaaagacctgtcaaagagcatgagcgggcgccagaaattggaagcccagctcacggagaacaatattgtcaaggaggagctcgctctcttggacggtagcaacgtggtctttaaattgttaggacccgttcttgtgaagcaggaattgggtgaggcacgggcaaccgttggcaagaggttggattacattaccgctgagattaaaaggtatgaaagccagttacgagatctcgaacgccaatccgagcagcagagggagaccttggcccaactgcaacaggaattccaacgcgcccaggctgctaaagcaggggcgcctggcaaagcttag

SEQ ID NO: 25111 - DNA, 4128 bp, synthetic construct
  source 1..4128: mol_type = other DNA; note = Synthetic coding sequence
atggtgcccggcgaggagaaccagctggtgcccaaggaggacgtgttttggaggtgcagacagaatatttttgacgagatgaagaagaaatttctgcaaatagaaaacgccgccgaagaaccgcgagtgctctgcattattcaggacaccaccaatagcaaaaccgtcaatgagcgcataacccttaatttgcccgccagcacacccgttaggaaattgttcgaggacgtggcgaacaaggtgggatatataaacggcaccttcgatctggtgtggggtaatgggataaacacagccgatatggcccccctggaccatacatctgacaagtctttgctagacgccaactttgaacctggcaagaagaattttctccatctgacggacaaagacggcgagcagccacagatcttattggaggacagctcagccggagaggatagcgtgcacgaccggtttattggcccgctgccccgtgagggttcagggggctccacaagtgactatgttagtcaatcctattcgtattcctcaatcttaaataagtccgagacaggttacgtcggacttgtaaaccaggccatgacctgctacttaaactccctgctgcagaccctctttatgacccctgaattcaggaacgctttgtacaagtgggagtttgaagagagtgaggaggaccccgtgacttccatcccctaccagttgcagcgcctgttcgtgctccttcagacatcaaaaaagcgcgccatagagacaacagacgtgactcgaagcttcgggtgggactcctccgaggcctggcagcagcacgatgtccaggaactatgcagggtgatgttcgatgctctagagcagaagtggaagcaaaccgaacaagctgacctgataaatgagttataccagggaaagttaaaagactacgttaggtgtttggagtgtgggtacgaaggctggcggattgacacttacctcgacatcccactcgtcatacgaccttatgggtcgtcacaggccttcgcttccgtcgaggaggccctgcacgctttcatccaacccgagattctggacggacccaatcagtacttctgtgaacgatgtaaaaagaagtgtgatgcccggaaaggacttcgatttctgcatttcccttacctgttaacactacaactcaaaagattcgacttcgattacacaaccatgcatcggattaagctgaacgaccgcatgacgttccccgaggagcttgacatgtctacatttattgacgtggaagacgagaaatcccctcagacagagtcctgcacagattctggtgctgaaaatgaaggaagctgccattccgatcagatgagtaatgatttcagcaacgacgatggtgttgacgaagggatctgtttggagaccaactctgggacagaaaagatctcaaaatctggcctggagaaaaacagtcttatctatgagctgttctcggtgatggtgcattccggaagcgccgccggcgggcactattatgcttgcattaaatccttcagtgacgaacaatggtattccttcaacgatcaacacgtgtccagaataactcaggaggacataaagaaaacacacggcggcagtagcgggtcccgaggttactactcctcggcgtttgccagcagtacaaatgcgtatatgcttatttatcgcttgaaagatccagcgcgtaacgcgaagttcctggaagtggacgaataccctgagcacattaagaatctggtgcagaaggaaagggagcttgaggaacaggagaaacggcagcgggagattgagcgcaacacctgcaaaattaagctgttctgcctgcacccaacaaaacaggtgatgatggagaacaagctggaggtgcacaaggacaaaactctgaaggaggccgtggaaatggcatataagatgatggatctggaggaggtgattcctcttgactgctgcaggctcgtaaaatacgatgagtttcacgactatctggaacgtagctatgagggggaagaggatacacctatggggttgctgttagggggggtgaagagtacgtacatgttcgacctcctgttagagactagaaaacctgatcaggtgttccaaagttacaagcccggtgaagtcatggttaaagtgcacgtcgtggatctcaaagcggaaagcgtcgccgcccctatcaccgtacgagcttacctgaatcagacagtcacggagtttaagcagctgatatctaaagcaatacacctgccagccgagactatgagaatcgttctggaaaggtgttataatgacttaagactgctgagcgtgtcatccaaaactctcaaggccgaagggttcttccgctctaacaaagtgttcgtggagtctagtgagacccttgattaccagatggcctttgccgattctcatctttggaaactcttggatcgacacgctaacactatcaggctgttcgtactgctgcccgagcagagcccagtctcatactccaaacgtacagcatatcagaaagccggcggcgatagcggaaacgtcgacgatgactgtgaacgggtgaaaggacccgtaggatccctgaaatctgtcgaagccatcttggaggagtcgacagagaagctgaagtctttgagtctacagcagcagcaggacggagacaatggggattcttctaagagcactgaaacgagcgattttgaaaacatcgagtctccccttaatgagcgagattcttcagcgtccgttgacaatagggaactggaacaacatatccagacaagcgaccccgagaacttccagagtgaagaacggtctgactccgacgtcaataatgaccggtctacctcaagtgtggacagcgatatcctgtcatcctcgcattcatccgatactctgtgtaatgcagataacgcgcagataccactcgccaatggactagatagccattcaataacctctagtcgacggacaaaagccaacgagggaaaaaaggaaacctgggacactgcggaagaggactcgggcacagattctgagtacgacgaaagcggaaaatctagaggtgagatgcagtacatgtacttcaaggcagaaccgtacgccgcagacgagggatccggtgagggacataagtggctgatggtgcatgtcgacaagcgaatcaccctggccgcgttcaagcaacacctggagccctttgttggggtattgtccagccacttcaaggtgtttcgagtgtatgcttcaaaccaggaattcgaaagtgtccggctgaatgagactctcagcagcttttcagatgataacaagataacgattcgcttgggaagggcccttaaaaagggcgagtaccgggtgaaagtataccagctgctcgtgaacgaacaggagccctgcaagtttctgctcgacgccgtctttgctaagggcatgactgttaggcagtcaaaagaggaactcatcccccaactgagggagcagtgtggcctggagctgtccattgatcgctttcgcctccgcaaaaagacgtggaagaaccccggcactgtatttttagactatcatatttacgaggaggacattaacatttctagcaattgggaggtatttcttgaggtcctggatggcgttgagaaaatgaagtcaatgtctcagttagcggtgcttagtaggaggtggaaaccctcagaaatgaagctggacccattccaggaagtcgtgctggagtctagttccgtagatgaactgagggagaagcttagcgaaatctcaggaatcccccttgatgacatcgagtttgccaaaggaaggggcacgttcccgtgtgacattagcgtcctggacatccatcaggacctggactggaatccaaaagtaagcaccctgaatgtatggccactctatatttgcgatgacggagcagtcatcttttacagagacaagactgaggagttaatggagcttactgatgagcagcgcaatgaactaatgaaaaaagaatcttcaaggttacagaaaaccggccacagagttacgtatagtccccgcaaggagaaggccctgaaaatttaccttgacggagcccccaacaaggatttgacccaggactag

SEQ ID NO: 25112 - DNA, 600 bp, synthetic construct
  source 1..600: mol_type = other DNA; note = Synthetic coding sequence
atgcggaccgccgaccgggaggcccggcccggcctgcccagcctgttgctcctcctattagcaggtgcgggactgtcagcagccagcccaccagctgccccccggttcaatgtatctctcgacagcgtgcccgagttacgctggctgccggtcctccgccattatgatcttgacctggtgagagccgcaatggcacaggtcatcggagaccgggtgcctaagtgggtccacgtcttgataggaaaagtggtgctggaactggagcgttttttacctcagcccttcacaggcgaaatcagaggaatgtgtgatttcatgaacctgtctcttgccgactgcctgctcgtaaaccttgcttacgagtcaagtgtgttctgcacctctatagtcgcccaggattctcgtgggcatatctaccatggaagaaatctggactatcccttcggtaacgtgttgaggaaactgaccgttgacgtgcagtttcttaagaacggccaaatcgcattcaccggaacaactttcatcgggtacgtgggcctgtggacagggcaatccccacacaaatttaccgtctcaggagatgaaagggacccacactag

SEQ ID NO: 25113 - DNA, 972 bp, synthetic construct
  source 1..972: mol_type = other DNA; note = Synthetic coding sequence
atgcggaccgccgaccgggaggcccggcccggcctgcccagcctgctcctgctgctgcttgccggcgctggcttgtcagccgcgtctcctccggcagccccccggtttaatgttagccttgattctgtccctgaactgagatggctccctgtgctgagacattatgatcttgacctagtgagggctgccatggctcaggtcatcggggatagggtgccgaaatgggtgcacgtgcttatcggcaaggttgtcctcgaattagaacgctttctgccgcagccttttaccggcgagattcgcggcatgtgcgacttcatgaacctgagcctggccgactgccttctcgttaacttggcctacgaatcctctgtgttctgcacctccatagtcgcccaagattcccgcggacatatttatcacgggagaaatttggactaccccttcggcaacgttcttcgcaagctgacagtggatgtacagtttttgaagaatggacagatcgcatttaccggcaccaccttcattggctacgtgggcctgtggaccggacagtccccacacaagttcacagtgtcaggagacgaaagagataaggggtggtggtgggaaaatgctattgcagcactctttagaaggcacatcccagtgtcttggctgatccgagctaccttaagtgaaagtgagaacttcgaagctgccgtaggaaagctggccaagacgcccctcatcgccgatgtctactatatcgttggcggtacgtcccctcgcgagggagtggttattacaagaaaccgggatggtcccgcggatatatggcctttggatccactcaacggtgcttggttcagggtggaaacaaactacgaccactggaagccagcacctaaggaggatgacaggaggacgtcagctattaaggcccttaacgcaaccggacaggctaatctttccctggaggccctgttccagtag

SEQ ID NO: 25114 - DNA, 4539 bp, synthetic construct
  source 1..4539: mol_type = other DNA; note = Synthetic coding sequence
atggccgccgccgccggcaaccgggccagcagcagcggcttccccggtgccagggctaccagtccagaggcgggaggaggaggcggcgctctcaaggcatcctctgcccccgctgccgccgctggcctcctgagggaggccggatccggtggacgagaacgcgctgactggaggcgcaggcagctccgcaaagtacgaagtgtggaacttgaccagttgccagaacagccgctgtttctcgccgcgagtccccccgcctctagcacttccccctctcctgagcccgccgatgcggccggctccgggaccggctttcagcccgtggcagtgccaccgccccatggtgccgcctctcgcggaggcgctcacttaaccgagagtgtcgcagcccctgactctggagccagctcccctgcggccgccgagccaggagagaaaagggctcctgctgccgagccatcccccgccgctgctcccgcaggccgggaaatggaaaataaggaaactctgaaggggctgcacaagatggacgacagacccgaggagcgtatgattagagaaaagctaaaggccacttgtatgcccgcttggaaacatgaatggctggaaagaaggaaccggcgaggacccgtcgtggtgaagccaataccggtgaagggcgatgggagcgaaatgaaccacctggctgcagagagcccaggagaagttcaggcttctgccgcgtccccagcgtcaaagggacggcgaagccccagcccagggaacagcccctccggaagaactgtcaagagcgagagcccaggggtgaggaggaagcgggtaagtcccgtgcccttccagagtgggagaattacccccccgcggagagcgccatcgccggatggcttttccccatacagtccagaagaaactaatagacgcgtcaataaagtgatgagggcaagactctacctgctgcagcagattggccccaacagtttccttatcgggggggatagtcccgataacaagtatcgggtttttatcggcccccagaattgctcatgcgcccgcgggaccttttgtattcaccttctgttcgtgatgttgagagtatttcaactcgagccaagtgatcccatgttatggcggaagaccctgaaaaactttgaggtggaaagtctgtttcaaaaataccacagtcgcagatcctcaaggataaaggctccttcaagaaacaccattcaaaaattcgtctccaggatgtcgaattcacatactctgagcagctctagtacctccactagctcctctgagaacagcatcaaggacgaagaagaacaaatgtgtcccatctgcctgctgggtatgctggacgaggagagtctcacagtttgcgaagatggttgcagaaataaactccaccaccactgcatgtccatctgggccgaggaatgcagaaggaatcgcgaacccctgatttgtcccctctgtaggagcaagtggcgcagtcatgatttctatagccacgaactgtcttcacctgtcgactcgccatcctccctgagagccgcacagcagcagactgtgcagcagcaacctctggccgggagccgaagaaaccaggagagtaattttaacctcacacattacggaacacagcagatacccccggcatacaaagatctggcagaaccttggattcaagtgttcggaatggagctcgtcggatgcctgttttccaggaattggaatgtgagggagatggctcttcgccggctgagtcatgacgtatcaggcgccctactgctggcgaacggggagtccacagggaactcaggagggtccagtggttcaagtccaagcggcggtgcgacctccggttctagccagacttcaatctctggtgatgtagttgaagcctgctgtagtgtgctgtccatggtatgtgcggacccagtttacaaggtttacgttgccgctctcaaaaccctcagggcaatgctcgtatatactccatgccattcgttggctgagcggataaagctgcagagactcctgcaacccgtggtcgacaccatacttgttaaatgcgccgatgcgaattcgcgcacatcccagttatccatcagcaccctgctggaactctgtaagggccaggcgggggaactggctgtgggtagagagattttaaaggctggttccattgggatcgggggagtggattatgtgctaaattgtattctggggaaccagactgaaagtaacaactggcaagagttgctcgggagactgtgtttgattgaccgcctccttctggaattcccagccgaattttaccctcacattgtgtccacagacgtgagccaggccgagcccgtcgagattagatataaaaaactactgtccctgttaacctttgcgctgcaatcaatcgacaactcccattctatggtggggaagctcagccgccggatctatctctcatccgccaggatggtgacaaccgtgcctcatgtgttctccaaactgttggagatgctcagcgtttcatcctctacccacttcactcgcatgaggcggcgcctgatggccatcgcagatgaagtggagattgcagaggccatacaactgggggtggaagatacccttgatggccaacaggacagctttcttcaggccagcgttcctaataactatctcgaaacaactgagaatagttctcctgaatgtacggtacacctggaaaagaccggtaaggggctgtgcgcaactaaactttctgcatcttcggaagacatcagcgaacgcctggcctccatctccgtcgggcccagctcttccaccaccacgacaaccacgacaaccgagcaacctaaacccatggtccaaactaagggaagaccccacagccagtgcctaaattcaagtcctctcagtcaccacagtcagctcatgtttccagccttgtctactccctcgagctctactcccagtgtccccgcaggcacagctacagatgtgtccaagcaccgcctgcaggggttcatcccttgcagaattccatcggcaagcccccagacacaacggaagttctcattgcaatttcacagaaactgtcctgaaaacaaagattcagacaagctctcgcccgtgttcacccagtcgcgcccactgcccagcagtaatatacatagaccgaagccatctcgcccaactcccggaaacacgtcaaaacagggcgatccgagcaaaaatagcatgacacttgacttgaactcatcctctaaatgcgacgatagctttggttgttcgtctaatagctccaacgccgtcatcccatccgacgagacggtgttcacccccgttgaggaaaaatgtcgtttagacgtcaacaccgaactcaactcatcaattgaggatctgctggaagccagcatgcccagctccgacacaaccgtgacattcaaaagcgaggtggccgtactctcacccgagaaggctgagaacgacgacacgtataaggacgatgtaaatcataatcagaagtgcaaagagaaaatggaggcagaagaggaggaagctctggccatagctatggcaatgtcagcttctcaggacgccctgcccattgttccccagctgcaagtggaaaatggcgaagacattatcatcatccaacaagacactcctgaaacgcttcctggacatactaaagctaagcagccctatcgcgaagacactgagtggctcaaaggccagcagattggactgggtgccttctcaagctgttatcaagcccaggatgtggggaccggaaccctgatggcagtaaagcaggttacatatgtgcgcaatactagcagtgagcaagaggaggtagtcgaggccctccgggaagagatcagaatgatgtcccaccttaaccacccgaacatcattcggatgttgggtgcaacttgcgagaagtcgaattacaacctgttcattgagtggatggcaggaggctccgtggcacacttgctcagcaaatatggagcgttcaaagagtcagtggtgattaactatacggagcaactgctccgagggctgagctatctgcatgagaatcagatcatccacagggatgtgaagggcgctaatcttctcatcgactcaacggggcagagactgcggattgcagacttcggggccgcggcacggctcgcatccaagggtactggcgcgggcgagttccaggggcagctgttagggaccattgcatttatggcccccgaagtgttacgtggccaacagtatggacggtcgtgcgacgtatggtcagttggatgcgccataattgagatggcctgcgcaaagccaccatggaacgcagagaagcactcaaatcacctggccctgatctttaaaatcgcttctgcgaccacggcaccttccatccctagccacctgtccccaggtctgagggacgtggccctgcgatgtctggagctgcagccccaagacagacccccgtctcgggaactgctgaaacatcccgtgtttaggacaacctggtag

SEQ ID NO: 25115 - DNA, 2274 bp, synthetic construct
  source 1..2274: mol_type = other DNA; note = Synthetic coding sequence
gccgacggcggcgacagccaggccttccggtgcaccagctgcggccatgccgggacaactcccgcccctcgcgaagccctctcacctgccgacgcccacgtgggccgagggttcgcggagagggagccaatcccagctcagggactactggttttggctgtcctctcagatggagcaggcgaccacatccgccagcgactgctgcctccactcctgcagatcgtgtgcaagggcttagaagacccaagccaggtggtgagaaatgccgcactgtttgcactgggccaattttccgagaaccttcagccacacattagctcttattcacgagaagttatgcctctgttactggcttatctcaagtcagtgccgttggggcatacacaccatctcgcaaaagcttgttacgccctcgaaaatttcgtcgagaatctaggtccaaaagttcagccttatcttccggaactcatggagtgcatgcttcaactcctgcgcaatccaagcagcccacgcgcaaaggagttggcagtctccgcactgggtgccatcgccacagcagcccaggcatccttactgccgtacttccctgctattatggagcacctcagggaattcctgctcacagggagagaagacctgcagcctgtgcaaatacagtctctggaaactctcggcgtgctggcaagagcagtgggagaacctatgcggcccctcgccgaagagtgctgccaactgggtctcggcctgtgcgatcaggtggacgaccctgacctccggcggtgtacctactctctctttgccgctttgtccggcctcatgggcgaaggcctcgcgccacacctggaacaaatcactaccttaatgttgttatcattgagaagcactgaaggtatcgtgcctcagtatgacggctctagctcatttttgctgtttgatgacgaatctgacggggaggaggaggaggaactcatggatgaggacgtggaggaggaggatgatagcgaaatttcgggatactcagtggaaaacgcctttttcgacgagaaggaggacacatgtgcagccgtgggcgaaatctcagtgaacacatcagttgctttcctcccatacatggagtcagtcttcgaagaagtgtttaagttgctggagtgtccccacttgaacgttcgcaaggcagctcatgaggcacttgggcagttttgttgtgctctgcacaaggcatgtcaaagctgcccaagcgagcctaacaccgccgccctgcaagcagcccttgcccgcgtggtccctagttatatgcaggcggttaaccgagagagagagagacaggttgtcatggcggtgcttgaggccttgactggcgtcctgagatcatgcggtacattgactctgaagccgcctggcagacttgccgagctgtgtggggtcctgaaggcagtgttgcaacggaagacggcatgccaagataccgatgaagaagaagaagaggaagatgatgaccaggctgaatacgatgcaatgcttctcgagcacgctggagaagccatccctgccttggccgccgctgccggcggcgactcctttgcccctttcttcgcaggtttcttacctttgctggtgtgtaaaacgaaacaggggtgtacagtcgccgagaagtccttcgctgtcgggacccttgccgagactatccaaggcctgggcgctgcttctgcccaatttgttagcagactgttacccgtgctgttaagcactgcgcaagaagcagaccctgaagtgcggagtaatgcaatttttggaatgggagtgcttgcggagcacggggggcatcctgcacaagagcacttccccaagttgctgggactactcttccccctgctggctcgcgaaagacatgatcgcgtgcgcgacaacatatgcggagccctggcacgcctactgatggcctcgccgaccagaaagcccgagccacaagtgctggccgccctgcttcacgccctccccctgaaggaagacctggaagagtgggtcacgattgggagactatttagcttcctgtaccaatctagtcccgatcaagtcatcgacgtggccccggagctcctaaggatttgtagccttatcttagccgacaataagatcccacccgatacgaaggcagctctgctgctgctgctgacttttctcgctaagcaacataccgattcatttcaggctgcgctgggaagcctgccagttgacaaggcccaggagctgcaggctgtactcggactctcctag

SEQ ID NO: 25116 - DNA, 1812 bp, synthetic construct
  source 1..1812: mol_type = other DNA; note = Synthetic coding sequence
atgggcgtgatccccgagggccccctgtgggtgagcggcagcgacgataacctgtcaggaacatccgggatggaggttgatgaccgtgtgtctgcattggagcagaggctgcagttgcaggaagatgaacttgccgtgcttaaggcagccctcgccgacgcccttagacgtttacgcgcctgcgaggagcaaggagcggccctgagggcccgcgggacccccaaaggcagagcccctccccggctgggaacaactgcatcagtgtgtcagctccttaaggggctcccaactaggacgccactgaatggctccggaccgcctcgacgggtgggtggatatgctactagcccatccagccctaaaaaagaagccacctcaggcaggtccagcgtgagacgatacttgagcccagagagattagcatcggtaagacgagaagatccccggtcacgtactacatcctcatcctccaactgttctgccaagaaagaaggcaagacaaaggaagtgatttttagcgttgaagatgggagcgtcaaaatgttcctgcgtggaagaccagtgcctatgatgattccagatgagcttgccccgacctactctctggacaccaggtctgagctcccctcctgccggcttaagctggagtgggtctacggttataggggtcgcgactgtagagctaacctctatctgctcccgaccggggaaatagtgtacttcgtggcctctgtggcagtgctgtattctgtggaagagcagcgccaacgacactacctgggtcacaacgacgatataaaatgcttggctattcaccccgatatggtgacgatagcaacaggacaggtcgccggtacaactaaggaagggaagccactaccgcctcatgttagaatctgggatagtgtgtccctgagtactctgcacgtcttaggccttggtgtattcgacagagccgtatgctgtgttgggtttagcaagagcaacggagggaaccttctgtgcgcagttgacgagtccaacgaccacatgctgtcagtttgggattgggccaaggagacgaaggttgtggatgtaaagtgttccaacgaagccgtcctggtggcaacattccaccccaccgacccgactgtcctcattacgtgtgggaagtctcacatttacttctggaccctggaaggtgggtccctgagcaagagacaggggctgtttgagaaacatgagaaacctaagtacgtgttatgcgtgacattcttggagggaggagatgtggtaacgggtgactccggcgggaatctgtacgtctggggtaagggcggtaaccgcatcacccaggctgtgctgggtgcgcacgacggcggtgtgtttggtctttgtgcgctacgagatgggactctggtttccggaggcgggcgcgaccgccgtgtagtgctctgggggagcgactacagtaagcttcaggaggtcgaagtacccgaggacttcgggcctgtgagaactgtcgcggagggacacggcgacaccctgtatgtgggaacaacccggaacagcatcctgcaggggagcgtgcatacaggtttctccctcttggtacaaggccacgttgaggagctttggggcctggccacacatccaagccgcgcccaattcgtgacatgtgggcaggataagctagtacacctctggagttccgactcacaccagccactgtggagcagaattattgaagtcgagagtcggagtgtgactcaggcgggtggccagtggcacgatcttggctccctgcagcctccgcccccaggatttaaatag

SEQ ID NO: 25117 - DNA, 996 bp, synthetic construct
  source 1..996: mol_type = other DNA; note = Synthetic coding sequence
atggccgagggcggcggccccgagcccggcgagcaggagcggcggtcaagcggtccccgacccccgtccgccagagacttacagttagccttggctgagttgtatgaagatgaagtcaagtgcaaatcatctaagagtaacaggcctaaagctacagtatttaaatctccaaggacacctccccagaggttctattctagtgagcacgaatactccgggctcaatatcgtgagaccaagtacagggaaaatagttaacgagttgttcaaagaggctcgcgagcacggggccgtgccacttaacgaggctactagagcgtcgggcgatgacaagagcaaaagttttacaggtggcgggtatcggctaggttcatccttctgtaagcggtctgagtacatttacggcgagaaccaactacaagacgtgcagattctccttaagctgtggagtaatggtttttcactggacgatggggaacttaggccttacaatgagcccacgaatgcacagtttttagagtccgtgaaaagaggtgaaatccctttggagttacaaaggttggtccacggtggccaggtgaacctggacatggaagaccaccaggaccaggaatatataaagccacgattaagatttaaagccttcagtggtgagggccaaaaactgggatcactcactcccgagatcgtgtcaaccccaagcagtcctgaggaagaggacaagagcatcctgaatgctgtggtgttgatcgacgactctgtccccaccactaaaatccagatccgattggctgacggctcaagactgatacagcgtttcaacagcacacacaggatcctggacgtgcgtaattttattgtccagagcagaccggagttcgccgctttggactttattctcgtcactagtttccctaacaaagagctgaccgatgaatcactcacactgctggaggccgacattttgaacactgtcctactccagcagctcaagtag

SEQ ID NO: 25118 - DNA, 2064 bp, synthetic construct
  source 1..2064: mol_type = other DNA; note = Synthetic coding sequence
atggacggcggcgccctgaccgacaccagcctgaccgacagctacttttccaccagtttcattggggtgaatggatttggttcccctgtcgagacaaagtatcccctgatgcagcggatgactaattcaagctcatctccctcactcctaaatgatagcgcaaagccttatagtgcgcacgacccccttacctctccagccagctcacttttcaatgacttcggtgccctcaatatcagccagcgccgaaagacacccaaccctaccgcctcggaattcataccaaagggtgggtccacgagtcggctctccaatgtcagccagtctaatatgtctgcattcagccaggtgttcagtcatccatccatgggaagtccggctaccgcaggactggcaccaggcatgtctttatccgctggcagctcgcctctccactctccaaaaattacgccccacacgagcccagctccgcgacgcagaagccacacacccaatcccgcctcttacatggtgcctagctcagcgagcacctccgttaacaacccagtgtctcagactcctagctccgggcaggtcattcagaaagagacagttggggggacaacctacttttacacagataccacccccgcaccgctgacaggtatggtattcccaaactatcacatctatccacccactgctccgcatgttgcttatatgcagcccaaggcaaacgccccatcctttttcatggcagatgaacttcgccaggaactcattaatcgccacctcatcactatggcgcagattgaccaggcagacatgcccgcggtccccactgaagtagacagctaccactcattattccccctggaaccactgccgccaccaaatagaatccagaaatcctcaaactttggctacatcacctcctgctacaaggccgtgaactccaaggacgatctgccttattgcttgcgtagaatccacggcttccgcctcgtgaacactaagtgcatggtgcttgttgatatgtggaagaaaattcagcacagtaacatcgttacgctgcgagaagtgttcaccactaaagcctttgccgagccttcactggttttcgcatacgattttcacgcaggcggggaaaccatgatgtctagacatttcaacgatcccaacgcagatgcttattttaccaaaaggaagtggggacaacacgaggggcccctccccagacagcacgccgggctgctgcccgagtcactgatctgggcttatatcgtgcagctctctagtgcattgagaactatacataccgccggcctcgcttgtagggtaatggacccgacgaaaatcctgatcacggggaaaactcgtctccgggtgaattgtgtgggggtattcgacgtacttacgtttgataacagccagaacaacaaccccctggcactcatggcacagtatcaacaggccgatctgattagtctagggaaggtcgttctggcgctggcatgcaacagtctggcagggatacagcgagagaacctgcaaaaggccatggaactggttaccataaattattcctcagacctgaagaatctcattctgtacctgttgaccgaccagaataggatgagatcggtgaatgacataatgcccatgataggagctcggttctatacacagctcgacgcagcgcagatgcgtaatgatgtcatcgaggaagatcttgcgaaagaagttcagaacggtcgcctattcagactgcttgctaaattaggcaccatcaacgagcggcccgagttccagaaagacccaacatggagcgaaactggcgatagataccttctgaagttatttcgggaccatctgttccatcaagtgacagaggcaggggctccctggatcgacttgtcacacattatcagctgcctcaacaaactagatgcaggagttccagaaaagatatcactcataagcagagatgagaagtcagtgctggtggttacctatagtgacctaaagcgctgttttgagaacactttccaggaattaatagccgccgccaatggacagctgtag

SEQ ID NO: 25119 - DNA, 6951 bp, synthetic construct
  source 1..6951: mol_type = other DNA; note = Synthetic coding sequence
atggacggcgtgagcagcgaggccaacgaggagaacgacaacatcgagcgccctgtcaggcgtaggcacagctcaattctaaagccgcctaggagcccactccaagacctccggggcggaaacgaaagagtgcaggagtccaatgcactgcgtaacaaaaaaaattcccggcgtgtgagctttgctgacaccattaaggtattccaaacagagtcccatatgaaaattgtacgaaagagcgaaatggaggagaccgaaaccggggagaacctactactgatccagaacaaaaaacttgaagacaattactgcgaaatcacaggcatgaacactttgctgtccgctcctattcacacacaaatgcagcagaaggagttttctattatcgaacacactcgagaacgaaaacacgccaacgaccagaccgtaatcttctctgacgaaaaccaaatggatcttacgtctagccataccgtgatgattactaaaggacttctggataatcctatctctgagaagtcaacaaaaattgacactacctcgttcctggccaacttaaaactgcacacagaagacagtaggatgaaaaaggaggtgaacttctcagtagaccaaaatactagctccgagaacaaaatcgactttaatgacttcattaaacggttaaaaacaggcaagtgtagcgcctttcctgacgtgcccgacaaggagaactttgaaattcccatctatagcaaagaacccaacagtgcatcgagcacgcatcagatgcacgtgtccctcaaggaagacgaaaacaactctaacataacaagattgttccgggagaaggacgatggcatgaacttcacccagtgccacacagcaaatatacagacgcttattcctacaagctcggaaacgaactcccgggaaagcaagggcaatgacataactatatacgggaacgactttatggatttaaccttcaatcatactttacagattttacccgcaaccggcaactttagcgaaatcgaaaaccagacacagaatgcaatggatgtgacgacagggtacggcactaaggcctctggcaataagactgttttcaagtctaagcagaacaccgcctttcaggatctgtctatcaactcggccgataaaattcacatcacgagatctcacatcatgggggctgagacacatatcgtctcacagacctgcaaccaagacgctaggatcttggctatgacacccgagagcatttacagcaacccctctatacaaggctgcaagaccgtgttctacagtagctgcaatgatgccatggaaatgactaagtgcctatccaacatgagagaagagaagaatcttctcaaacacgactcgaattacgccaaaatgtactgcaatcccgatgctatgagctctttaacagagaaaacaatatactctggcgaggagaatatggatataaccaagagtcatactgtggcgatcgacaatcaaattttcaagcaagaccagtcaaacgtgcagatcgcagccgctcctacccctgagaaggagatgatgcttcaaaatctaatgaccacaagtgaagacggaaaaatgaatgtcaactgtaattcagtacctcacgtgagcaaggagcgcatccagcagtctctgagtaatcctctgtccataagcctgactgataggaagaccgagcttttgagtggagaaaacatggatttgacggaatcgcacacaagcaatctggggagccaggtgcctcttgctgcttataacctggcccccgaaagcacctctgagtcccactcccagtccaagtcttcttccgacgagtgcgaggagatcacgaagagccggaatgaacccttccagcgctcggatatcatcgcaaaaaatagcttgacggacacctggaacaaagacaaggactgggtgctgaaaattctgccctatctggataaagattcaccacagtccgctgactgcaatcaggaaattgccacctcccataacattgtgtactgcggaggggtgcttgataagcagattaccaatcgcaatactgtgagctgggagcaatctctgttttctacgaccaaacccctatttagctccggccagttttccatgaagaaccatgacaccgccatatcaagccatactgtcaaatcggtgctgggccagaacagcaaacttgcggagcctcttcgtaagagcctgagcaatcccacgccagactactgtcacgacaaaatgataatttgtagtgaggaagagcagaatatggatcttacgaaatcccataccgtggtgataggcttcgggccttccgagctacaggaactggggaaaacgaaccttgagcacactaccggacagttgaccaccatgaataggcagattgctgtgaaagtggagaaatgtgggaagtcacctatcgaaaaaagcggtgttctgaaatccaactgcattatggatgtcctcgaggatgagtctgtgcagaagcccaaatttccgaaggagaagcaaaatgtaaaaatctggggaagaaagtccgtaggcggtcccaagatcgacaaaactattgtgttttccgaggacgataaaaacgacatggatatcacaaagtcttatacaattgagattaatcataggccgctgttggagaagcgggactgccacctcgttccacttgcaggtaccagtgagacaattctgtacacgtgcagacaggatgacatggagatcacacgcagccacaccaccgcgctcgagtgcaagactgtcagcccagacgagatcacaaccaggccaatggacaagaccgtggtgtttgtcgacaaccacgtggagttagagatgactgaatctcacaccgtgttcatcgactatcaagaaaaagagagaacagaccggccaaactttgaacttagtcaaaggaagagcttaggaacacctaccgttatctgtactcccacggaggagagtgtgttttttccaggtaacggggaatccgaccggctggtggctaatgattctcaactgacccctctcgaagagtggtccaataaccggggcccagtggaagtcgctgacaacatggagcttagcaaatcagctacatgtaaaaacattaaggacgttcagagcccaggatttctaaacgagccccttagctcgaagagccaacgacggaaaagcctgaagctcaagaatgacaagactattgtattctctgagaatcataagaacgacatggacattacgcaatcgtgcatggttgaaatcgacaacgagtccgcactagaggacaaggaggacttccatctggccggcgcatcaaaaaccattctatattcttgcggtcaggatgatatggaaataaccagaagtcacaccacagctctcgagtgcaagacactgctgcctaacgagatcgccatccgacctatggataaaactgttctcttcacagacaactactctgacctggaggtgaccgattcacatactgtgtttatagattgtcaggcgacagaaaaaattttggaagagaaccccaagttcgggatcggcaagggaaaaaatttgggggtgtccttcccaaaagacaacagctgtgtgcaagagattgccgaaaaacaggcattggccgtgggaaataagatcgttctgcacaccgaacagaagcagcaactattcgctgcaacgaatcgaaccacaaacgaaatcataaaattccactccgccgctatggatgaaaaagtcatcggcaaggttgtggatcaggcctgtaccctggagaaggcccaagtcgagtcgtgccagttgaacaatcgggataggaggaatgtggattttacatcttctcatgcgacagcggtgtgtgggagtagcgacaactactcctgtctacctaatgtgatttcctgcactgacaatctggaaggtagcgctatgctgctgtgtgacaaggatgaggagaaggccaactactgtcccgtgcagaacgacctggcctacgcaaacgacttcgcaagcgaatactatctggaatcggaggggcagcctctgagcgcaccctgccctctcctggagaaggaggaggtgattcaaacttctaccaagggccagctcgattgcgtcatcactctgcataaagaccaggacctcatcaaggatccccggaacctcctggccaaccaaactctcgtgtactcccaggacctcggagagatgaccaaattaaactctaaacgggtgagctttaaactgccgaaggatcagatgaaggtctatgttgacgacatctatgtcatcccacagcctcacttttccacggatcagcctccattacctaagaagggccagtcaagtataaacaaggaagaggtgatcctgagcaaagccggcaataaaagtttgaacattatcgagaactcctctgctcctatttgtgaaaacaaaccaaagattcttaatagcgaggagtggtttgcagctgcttgtaaaaaggagcttaaggaaaatatccagaccacaaattataacaccgccctggattttcactctaattccgatgtgacaaaacaagtgattcagacacatgtcaacgcaggagaagctccagaccccgtcattacctccaacgtgccttgctttcattccataaagccaaatcttaataatcttaatggaaagaccggggaattcctggccttccagacggtacacctccccccccttcccgagcagctcttggaacttgggaataaagctcataacgacatgcatatcgtgcaggccactgagatccacaatattaatataataagttccaatgcaaaggactccagagacgaggagaacaagaagagccacaacggggcagagacaactagtctccctccaaaaacggtgttcaaagacaaagttcgcaggtgcagtttgggtatctttctgcctcgtctgccaaacaagcggaactgcagtgtgacgggaatagacgatctggagcaaatccctgccgatacgacagacattaaccacctcgagacccaacccgtctcatcgaaggattctggaattgggtccgtggcagggaagctaaacttgtctccaagccaatatatcaacgaagaaaaccttcctgtgtacccagatgagatcaacagctccgattccattaatatcgagaccgaggaaaaagcactaatcgaaacataccagaaagagatctcgccatatgagaataagatgggcaaaacatgtaacagtcagaagcgaacgtgggttcaggaggaggaggatatccacaaagagaaaaagatccgtaagaatgagatcaagttctccgatactacccaggatagggaaattttcgatcatcacactgaggaggatattgacaagagcgcgaattctgtgcttatcaagaatctgtcaaggaccccatcaagctgctcctccagcctggattcgatcaaggctgatggcacttcactcgacttctctacctaccggagtagtcagatggagtcccagttcctgagggacacaatttgcgaagaatctctaagagaaaaattgcaggacggccggattacaatccgggagttctttatcctgctccaggtgcacatactcatccaaaaacccaggcaaagcaatctgccaggtaactttaccgtcaacacaccaccaactccagaagacctcatgttgtctcaatatgtgtaccgccccaagatccagatttatagagaggactgcgaagctaggcgtcagaagattgaagagctcaagctctccgccagcaaccaggataagctcctggtggacatcaataagaatctttgggaaaagatgagacactgctcggacaaggagcttaaagcgttcggtatctacctgaacaaaatcaaatcatgttttacaaaaatgacgaaagtgttcacccaccaagggaaggtagccctctacggcaagcttgttcagtccgcacagaatgagcgggagaagctgcagataaagatagacgaaatggataaaatcctcaagaagattgacaattgtcttacggagatggagacggaaaccaaaaatctggaagatgaggaaaagaacaatcctgtcgaagaatgggacagcgagatgagagctgccgagaaggagttggagcagctgaaaaccgaagaggaagagctgcagaggaacctgctggaactggaggttcagaaggaacaaacactggcccagattgactttatgcagaagcagagaaataggacagaagagcttttggaccagctgagcctgagcgaatgggatgtcgtagagtggtctgatgatcaggccgtgttcacattcgtgtacgacacaatccagttgaccattacatttgaagagtctgtcgtcggtttccctttccttgacaagaggtaccggaagatcgtagatgtaaattttcagtctctgctggacgaggaccaggccccacccagctcactgttggtgcataagctgatcttccagtacgtagaggaaaaagagagctggaagaaaacttgcaccacacagcatcagctgcccaagatgctcgaggagttcagtctggtggtgcatcattgcaggctcctcggcgaagagatcgagtacctgaagaggtgggggcctaattacaacctcatgaacattgatatcaataataacgaactccggttgctgttcagctcgtccgctgcattcgctaaattcgagatcaccctgtttctgtctgcctactacccatctgtaccattaccctctaccattcagaatcacgtcggcaacactagccaggacgacattgctaccattttatccaaggtgccactcgaaaacaactatcttaaaaacgtggtcaaacagatttaccaagacctgttccaggactgtcacttttaccattag

SEQ ID NO: 25120 - DNA, 714 bp, synthetic construct
  source 1..714: mol_type = other DNA; note = Synthetic coding sequence
atgggctgctgcggctgcagcggcggctgcggcagcggctgcggcgggcgtggcagcgggtgcggcggctgcggatcagggtgtggtggttgcggtagtggctgtggcggttgtggatccggatgtggaggttgtggcggttgcggatccggttgcgctggatgtggcgggtgtgggtctggctgctgcgttcccgtctgctgctgcaagccaatgtgctgttgtgtgcccgcctgttcgtgctctagctgtggcaaaggtgggtgcggatcttgcgggggcagcaaacgcggctgtgtctcctgcggcgtgtccaagggagcatgcggatcttgtggtggctcgaagggaggctgtgggagttgcggaggctctaaagggggatgtggaagctgtggcggaagcaaagggggctgcgggagctgtggaggaagtaagggaggatgcggctcatatggttgctcccaatcgtcatgctgcaagccttgctgctgttctagcggatgcggctcaagctgctgtcagagctcctgttgcaaaccttactgttgccagagcagctgctgtaaaccctactgttgtcaaagtagctgctgtaagccttgttcttgcttttcaggctgtgggtcctcatgctgccagagctcttgctataagccgtgctgctgccagtcgtcctgctgtgtccctgtctgctgccaatgtaaaatttag

SEQ ID NO: 25121 - DNA, 717 bp, synthetic construct
  source 1..717: mol_type = other DNA; note = Synthetic coding sequence
atgggctgcagcggctgcagcggcggctgcggcagcagctgcggcggctgcgggtccagttgcggcggttgtggctccgggtacggcgggtgcggatcaggctgctgtgtgccggtatgttgttgtaagcctgtctgttgctgcgtacccgcttgctcttgctcaagttgtggatcctgcggggggagtaaaggcgtttgtggttcctgtggcggctgcaaaggtgggtgcggcagttgtggcggatccaaaggtggctgcggcagcagctgctgcgttcccgtatgttgttctagctcttgcgggagctgcggtggttcaaagggagtgtgcgggttccgcggcgggagcaagggcgggtgtggtagctgcggctgctcccaatgctcgtgctacaagccgtgctgctgttcctcagggtgtggctcctcctgttgtcaatcttcttgctgcaaaccaagctgcagccagagctcatgctgcaagccatgctgctcccagtccagctgctgcaagccatgttgctgctcctctggttgcggctctagctgctgtcagtcttcctgttgtaagccctgttgctcccaatctagttgttgtaagccttgttgctgcagtagcggttgtggcagtagctgctgtcagtcgtcctgctgcaaaccttgctcttcccagtctagctgctgtgtgcccatatgctgtcagtgtaaaatctag

SEQ ID NO: 25122 - DNA, 1473 bp, synthetic construct
  source 1..1473: mol_type = other DNA; note = Synthetic coding sequence
atgaacggcgccctggaccacagcgaccagcccgaccccgacgccatcaaaatgtttgtggggcagattcctagatcgtggagcgaaaaggaactgaaggagctgttcgaaccttatggggcggtgtaccagatcaacgtactgcgggacaggtctcaaaacccacctcagtccaaaggttgctgtttcgtgacgttttatacccggaaggctgcgctagaagcacagaatgcactgcacaatattaagacgctgcccggcatgcatcacccaatccaaatgaagccagccgatagcgagaaatctaacgcagttgaggaccgcaagctgttcattggaatggtgtctaagaagtgtaatgagaatgacatccgggtcatgtttagtccattcggccagatcgaggagtgccggatactgagaggtccagacggcctgtctaggggttgtgctttcgtgacgttctccacacgggccatggcgcagaacgctatcaaggccatgcatcagtcacagactatggagggctgctctagtcccatcgtagtgaagtttgcagacacacaaaaggacaaagaacagagaaggttacagcagcagcttgctcagcagatgcagcagctcaacacggccacctggggaaaccttactggtttgggaggactgacccctcagtatctcgccctgttgcagcaagctacctcaagtagcaatctgggggccttttctggaattcagcagatggctggcatgaatgccctccagctgcagaatctcgcaacactcgctgccgccgccgccgcagcccagacctccgccacctcaacaaatgcgaaccccctgtccaccacaagtagcgctctcggtgctctgactagccccgtggctgctagcactccaaacagcactgcgggtgctgcaatgaatagcttaacaagccttgggactcttcagggattagcaggcgctaccgtgggcttgaataacatcaacgccttagcagtagcgcagatgttaagtgggatggcagctctcaacggaggcctgggggcaaccggcctgacaaacggtaccgccggcacgatggacgccctcacccaggcctactcagggatacagcagtatgctgcagccgctttgccaactctttacagccagtctctgcttcagcagcagtcagcagccggatcccagaaggagggcccggaaggagcaaatctattcatttaccatctgcctcaggagtttggagatcaagacatattacagatgttcatgccatttggcaatgttatcagcgccaaggtcttcattgacaagcagacgaacctctcaaagtgtttcgggtttgtctcatatgataaccctgtctctgctcaggccgccatacaggccatgaatgggtttcagataggaatgaaacgattgaaggtgcagcttaaaagatccaagaacgactccaagccatactag

SEQ ID NO: 25123 - DNA, 5826 bp, synthetic construct
  source 1..5826: mol_type = other DNA; note = Synthetic coding sequence
ctgctgaccagcgtgctgatgcccagcttcggctacttcatccggtcaccggaaaagcgggagcctattgccttaatacgcaaatcagacgtctcaaggggcaatttggaaaaagaaatggcccatcttaatcacgatctctacagcggagacctcaacgaacaatctcaggctcagctgtctgaagggtctatcaccctgcaagttgaggctgtagagtccacatctcaagtggatgagaacgatgtaaccttaacagccgacaagggtaagactgaggacaccttctttatgagcaataaacctcagcgatacaaggataaactccctgactctggagattctatgctgcgtatctctaccatagcatccgcaatagccgaagcctcggttaatactgatcccagtcagctcgccgctatgataaaagccctgagcaataagactcgcgacaaaacgtttcaagaggatgaaaagcagaaggactatagccacgtaagacacttcctccccaacgacttggagaaaagtaacgggagcaacgcactggatatggagaaatacctcaaaaaaacggaagtgagtagatacgagtcagcattggaaaacttttcccgagcaagtatgtcagatacatgggacctctcacttcccaaagagcagacaacccaagatatccatccagttgacctttcagcgactagtgtctctgtgcgggccccagaagagaatactgccgctatagtgtacgttgaaaatggtgaaagtgaaaaccaggaatcctttcgcacaataaattcatcaaattccgttaccaatcgcgagaataactccgccgtggtggatgttaaaacgtgctccatcgacaataagctgcaggacgtggggaatgacgaaaaggccacttctatcagcacccctagtgacagctatagcagtgtgaggaacccacggatcacctctctctgcctactgaaggactgcgaagagatacgcgataatagagagaaccagcgccagaatgaatgtgtgagcgagatttctaattccgagaaacacgtcaccttcgaaaatcaccgcatcgtatccccgaaaaacagtgacctcaaaaacacgtcccccgaacatgggggccgcggatctgaagatgagcaggagtctttccgaccatctacgtcaccgctctctcactccagcccttcagagatttccggaacctcctcatctggttgtgccctggaaagctttgggagcgccgcccagcagcagcaacctccctgcgaacaggaactaagccctctggtttgctcgccggcaggtgtcagtcgtcttacctatgtttcggaacccgaaagctcttatccgactacagcaacagacgatgccctggaggacagaaagagcgatatcacatctgagttgtcgaccactatcatccagggcagtccagcggctctggaggaaagagctatggaaaagctcagggaaaaagtccctttccagaaccgcggaaaagggaccctaagctccattattcagaacaacagcgatacaaggaaggccactgaaaccacctccctgtcgagcaaaccagagtatgtgaagccggatttccgctggtccaaagatcccagcagcaaaagtggaaatctgctcgagacaagcgaagtcggctggactagcaatccagaggagctggacccaatcagacttgctttactgggaaagagcggcctctcatgccaggtgggaagcgccacgagccacccagtcagctgtcaggaaccaatcgacgaggaccagagaatctcccctaaggacaagagcaccgcggggcgcgagttcagtggccaagtctctcaccagacgacttcagaaaaccagtgcacccctattcctagcagcacggtgcattcatccgttgctgacatgcagaatatgccagccgctgtgcacgccctgctcacacaacctagtctgtcagccgcccctttcgcccaacggtacctgggcaccctgccaagcacaggatctaccacgctccctcagtgccacgcgggaaacgcaacagtgtgtggattctctggggggcttccttatccagccgtggccggagagcctgtccagaatagcgttgccgtcggaatctgtctcggctcaaatattggctcaggatggatgggaacgtcttcactctgtaacccatactctaacaccctgaaccagaaccttttatccactacaaaacccttcccagtcccgagcgtcgggacaaactgcggaatcgagccatgggatagtggcgtaacgtcgggtctaggcagcgtgcgggtgccggaagaactcaaactaccgcacgcgtgttgtgtgggcattgcttcacagacgctgctgtccgtgctgaacccaacagacaggtggctgcaagtttctatcggcgtactgagcatttccgtcaatggagaaaaggttgacctgtccacctataggtgtctggtgttcaagaataaggccattatccgtcctcacgcgacagaggaaattaaggtcttgtttattccgtcgagcccaggcgtgttccgatgcactttcagcgtcgcttcttggccatgttcaaccgatgccgagacaatcgtgcaagccgaagcactggcctcaactgtcacactgactgctatcgctgagtcccccgtaattgaagtcgaaaccgaaaaaaaggatgtgctcgacttcggcgacttgacctacggggggtggaaggcactgccactcaagttaatcaatagaacccacgccaccgtcccaattcgcctgattataaatgcaaacgcagtggcttggcgctgcttcaccttctctaaggagagcgtgagagcccctgtggaagtggccccctgcgcagacgttgtgacaaggcttgctggcccttcagttgtgaatcacatgatgccagcaagttacgacggccaagaccctgaattcttaatgatctgggttcttttccactcacccaagaaacagatctcatcaagcgatatcctggatagcgcggaggagttttcagccaaggtggacattgaggtggacagccctaatcctacccccgttctgaggtctgtatctctgcgggctcgggctggcatagcaaggatccacgccccccgagatcttcagactatgcatttcctggccaaggttgcatccagtcggaagcagcacctccccttgaagaacgccggcaacattgaggtgtaccttgatatcaaagtccctgaacagggatcccatttctctgtggacccaaaaaacttgctgctgaaaccaggtgaagagcatgaagtgatcgtgtcattcacaccgaaggatcctgaagcatgcgaggagcgcatcctcaaaatctttgtgcagcctttcggccctcagtacgaagtggtccttaaaggcgaagttataagctctggctcaaaaccactgagccctggcccctgcctggacattccgagcattctgagcaataaacagtttctggcttgggggggcgttccactgggcagaacgcagttgcagaagcttgccttgcggaacaactcagcctccactacccagcatttgcggctgttgattcgggggcaagaccaggattgttttcagttgcagaacaccttcggaagtgaacagcgtcttaccagcaattgtgagatccgcatccatccgaaggaagacatattcatctctgtcttgtttgcgcccactcggctgtcatgcatgctggctaggctcgaaattaagcagcttggtaaccgcagccagcccgggatcaaatttacaattcccctgtcaggctacggggggacctccaacctcattctagagggagtgaaaaagttgtctgatagctacatggtgaccgttaatggcttagtccctggtaaggaatccaagattgtgttcagcgtacgtaacaccggttcacgcgccgccttcgtgaaggcagttgggttcaaagatagccagaaaaaagtactcctcgatccaaaagtgcttcgaatattccccgataagtttgtccttaaagagagaacccaggaaaatgtgacgttaatctataacccatcagatagaggcatcaacaataaaaccgctaccgagctgtctaccgtgtacctgtttggaggagacgagatttcccggcaacaatataggagggcactcctccacaaacctgagatgattaagcaaatcctgccggagcattcagtcttacagaacatcaatttcgttgaggcgtttcaggacgagctcctagtgactgaagtgtacgacctgcctcaaaggccaaacgacgtccagttattttatggatccatgtgtaagataatcctgtccgtgattggagagttcagagactgtatcagctccagggagttcttacagccaagctccaaggcctcactggagtctacgtctgatctgggagcctccggtaagcacggaggcaatgtgagcctggacgttctcccggttaaaggcccacagggatccccattactttctagggcagcaagaccccccctggaccagctggcatcagaagagccttggacagtattgccagagcacctgattctcgttgcccctagcccgtgtgacatggcgaaaactggcaggtttcagatcgtcaataacagtgtgcgcctcctaagatttgagctgtgctggccagcacattgccttacagttactccacagcatggttgcgttgcccctgagagcaagttgcaaattttggttagccctaattcgtcgctgtcgaccaaacagagcatgttcccatggtctgggctgatctacattcactgtgacgatgggcagaaaaagatagtaaaggtccagataagggaagatctgacacaggttgagctcctaacaaggcttacatcaaagccttttggaatcttaagcccggtatctgagcctagcgtatcgcatttggtcaaacctatgaccaaaccacccagcactaaagtcgagattaggaacaaatctatcaccttccccactaccgagcccggcgagacctccgaatcttgcctcgagttagaaaaccatgggaccaccgacgtgaaatggcacctgtctagcctggccccaccttacgtcaaaggagttgacgagtctggcgacgtgttccgagccacctacgccgcctttaggtgttctcccatctctggattattagaatcacacggcatacagaaggtgtctattacgtttttgcctcggggtagaggagattatgcacagttctgggacgtcgagtgccaccccctcaaggagcctcacatgaaacataccctgagatttcagcttagtggccagagcatcgaggccgagaacgagccggagaatgcgtgccttagcaccgactcgctcataaagattgaccacctggtaaaacctcggagacaggctgtgagcgaagcgtcagcccgcattcccgaacagctggatgtgactgccagaggtgtgtatgcaccagaggacgtttaccggtttaggccgacctctgtgggcgagtctcgcaccttgaaggtcaatctgaggaataatagttttattacccatagcttgaagtttttatctcctcgggaacccttttacgtgaagcactctaagtactctctccgagcacagcactacataaacatgcctgtgcaattcaagccgaagagcgcgggaaagttcgaagctctcctcgttattcagacagatgaggggaaatccattgcaattcgcctaatcggagaggccctgggtaagaactag

SEQ ID NO: 25124 - DNA, 111 bp, synthetic construct
  source 1..111: mol_type = other DNA; note = Synthetic coding sequence
atgtgctactacggcaactactacggcggctacggctacggcggcctgggatgcggatatggatcctgctgcggttgcggcttcagacgcttgggctgtggttatggatag

SEQ ID NO: 25125 - DNA, 528 bp, synthetic construct
  source 1..528: mol_type = other DNA; note = Synthetic coding sequence
atgagctacaactgctgcagcggcaacttcagcagccggagctgcggggactacctgcgctatcccgcaagtagccgcggcttcagctacccaagcaacctggtctacagtaccgatctctgcagtcccagcacatgtcagcttggaagttccctgtaccgcggctgccaagaaatttgttgggaacctacatcttgtcagactagctacgttgagtcaagtccatgtcagacatcatgctatcgtccacgtacgtctctcctctgtagcccttgtaaaaccacatacagtggttctttagggttcgggtcttcttcctgtcggagcctgggttatggatcaaggtcttgctacagcgtaggatgcgggagctctggggtgagatccctgggctatgggtcctgcggatttccttccctgggttacggctccggattttgcagacccacttatctcgccagtcgcagttgtcagagcccatgttaccgacccgcctatggatccacattctgcagatccacctgttag

SEQ ID NO: 25126 - DNA, 324 bp, synthetic construct
  source 1..324: mol_type = other DNA; note = Synthetic coding sequence
atgggcaagaagcggaccaagggcaagaccgtgcccatcgacgactcatccgaaactctcgagccagtctgtagacacatccgaaagggcctcgaacagggtaacctgaagaaggccctcgttaacgtcgagtggaatatctgccaggactgtaagacagacaataaggttaaagacaaagcagaggaggagacagaagagaagccctcagtttggctgtgcctgaagtgtgggcatcaggggtgtggtcggaattcacaagaacagcacgccttgaagcattacctaacacctcggagcgagccacactgccttgtgctgtag

SEQ ID NO: 25127 - DNA, 2469 bp, synthetic construct
  source 1..2469: mol_type = other DNA; note = Synthetic coding sequence
atgggcaagaagcggaccaagggcaagaccgtgcccatcgacgactcaagtgagactctggagccagtctgtcggcacatccgcaaaggcctcgagcagggcaacttaaaaaaggccctggttaacgtggaatggaacatctgccaggactgcaaaacagacaataaagtcaaagataaggccgaggaggaaaccgaggaaaagccatcagtgtggctgtgccttaaatgcggacaccaaggatgtggacgcaatagtcaggagcaacacgcacttaaacattatcttactccccgttccgaacctcactgtttggtattgtccctggataactggtctgtctggtgttatgtgtgtgataacgaggtgcagtactgctccagcaaccaactgggacaggtagtcgactacgtccgcaaacaagccagcatcaccacccctaaacccgagaaagacaatggcaacatagaactggagaacaagaaactcgagaaggaatctaagaacgagcaagaaagagagaagaaggaaaacatggctaaggaaaatccacccatgaattccccatgccagatcacagtgaaagggctgtctaacctgggaaacacttgcttctttaacgctgtgatgcagaacctgtcccagactccagtgctacgcgaattgctcaaagaggtgaagatgtccgggactattgtgaagatcgagcccccggacctagccctcactgagccactggaaattaacctcgagccgcccggacccctgactctcgccatgagccagtttctcaatgagatgcaagaaacgaagaaaggcgtggtgacaccaaaggaactgttttcacaggtgtgcaaaaaggccgtgcggtttaagggatatcaacagcaagactcccaggaactgttgaggtatctgctggatgggatgcgagcagaggagcaccagcgagttagcaagggcattttgaaggcattcggtaatagcacggaaaagctggatgaagagttaaaaaataaggtgaaggattacgagaagaaaaagtccatgccttcctttgtggacaggatatttggcggggaattaacttccatgattatgtgcgaccaatgtaggactgtgtctctcgtgcatgaaagcttccttgacttgtccttgccagtcctagacgaccagtctggtaaaaagtcggtgaacgataaaaacctcaagaagacagtagaagacgaggaccaggattctgaagaggaaaaggataatgactcctatatcaaagaacgctccgacatcccatccggcactagcaaacacctccagaagaaggcaaagaagcaggcgaagaaacaggccaagaatcaacgacgacaacagaaaattcagggcaaggtgctccatctgaatgacatctgcacaatcgatcaccctgaggattccgaatacgaggctgaaatgtcccttcaaggggaagtcaacattaagagtaatcacatttcacaagaaggtgtcatgcacaaagaatactgtgtgaatcagaaggacctcaacggacaagccaaaatgattgaatcagttaccgacaaccagaagagtaccgaagaggttgatatgaagaacattaatatggacaacgacctggaggtcctgacgtcctcaccgacgagaaacctgaacggcgcctatctgactgagggatcgaatggcgaggtggacatctccaacggatttaagaacctaaatctcaatgctgcccttcacccagatgaaatcaatattgagatcttgaacgactcgcacacacctggaacgaaggtgtacgaagtcgtgaatgaagatccagagactgcattctgtaccctggccaaccgggaagtatttaatacagacgaatgtagtattcagcactgcctatatcagtttactaggaacgagaaactgagggatgccaataagttactctgcgaggtgtgcactcgcaggcagtgtaacggaccgaaggctaacatcaagggcgagcgaaagcacgtatacacaaacgctaagaaacagatgcttatctctctggcacctccagtcctgaccctgcacctgaagaggtttcaacaggcgggattcaacctgcgcaaagtgaacaagcacatcaagttcccagaaatcctggatcttgccccattctgcacactgaagtgcaagaacgtggctgaggaaaatacaagagtgttatactccctgtatggcgtcgtggaacacagtggcacgatgaggagcgggcactacacggcttacgctaaggcaagaacagccaactcccacctgtctaatctcgttctccatggtgacattcctcaggatttcgagatggagtccaaagggcagtggtttcatatcagcgacacccacgtccaagccgtccccactaccaaggtattaaactcacaggcatatctgttgttctacgagagaatcctttag

SEQ ID NO: 25128 - DNA, 2472 bp, synthetic construct
  source 1..2472: mol_type = other DNA; note = Synthetic coding sequence
atgggcaagaagcggaccaagggcaagaccgtgcccatcgacgactcctcggagaccctcgaacctgtctgtcgacacatcagaaaaggcctcgaacagggcaatctcaagaaggccctggtgaacgtcgagtggaacatttgtcaggattgtaagaccgacaacaaggttaaggacaaggccgaggaggagactgaagagaagccaagcgtttggctgtgcctgaagtgtgggcaccagggctgcggcagaaatagccaagaacaacatgcactgaaacactatcttacaccccgttccgaacctcactgcttggtcctatctctcgataattggtctgtgtggtgttatgtgtgtgataatgaagttcagtattgtagctcaaaccagctcgggcaggtggttgactacgtgcggaagcaagcaagcatcacaacgcctaagcctgccgaaaaggataacggaaatatcgagctggaaaataaaaagctcgagaaggagtcaaaaaacgagcaggagcgagagaaaaaggagaacatggccaaagagaacccaccaatgaatagtccctgtcagatcaccgtcaagggcctgtcaaacctgggcaacacatgctttttcaatgccgtgatgcaaaatctgtcccagactccggttctgagagagctgctaaaggaggttaaaatgtcagggaccattgtaaagatcgagccacctgatctcgctctcacagagcctctagaaatcaatctcgaaccaccaggcccactgaccctggctatgtcacaattcctgaatgaaatgcaggagacaaagaaaggtgtggtaacaccgaaagaactattctcccaggtgtgcaaaaaagccgtgagattcaagggctaccagcagcaggactctcaggagctcttgaggtatctgctagacggcatgagagcagaggaacaccagagagtcagcaagggaatcctcaaggccttcggaaactctacggagaagctggacgaagagcttaaaaataaagtgaaggattacgagaaaaagaaaagcatgccaagtttcgtcgacaggatatttggcggagagttaacctccatgataatgtgcgaccagtgccggacagtatctctggtacacgaaagcttcctggacctctccctccccgtgctcgacgaccaaagcggtaagaaatctgtcaatgataagaatttgaaaaaaaccgtggaagacgaggaccaggacagtgaggaagaaaaggataatgattcttatatcaaggaacgtagcgacattccctctggcacttctaaacatctgcagaagaaggccaaaaagcaggccaagaagcaggcaaagaatcagagaaggcagcaaaagattcagggcaaggttctgcaccttaacgacatctgcacaattgaccacccggaagactctgaatacgaggccgagatgagcttacaaggcgaagtgaatattaagtccaaccacatttcacaagagggcgtgatgcataaggagtattgcgtcaaccaaaaagacctcaacggacaagctaagatgattgaaagtgtgacggacaatcagaagtcgacagaggaggtggacatgaagaatattaatatggacaacgacctcgaggtcctgacgagttcccctacacgcaatctaaacggtgcatacttaactgaaggctccaacggcgaggtggacatttctaatggattcaagaacctcaatctgaatgccgcactgcacccggacgagatcaatatcgagatcctgaatgacagccacacccccggaacaaaggtgtacgaggtggtgaacgaagatccagaaaccgccttctgtactctggctaatcgtgaggtgttcaacaccgacgagtgttctattcaacactgtctctatcaattcactcgcaatgaaaagcttcgcgacgccaataagcttctgtgcgaagtgtgcacacggcggcaatgtaacgggcctaaggctaacattaaaggcgagcgcaagcacgtctacaccaatgccaagaagcagatgttgatctctctggctcctccagtgttgactctccacctcaaacgctttcaacaggccggatttaatctgcgcaaggtcaataaacatataaagttcccagaaatcctggacctcgctccattttgtacattgaaatgcaaaaatgttgctgaggagaatactagagtgctgtattccttatacggagttgttgagcactcaggcaccatgagaagcggccattacaccgcgtatgctaaagcacgcactgccaactctcacctctccaacctggtgttgcacggagacattccacaggattttgaaatggaatccaaggggcagtggttccatattagcgacacacatgtgcaggcagtcccaaccaccaaagtactcaacagccaggcgtacctcttgttctatgagcgcatcctatag

SEQ ID NO: 25129 - DNA, 1167 bp, synthetic construct
  source 1..1167: mol_type = other DNA; note = Synthetic coding sequence
atggaccccatccggagcttctgcggcaagctgcggagcctggcctctactcttgactgtgagactgcacgcctccagagggccctggatggagaagaatccgactttgaggactatcccatgcggatcctgtatgacctgcactccgaggtacagacgctgaaagatgatgtcaatatcctactggacaaggccagactggaaaaccaggaaggaattgactttatcaaagctacaaaagtcttgatggagaagaacagtatggacattatgaaaatcagagaatatttccagaagtacggttattcccctagagttaaaaaaaattcagtgcacgagcaggaggccattaactctgatcctgagttgagtaactgcgaaaatttccagaagaccgacgttaaagatgacctttctgacccacctgtggccagtagctgtatctccgaaaaatctcctcgaagcccacagctctctgactttggtcttgaacgatacattgtgagccaagtcctgccaaatcccccgcaggcagtgaacaattataaggaggagccagtgatcgtgacccccccgaccaagcagtcactggtgaaagtgttaaagacacctaaatgtgctctgaaaatggacgattttgaatgcgtcactcctaagcttgagcacttcgggatttccgagtatacgatgtgtctcaatgaggactacacaatgggcctgaaaaacgcccggaataacaagtccgaggaggccatcgatactgaatccagactgaacgacaacgtctttgcaactccaagccccataatccagcagcttgagaagtctgacgcagagtatactaatagtccactggtgcccaccttttgtacccctggcctgaagattcctagtactaagaacagtatcgctctggttagcactaactatccactgtctaagaccaatagctcctctaatgatctagaagtcgaggacaggacttctttagttctaaattccgacacgtgctttgagaacctgactgatcccagtagtcctaccatctcttcatacgagaatctattgagaacccccactccacctgaagtaacgaaaatacccgaggatattttgcagaaatttcaatggatttatcctacacagaaactgaataagatgaggtag

SEQ ID NO: 25130 - DNA, 1353 bp, synthetic construct
  source 1..1353: mol_type = other DNA; note = Synthetic coding sequence
atgcgggagtgcatcagcatccacgtgggccaggccggcgtgcagatcggcaacgcatgttgggaactctattgcctggagcatggaatccaacctgatggacagatgccctctgataagaccatcggaggaggcgatgactcttttaacaccttcttctctgaaacaggggccggcaaacacgtcccaagagcagtgttcgtggacctggagcctactgtcgtggacgaagttcgcacaggaacatatcgccaattatttcatcctgagcagttaatcaccggtaaagaggatgcggcgaataactacgcacgcgggcactatactattggtaaggaaatcgtcgacctggtgctggaccgcatccgcaagctcgctgatctgtgcaccggccttcaggggttcctcattttccacagcttcggaggggggaccggatccggcttcgctagtctcctaatggagaggctgagtgtggattacggtaagaaatccaagctggaatttgcaatctacccagccccccaggttagcaccgccgtggtggagccttacaatagcatactgacaacccacactaccttggaacacagtgactgcgctttcatggtcgataatgaagcgatttatgacatttgcaggagaaatctcgacattgaaagacctacctacaccaaccttaataggctaattggtcagatcgtgagcagtatcacagcgagcctgagatttgatggagctttgaacgtggatcttaccgagttccagactaatctcgtcccatacccacgaatccacttcccccttgccacctatgccccagtgatcagtgctgaaaaagcgtaccacgaacaactctccgtagcggagataactaacgcctgttttgagccagctaatcagatggtgaagtgcgacccacgccatggaaagtatatggcatgttgcatgctctatcgtggagacgtggttccaaaagacgtaaacgcagcaatagccaccatcaagaccaaacgaaccattcagtttgtcgattggtgtccgacaggatttaaagtgggaatcaactaccagccaccaactgttgtgccgggcggcgatttggctaaggtacagcgggccgtgtgtatgcttagtaacaccacagcaattgccgaagcctgggccagactcgatcacaagttcgatctgatgtacgcaaagagagcgtttgtccattggtatgtcggcgaaggaatggaggagggcgaattctctgaggcccgggaggacctcgccgcgctggaaaaagattacgaggaggtcggcgttgactccgtggaggccgaggccgaagagggcgaagaatattag

SEQ ID NO: 25131 - DNA, 3378 bp, synthetic construct
  source 1..3378: mol_type = other DNA; note = Synthetic coding sequence
atgaccgtggagcagaacgtgctgcagcagagcgccgcccagaagcaccagcagaccttcctgaaccagctgagagaaattacggggatcaacgacacccagatactacagcaagcactgaaagactcaaacgggaacctggaattggccgtggccttcctgacagctaaaaatgccaaaaccccacagcaagaggagactacatactatcagactgccttgcccggtaacgatcggtacataagcgtagggagccaagccgacactaatgtcatcgacctgacgggcgatgacaaggacgatctgcagagggcaattgctttaagtctggctgagagcaatcgagcattccgtgaaacagggattactgacgaagagcaggctatttcgcgcgtcttggaggcatccatagcggaaaacaaggcatgtcttaaacggacaccaaccgaggtctggcgggattcacgtaatccttatgatcgtaagcggcaggacaaagccccagtgggtctgaagaatgttggaaatacctgctggtttagcgctgtgatccagtctctgtttaacctgctggagttccggaggctcgtgcttaactataagcctccatcgaatgcccaggacctccctaggaatcagaaggaacaccggaatcttcccttcatgcgcgagctccgctacctgttcgctctgctcgtaggtactaaacggaagtatgtggaccccagcagggccgtcgaaatactgaaggacgcctttaaatccaatgacagtcaacagcaggatgtgagcgaattcacacacaagctcttagattggctggaggatgccttccagatgaaggctgaggaagaaactgatgaggagaaacctaagaaccccatggtcgaactgttttacggcagatttcttgctgtaggcgtcctagaaggaaagaaatttgagaacacagaaatgttcgggcagtacccactgcaagtgaacgggttcaaggacctgcacgagtgcctcgaggctgccatgatcgagggggaaatagagtccctccacagcgaaaattccggtaaatccggacaagaacattggtttacggagcttccccccgtgctgactttcgagctgtcgcggttcgaattcaaccaagccctgggcaggccggagaagatccacaacaagctggagttcccgcaagtgctataccttgatcggtacatgcatcgcaaccgggagattacgcgtataaaaagagaggaaattaagagactgaaggattaccttaccgttctccagcagcgactagaacgttacttgtcctatggatctggaccaaagaggtttccccttgttgatgttttgcagtacgccctcgaatttgcatccagcaaacccgtttgcacttcccctgtcgacgacatcgacgcttcctccccccccagtggcagcatcccttcgcagacgctgcctagtaccaccgagcaacagggtgcgctgagctccgaattacctagtacttccccctctagcgtcgccgccatttcctcccgatccgtgattcataagccctttacgcagtcacggataccccctgacctgcccatgcatcccgcaccccgccatattactgaggaggaactttctgtgctggaaagctgcttacatcgctggcgcaccgaaatcgaaaacgacacacgtgacctgcaggagtcgatctcccggattcaccgtacaatcgagctcatgtattcggacaagagcatgatccaggtcccttatagactgcatgccgttctggtgcacgagggacaagctaacgccggacattactgggcgtacatctttgaccatcgagaatcgcggtggatgaaatataacgatattgcagtaacgaaatcctcctgggaagagcttgtgcgggatagctttggaggatataggaacgccagcgcctattgcctcatgtatataaacgacaaagcacagttcctgatccaggaggagttcaataaggagaccggtcagccactagtaggcatcgagactctcccccctgaccttcgcgattttgtcgaagaggacaaccagcggtttgaaaaggaactagaggaatgggacgcccagttagcgcaaaaggcattgcaggaaaagcttttggcttctcagaagctgcgcgaatccgagacttccgttactaccgctcaggcagccggggatcctgagtaccttgagcaacccagccgaagcgacttctccaagcatttgaaagaagaaacaattcagattatcacaaaggcctctcatgagcatgaggacaagtctccagagacagtactgcagagtaagcctgagaatactactagccagcccctgagcaaccagagggtggttgaggtggcaattccccatgtggggaaatttatgatcgagtccaaggagggaggatacgacgatgaaatcatgatgaccccaaacatgcagggaatcattatggccattggtaagtcaaggagcgtttacgatagatgcggtcctgaggccggcttcttcaaggcaatcaaactcgaatacgctcgactagtcaaactggctcaagaggatacccctccagagacagactacagattacatcatgttgttgtgtactttatccagaatcaggcaccaaagaagattatagaaaaaactctcctggaacagtttggcgaccggaatcttagctttgacgagcgatgccataacatcatgaaggtggcccaggctaagttagaaatgatcaagcccgaggaggtgaacctcgaagaatatgaggaatggcaccaggattaccggaagttccgcgagactacgatgtacctgatcatcggtctggagaacttccagagggaatcctacattgactccttattgtttctaatctgcgcctaccagaataataaggagctgctttccaagggactgtatagggggcatgatgaggaactcatcagtcactacagacgggagtgcctgctaaagttgaatgagcaggcagcagagctgttcgagtcaggagaggatagggaggttaataatggactgattatcatgaacgagtttatagtgccctttctcccattgctcctggtggacgaaatggaggaaaaggatattctggcagtagaagatatgcggaaccgttggtgtagctacctagggcaggagatggagcctcatctccaggagaaacttactgacttcctccctaagctgctggactgttcaatggagattaaaagctttcacgagcccccaaagttgccctcatactccacgcacgaactatgcgagaggttcgctagaataatgctgtcattaagcagaaccccagcagacgggagatag

SEQ ID NO: 25132 - DNA, 1608 bp, synthetic construct
  source 1..1608: mol_type = other DNA; note = Synthetic coding sequence
atggacctgcggcaggcctgccggacccccagccgggacgaggccggcgtggaactcctcatgacatatttcattcagttggggtttgttgagagtaggttcttcccacccactcgccaaatgggcctgctgttcacttggtacgacagcctgacaggcgtccccgtgagccagcagaatctgcttctggagaaagcaagcgttttgttcaatactggggccctgtatacccaaattggaacccgatgtgatcgccagactcaagcaggactggagagtgccatcgatgcattccagcgggctgccggtgtgctgaactaccttaaagacaccttcacccacaccccgtcatatgatatgagtccagccatgcttagtgtcctggtgaaaatgatgctcgcccaggctcaggagtctgtgtttgagaaaattagtctcccgggaattcgcaacgagttttttatgcttgttaaagttgctcaagaagcagcaaaagttggggaagtttatcagcagctccatgctgctatgagccaagcccctgtaaaagagaatattccttacagttgggcctctctagcatgcgtgaaagcacaccattacgctgctctcgcacattatttcactgcgatccttttgatagatcaccaggtgaaaccaggtacagacctggaccatcaagaaaagtgcctcagccagttatacgaccatatgcctgagggtctcacccctctcgcaacactcaagaacgaccagcaacgaaggcagctcgggaaatctcacctccggcgggccatggcccatcatgaagaaagtgtccgggaggcaagcctttgcaagaagctaaggagcattgaggtgctgcagaaagtgctgtgcgctgcccaggaacgaagcaggctgacatatgcccagcaccaggaagaggacgatctgttgaatttgatagatgccccttctgtggtggcaaaaaccgagcaggaggtagacatcattctgcctcagttttctaaattgactgtgaccgacttctttcaaaaactggggccactgagtgtgttttctgctaacaagcgctggacaccaccacggagcataaggttcaccgccgaggaaggcgacctggggtttaccctgcgcggtaacgccccagtgcaggtccacttcttagatccctactgctccgcaagcgtggctggcgctagagaaggcgactatattgtcagcatccaacttgtggattgtaagtggctgacccttagcgaagttatgaagctgttgaaatccttcggcgaagacgagattgagatgaaggtcgtttccctgttagatagcaccagtagcatgcacaataagtccgccacttactcagtcggtatgcagaaaacgtacagcatgatatgtctagctatcgacgatgacgacaagaccgataaaacaaaaaaaatctccaagaagttgagcttcttgtcttggggcacgaataagaaccgacagaagtctgcttccaccctgtgtctgccctccgttggcgccgccaggccacaagtcaagaagaaactgccctctcctttcagccttctgaatagcgattcaagttggtattag

SEQ ID NO: 25133 - DNA, 2952 bp, synthetic construct
  source 1..2952: mol_type = other DNA; note = Synthetic coding sequence
atggccccccggctgcagctggagaaggccgcctggcggtgggccgaaactgtccggcctgaagaggtgtcccaggaacatatcgaaacagcatacagaatttggctggagccttgcatcaggggcgtctgccgccgtaactgcaagggcaaccccaattgcttggtaggaatcggagagcacatatggctgggcgaaatcgacgaaaactcttttcataatattgacgatccaaattgtgagagacgcaaaaaaaactcatttgtcgggttaaccaatctcggcgcgacatgctatgtgaacacctttttgcaagtgtggtttctcaacttagaattgcgccaggctctatatctctgcccgtccacctgctctgattatatgttgggagacggcattcaggaagagaaagattacgaacctcagaccatctgcgaacacttgcagtatcttttcgccctgctgcaaaactccaaccggaggtatattgatccctctggcttcgtgaaggcactgggattagacaccggccagcagcaggacgctcaggaattttcaaaactctttatgtccttgctcgaagatactctgagtaaacagaaaaatcccgatgttcgcaacatcgtgcaacagcagttttgcggggagtatgcgtatgttaccgtgtgtaaccagtgcggcagagagtcaaagctcctcagcaaattttatgaattggagttgaatatccagggacataaacagcttactgactgtatttcggagttcttgaaagaagaaaagctcgaaggagacaataggtacttttgtgaaaattgtcagagcaagcagaatgccacaaggaagattcgcctcctgagtctgccttgtacgctgaacctgcagctaatgagatttgtctttgatagacaaacgggccataagaagaagctgaatacttacatcgggttctcagaaattctagacatggaaccctatgtagagcataagggggggagctatgtatacgagctctccgcagtcttgattcaccgtggggtgagcgcctatagtggtcactacattgcccatgtcaaggacccgcagtctggggagtggtacaaattcaacgacgaggatattgagaagatggagggcaaaaagctccagctgggcattgaggaagacctggcggagccgtctaagtctcagacaaggaaacctaaatgtggcaagggaactcactgcagtaggaacgcttacatgttggtgtacagattgcagacgcaggaaaagcccaatactacggtgcaggtgccggctttcctccaggagcttgtggacagggacaactcaaaatttgaggagtggtgtattgagatggcagagatgaggaagcagtctgtcgataaaggcaaagcgaagcatgaagaagttaaggaactgtaccagaggctcccagcgggagctgaaccgtacgaatttgtgagcttggaatggctccaaaagtggctggatgagagcactccaaccaagcccatcgacaaccacgcttgcctgtgttctcacgacaagcttcacccagataagatttcgattatgaagcgcatctcagaatatgcagcggatattttctactcccggtatggcggtggcccacggctcacagtgaaagccctttgtaaagagtgcgtcgtggaaaggtgtcgcatcttgagacttaagaatcagcttaatgaggattacaagacagtgaataatctgcttaaagctgcagtcaagggctcagacggattctgggtcggaaagtcttcattgaggtcgtggcgacaattagcccttgaacagctagacgagcaggatggtgatgcggagcagagcaatggcaaaatgaatggctcaacactgaacaaagacgaatcgaaggaggagcgcaaggaggaggaggagttgaactttaacgaagacatcctttgtcctcatggagagctttgcatttccgaaaacgagcggagactcgtgagcaaagaagcatggtctaagctccagcagtacttccctaaggcccctgaatttcccagttataaggaatgctgttctcagtgcaagattctggagagggagggggaggagaacgaagcccttcataaaatgattgcgaacgagcaaaaaacctctctaccgaacttatttcaagataagaacaggccctgcctttcaaactggcctgaagatactgacgtcttgtacattgtctcccagtttttcgtcgaagaatggcgtaaattcgtgcgaaagccgactcggtgttctcctgtgtcgagcgtgggtaactcagctctactctgtcctcatggcgggctcatgttcacattcgcctcgatgacaaaggaggatagcaaactcatcgcacttatctggccaagtgaatggcagatgatacagaaactttttgtcgtcgaccatgttatcaaaattacacggatcgaagtaggggatgtgaacccttccgagacccagtatatcagtgagccaaaattatgtcccgaatgtcgcgagggcctgttgtgtcaacagcaacgcgatctgagggaatacacacaggcaacaatttatgttcacaaagtggttgataacaagaaagtaatgaaggattctgcccccgagctgaatgtcagctccagcgaaactgaagaagacaaggaagaggccaaacctgacggcgaaaaagaccctgacttcaatcagatcatgcacgcattcagtgttgccccttttgaccaaaatctctccattgatggaaagattctgagcgacgattgtgcgactcttggtacgctaggcgtgatacctgagtcagtcattctgctgaaggcagacgagccaattgcggattacgccgcgatggatgatgtgatgcaagtgtgtatgccagaggaggggttcaaaggtaccggcctactcgggcactag

SEQ ID NO: 25134 - DNA, 738 bp, synthetic construct
  source 1..738: mol_type = other DNA; note = Synthetic coding sequence
atgagcgtgtgcagcagcgacctgagctacggcagccgggtgtgcctccctggatcctgcgactcctgttcagacagttggcaagtcgatgactgccctgagagctgctgtgagcctccatgttgcgctccagccccctgcctgtctctcgtgtgtactcctgtgagtcgcgtaagcagcccctgctgccgggtgacttgcgaacccagcccctgccagtccggttgcacgagtagttgtacaccgagttgctgccagcagtcatcctgccaacccgcctgctgcacgagcagcccatgccagcaagcctgctgcgtccccgtgtgctgtaagaccgtatgttgcaagccagtgtgctgcatgccagtgtgttgcggcccttcttcttcttgctgccagcagtcgagttgtcagccagcttgttgtatcagttctccttgccagcaaagctgctgtgtcccagtgtgttgcaaacccatttgctgtgtgcccgtttgctccggcgcaagttcgctttgctgccaacagagctcctgccagccagcttgctgcactaccagctgctgccggcccagcagctctgtttcacttttgtgtcgtccagtctgtcgtccagccagaagggtacccgtgccctcctgctgcgtgccaacgagcagctgtcagccctcctgtgggcgcctggcaagttgcgggtctctgctttgtaggccaacatgttcccggcttgcttgttag

SEQ ID NO: 25135 - DNA, 1098 bp, synthetic construct
  source 1..1098: mol_type = other DNA; note = Synthetic coding sequence
atggccgccagcaccatgagcgtgtgcagcagcgacctgagctacgggtctcgggtgtgcctgccgggctcatgtgattcctgcagtgacagctggcaggtcgatgactgccccgagtcctgttgcgagcctccatgctgcgcacctgccccctgtcttagtttggtttgcaccccagtctcacgcgtgagcagcccttgttgccctgtgacttgcgaaccttctccatgccaaagcggatgcacctcatcttgtactccctcttgctgtcaacagtcatcctgtcagctcgcatgttgtgcctcctctccgtgccagcaggcgtgttgtgtccccgtttgttgtaagactgtgtgttgtaagccagtgtgctgcgtgtctgtgtgttgcggcgattcctcatgctgtcaacagtcaagttgccaaagtgcctgctgtacaagctccccatgccagcaggcgtgttgcgtccctgtatgttgcaagcctgtgtgcagcgggatcagctcatcttgttgtcagcaaagctcatgtgtcagctgcgtgagtagcccttgctgccaggccgtttgcgagccatccccctgtcagagtgggtgcactagttcctgcaccccttcttgttgtcaacagtccagttgtcagcccacctgttgcaccagctccccttgtcagcaggcttgctgcgtgccagtgtgttgcgtcccggtatgctgcgtccctacttgcagcgaggatagcagcagttgttgccagcaatcttcatgccagccagcctgttgcacaagctcaccttgccaacatgcgtgctgtgtgcccgtgtgttccggggcctcgacatcttgttgtcagcagtccagctgccagcccgcctgctgtacagcttcttgttgcaggccttcgagctccgtcagtctgctctgccatcccgtgtgcaaaagtacatgttgtgtcccagtgccctcgtgtggggccagcgcaagttcttgtcagccctcatgctgcagaaccgcctcttgtgtgagcttactgtgccgtcctatgtgtagtcgaccagcttgctattctctctgcagcggacagaagtccagttgttag

SEQ ID NO: 25136 - DNA, 816 bp, synthetic construct
  source 1..816: mol_type = other DNA; note = Synthetic coding sequence
atggccgcctgcaccatgagcgtgtgcagcagcgcctgcagcgactcatggcgggttgacgactgtccggaaagttgctgtgaacccccttgcggaacagcgccatgcctcacattggtctgcactcccgtgagttgtgtgagttcaccctgctgccaggccgcctgtgagccaagcccatgccagtccggttgcacttcctcttgcacccccagttgttgccagcctgcatgctgtgcctcctctccctgtcagcaggcctgttgtgtccccgtgtgttgcaaaccagtttgctgcttaccaacatgctcaaaagacagctcctcctgctgccagcaatctagctgccaaccaacatgttgcgcgtcctctagctgtcaacagagctgctgtgtgccggtgtgctgcaagcccgtgtgttgcgtgccaacctgcagtgaagactcttctagttgttgtcagcactcaagctgccagcccacctgctgcacttcatcaccatgccagcaaagctgttacgtgccagtgtgttgcaagccggtgtgctttaaaccgatatgctgtgtgcctgtctgctcaggagcctctacgagctgttgtcagcaatccagctgccaaccagcgtgttgtacaactagctgctgtaggccgtcctcaagcgtaagccttctgtgtaggcctatttgccgtccggcgtgctgtgtgcccataagcagctgttgcgcgcctgcgtcatcctatcaagctagctgctgccgccccgcgagctgcgtgtcattgctctgcaggccagcctgcagccgcctggcttgttag

SEQ ID NO: 25137 - DNA, 1206 bp, synthetic construct
  source 1..1206: mol_type = other DNA; note = Synthetic coding sequence
atgagcgtgtgcagcagcgacctgagctacagcagccgggtgtgcctgcctggaagttgcgatagttgttccgactcttggcaggtggatgattgccccgagagttgttgtgagccaccttgttgtgcaccatcatgctgcgcacccgccccctgtctgtccttggtttgcaccccggtgtcccgcgtttccagcccctgttgcccggtcacctgcgagccaagcccctgccagtccggctgcacaagctcttgcacaccttcatgttgtcagcaatcttcctgccagttggcctgttgcgctagcagcccatgtcaacaggcttgctgtgtgcccgtctgttgcaagactgtgtgttgtaagccagtgtgttgcgtgcccgtctgttgcggcgattcttcttgttgtcagcagagttcatgccagtcagcctgttgcacatcctcaccatgtcaacaggcgtgttgcgttcccatttgctgtaaaccagtgtgttcgggtatctcctctagttgctgccagcaaagcagttgcgtcagttgcgtatcaagcccttgttgtcaggccgtctgtgaacccagcccctgccagtccggctgcatttcttcgtgtaccccttcttgttgtcaacagagctcttgccagccagcgtgctgtacaagcagcagctgccagcaggcatgctgtgttccagtatgctgcaaaacagtctgctgtaaacctgtctgcagtgaagattcctcctcttgttgtcagcagtcctcctgccagcctgcttgctgcacctcaagcccttgtcagcaggcctgctgtgtaccagtgtgttgtaaacccgtatgttgcaagccagtgggaagtgtcccaatatgcagcggggctagctctttgtgttgccagcaatcctcgtgccaaccagcttgttgtacatctagccagtctcagcagggttgctgtgtgccagtctgttgtaagcccgtctcttgtgtgccggtctgcagcggcgcgtcctcatcttgttgccagcagtcttcctgccaacctgcctgttgtacaacttcctgctgtcgacctagtagctccgtgtctctgctctgcaggcctgtctgtaggccagcttgttgtgtgccagtgccctcctgttgtgcccccaccagttcatgccagccaagctgttgtaggccggccagctgcgtgagtctgctgtag

SEQ ID NO: 25138 - DNA, 849 bp, synthetic construct
  source 1..849: mol_type = other DNA; note = Synthetic coding sequence
atggccgccagcaccatgagcgtgtgcagcagcgcctgcagcgactcctggcaggttgatgcctgtcccgaatcctgctgtgagccacactgctgcgcgctttcatgctgtgctccggctccgtgtctcaccctggtgtgtacccctgtgtcccgcgtgtcctcaccctgctgccaggctgcttgcgagcctagcccctgtcagtcaggttgtacatccagttgcacgccatcatgttgccaacagagttcttgccaaccagcctgctgcaccagctctccttgtcagcaagcttgctgtgttccggtgtgttgcaagcccgtttgttgtctgcccacttgcagtaaagatagtagcagttgttgtcaacaatcctcatgccagccgacctgttgtgcatcatccagcagccagcaatcctgctgtgttccagtttgttgtaaacccgtttgctacgtgcctacatgctccgaggactcaagctcatgttgtcaacagagctcctgccaccctgcttgttgtacctcgtccccttgccaacaggcttgctgtgtccccgtgagatgcaagcccgtgtgctgtaaacccatttgttgcgtgcccgtgtgttccggagccagcacatcttgttgccaacagtctagctgccaaccggcgtgctgcactacgtcctgttgccgaccgagcagttctgtgagtttgctatgtcgccctgtctgtcggccagcctgctgcatgccagtgtcgtcttgctgtgccccagcgtcttcctgccaggccagttgttgtcggccagccagctgtgtcagcctgctatgtcgcccagcttgcagccggccggcatgctag

SEQ ID NO: 25139 - DNA, 891 bp, synthetic construct
  source 1..891: mol_type = other DNA; note = Synthetic coding sequence
atggccagcagccccctgcccggccccaacgacatcctgctggcctctccaagctcagcatttcagccggacactctctcacagccccgccctggccacgcaaatttgaagccgaatcaggttggacaagtgatcctctacgggatacctatcgtctcattggtcatcgatgggcaggagaggttatgcctcgcacagatcagtaacacattactgaagaactttagctataacgagattcataaccgacgcgtggccttagggatcacctgcgtccagtgcacccccgtacagttggagatactgagacgtgccggcgcaatgcctatttcaagccggaggtgcggcatgataactaaacgagaagctgaaaggctttgtaagagcttcctgggtgaaaaccgacctcccaaactccccgataacttcgccttcgacgtgagccacgaatgcgcttgggggtgtcggggcagcttcattccagctagatacaacagctcgagggccaaatgcataaaatgttcgtattgcaatatgtatttttcaccaaacaagtttatttttcatagtcatcggacacccgatgctaaatacacccagcccgatgcggccaacttcaatagctggaggagacacctcaagctgaccgataaatcgccgcaggatgaactggtgtttgcttgggaggatgtcaaggccatgttcaacggagggtcccgcaaacgtgcactcccgcagcctggtgcacaccccgcctgccaccccttgtcgtccattaggacccgaagcattgcctttagctcccagaccttaatgctgctggaggaaatcttcggtgaaaaggatcaggaagattatatgcgaattaacgaggacaatatctggctctag

SEQ ID NO: 25140 - DNA, 5346 bp, synthetic construct
  source 1..5346: mol_type = other DNA; note = Synthetic coding sequence
gtgaagaagatccaccggcaccggctgagccccgccaccgagaagggagccgcttcctccggcgagggcgataaagaccctcccccaccagctcacgaggacatcgccgtgaaagggacagccaccgcagccggcaccggacctggaaccggcgctgccgccgctgccgcagccgccgtgccccccccacatcctgccgcagcagccgcggcagctgcagctgcagccgctgcggcggctgctgccgtgccacccccccatcccaatattagagcactgcagacgcaggccccgcagcagatacctcggggccctgtgcaacagcctctggaggataggatttttacaccagccgtatcagctgtgtactcaaccgtgacacaagtggcgcgccagcctggaacaccaacgccttctccatattctgcgcacgagatcaacaaaggacatcctaaccttgctgctacccctcccgggcacgccagtagtcccggcctctctcaaactccataccccagcgggcaaaacgccgggcctacaacactcgtgtacccacagacaccacagaccatgaactctcagccccagacccgatcccctgtgatcttctctccttcccagttctttcagcgacctcagattcaaccacctagagctaccatacctaatagctccccaagcatccggcccggcgcccagaccccgaccgcagtctaccaggccaatcagcacatcatgatggttaatcacctgcctatgccctaccctgttcctcagggaccgcagtactgcattcctcagtataggcacagtgggcctccttacgtcggccccccgcagcagtacccagtgcagcctcctggaccgggcccattttaccctggccccggaccaggtgattttccaaatgcctatggtacacctttctatccatcgcaacccgtgtatcagtctgcacccataatagtgcctacacagcagcagccccccccagcaaagcgtgaaaagaagactattcgaattcgggaccccaaccagggtggtaaggacatcaccgaggaaataatgagtggagggggctcccgcaatccaacccctcccatcggcagacctacaagcaccccaactccccctcagctgccaagccaggtgcctgagcattcccctgtcgtgtacgggaccgtcgaaagcgcccacctggccgccagcacccccgtaacagctgcctccgaccagaaacaggaagaaaagcccaaacctgatccggtgctgaaaagccctagtccagtcttaagattagtcctgtccggggaaaaaaaggaacaggaggggcagacatccgagacgaccgcaatcgtgtctattgccgagctgcctctgccacctagtccaactaccgtctcctctgtagcacggagtactattgccgctccgacttcttctgccctctcttctcagcctatcttcacgacagccattgatgacagatgtgagctatcgagccccagggaggataccattccaatcccctcgctgacaagctgtacagagacctcagaccctctgccgacaaatgaaaatgatgacgatatctgcaagaaaccatgttccgtggctccgaacgacatacccctggtgtcatctacgaatctgataaatgagatcaatggtgtgagcgagaaactttctgcgactgaatccatcgtggaaattgtgaagcaagaggtgcttcctctcactctcgaattagagatcctggagaaccccccggaggaaatgaagctggaatgtatccccgctcctatcacaccaagcacagtccctagttttccaccaactcctccgaccccacccgcttctcctccacatacgcctgtcatcgtaccagctgccgctactacagtcagctctccatctgcggcgatcaccgtgcagcgcgttctagaggaagacgagtcgatccggacttgcctcagcgaggacgctaaggaaatccagaacaaaatcgaagtcgaggcggatgggcaaaccgaggaaattctagactcacagaatctgaacagcaggcgcagccctgtccccgcacagatagcaatcaccgtgcccaagacgtggaagaaacccaaggatcgcacaaggactactgaggaaatgctggaagccgagttggaactaaaggctgaagaagagctttccatcgataaagtgctggagtctgaacaggacaagatgagccagggattccatccggagagggacccatcagatctcaaaaaagtcaaggcggttgaagagaatggagaagaggctgagcctgtgaggaacggagccgaatccgtaagcgaaggagagggaattgacgcaaactcaggatccaccgacagctccggcgacggtgtgacctttccattcaagcctgagtcttggaaaccaacggacaccgaaggcaagaagcagtacgatagagagttcttgctcgattttcagttcatgccagcgtgcattcagaagcctgaaggtctgccacctatctccgacgtggtgctcgacaagatcaaccagccgaaacttccaatgaggaccctggacccccgaatcttgccccgcgggccagatttcaccccagccttcgctgacttcggccggcaaaccccaggcggacgtggcgtccccctgcttaatgtcggctcccggagaagtcagcctggacagcgcagggagccccggaagatcattaccgtgtcggtaaaggaagacgtgcatctgaaaaaggcagagaatgcctggaaaccatcccagaaaagggatagccaagcggacgatcccgaaaatattaaaacccaggagctgtttagaaaagtccgatccatccttaataaactgaccccgcagatgttcaaccagttaatgaagcaggtctccggattaacggtggatacggaagagcgtttgaagggggtcattgatctggtgtttgaaaaagccatagatgagccttccttcagcgtcgcctacgccaacatgtgcaggtgtctggtgacactcaaagtgcccatggcggacaaacccggcaacaccgttaattttagaaaactgcttctcaacagatgccaaaaagagttcgagaaggacaaggcagatgatgacgtgtttgaaaagaagcagaaagaactggaggccgcatcagccccggaggaaaggacgaggctgcacgacgagctggaggaggcaaaggacaaggcccgccggcgttccattgggaatattaagttcattggtgaactcttcaagctgaagatgcttactgaggctatcatgcatgactgtgtggtcaaactgctcaagaaccatgacgaagagtccttggaatgtctgtgcagactgctcacaaccattggaaaggatctcgattttgaaaaagctaaacccaggatggatcagtacttcaaccagatggaaaaaattgtaaaagagagaaaaacctcctctagaattcgattcatgctccaggatgtcattgatcttaggttatgcaattgggtgagtcgacgcgccgatcaaggccccaaaaccattgagcagattcacaaggaggctaagattgaagagcaggaggagcagaggaaggttcagcagctgatgacaaaggagaagcggcgcccaggtgtccagcgggtcgacgaaggaggttggaacactgtgcaaggcgccaagaactctagagttctggacccgtctaagttccttaagataacgaaacctactatcgacgaaaaaatccagctggtgccaaaagcacagctcggcagctgggggaagggcagtagcgggggcgcgaaagcctccgagaccgatgccctcagaagtagtgcttcatcgctgaaccgatttagcgcactgcaaccaccagccccaagcggttcaacaccgtcaacgccggtggaattcgattccaggcggacactcacatcacgagggtcgatggggagggaaaaaaatgataaaccactgccatcagccaccgctagacccaacaccttcatgcgggggggatcctctaaggacttactggacaaccagagccaggaagagcagagacgagaaatgttagaaactgtcaaacagctcactggcggtgttgatgttgaaagaaactcaacggaggccgaaaggaataaaacccgagagtcggctaaacccgaaatcagcgcaatgtcagcccatgataaggcagccctttccgaagaggagctagagcgcaaatccaagtcgatcattgatgagttcctccatattaacgattttaaagaagctatgcagtgcgtggaagaacttaacgcccagggccttcttcatgtctttgttagggtcggcgtggagtcaaccctagagagaagtcaaattactcgcgatcatatgggacagcttctctaccaactagtgcagtctgagaaactgtctaagcaagacttcttcaaaggcttcagcgaaacattggagttggcggatgatatggccattgatatacctcacatatggctttacctggccgaactggttactcctatgctcaaggagggagggatttctatgagagaactgacaattgagttctctaagcccctgttgcccgtggggagagcgggagtgctgctgagcgagatcctacacctgctttgtaaacaaatgagtcacaagaaggtcggcgcattatggcgggaggccgacctcagctggaaggacttcctccccgaaggtgaggacgtccataatttcctccttgagcagaagctggattttatagagtcggattccccttgcagctccgaggccctgtcaaaaaaggaactatctgctgaggaactttacaagcggctcgagaaactcatcatcgaggataaggctaatgatgagcagatcttcgactgggtggaggcaaatctcgacgagatacaaatgtcatccccaacctttcttagggcactgatgaccgctgtatgcaaggctgccattatcgcagactcttccaccttccgggttgatactgcggtgatcaaacagcgggttcccatcttgcttaagtatcttgattcagataccgaaaaagagttgcaggctttgtatgccctgcaggcatccattgttaagctggaccagccagcaaacctactcaggatgttcttcgactgcctgtacgatgaagaagtgatatcggaggacgcgttctacaaatgggagtcatccaaggaccccgccgaacaaaacggcaaaggtgtagcactcaagtccgttaccgccttttttacatggctgcgagaagcagaggaggaaagcgaagataattag

SEQ ID NO: 25141 - DNA, 4758 bp, synthetic construct
  source 1..4758: mol_type = other DNA; note = Synthetic coding sequence
atgaacagccagccccagacccggagccccttcttccagcggccccagattcagcctcccagagccacaattcccaactcttcaccttccattcgtcccggcgcacagacacctacagctgtgtaccaagcgaaccagcacataatgatggttaaccatctgccgatgccataccccgtaccccaaggaccccaatactgtatcccccagtataggcattccgggcctccctacgtgggtccaccacagcaatacccggttcagccgccaggacctgggccgttctaccccggacctggccccggagatttcccaaacgcctatggcactccgttctatccctcgcagccagtgtaccagagcgctcccatcatcgttcctacccaacagcaacctcctccagccaagcgcgagaagaaaactatccgcattagggaccccaaccagggcggtaaagacatcaccgaagaaatcatgtccggaggcggcagcagaaaccccaccccaccaatcgggcggcccacatccacccccaccccacctcaacaattacccagccaggtgcctgagcactcaccggttgtgtatggaacagtcgaatcagcgcacctggctgcaagtactccagtcacagcagcatccgatcagaagcaggaggaaaaacctaagccagaccccgttctcaagtccccatcacctgttttgaggctagtgctttccggtgagaaaaaagagcaggagggtcagactagcgaaacaaccgccatcgtttccattgctgagctgcctctgcctccatctcccactacagtcagctccgtggcccgaagcacaatagctgccccaactagctcagcactttctagtcaaccgatcttcacaacggcaattgatgaccgctgtgaacttagttcaccgcgggaagacaccatcccaattccttccctgacgtcatgtacagagacaagtgatccgttgcctactaatgaaaatgatgacgacatttgcaagaaaccttgttctgttgccccaaatgatatacccctggtgtccagtaccaatctgatcaacgaaatcaatggcgtgtccgaaaaactttcagccaccgaatccattgtagagatcgtaaagcaggaagtgttaccccttacgctggaattggaaatcctcgagaacccccctgaggaaatgaagctcgaatgcatcccagctccaattacgccgagcaccgtgccaagcttcccacccactcctccaactccaccagccagcccgccacatactcctgtcattgtgcccgccgctgcgaccacagtgagcagtccaagtgctgcgattaccgtacagagggttctggaggaggacgaatccataagaacatgcctgagcgaagatgctaaagaaatccagaataaaatcgaagtcgaggccgacggccaaaccgaggagattcttgacagccaaaatctcaacagtcgacgatcacccgtcccggctcagatcgcaatcactgtgcccaaaacatggaaaaagcccaaggaccgaactcgaaccactgaggaaatgctggaagcggaattagaattgaaggcggaggaggaactttctatagacaaggtcttggagtccgaacaagacaaaatgtctcaagggttccatccggaacgcgacccctctgatttgaagaaagtaaaagctgtcgaggaaaatggcgaggaggctgagccagtgagaaatggagccgagagcgtttctgaaggcgagggaatcgacgcgaactcggggagcacagactcttccggcgacggtgtgacctttccgttcaagcccgaatcttggaaacctacagatactgagggcaaaaagcagtatgacagagaattcctgttggatttccagtttatgccagcgtgtatccagaagcctgaggggctcccaccgatctctgatgtcgttctagacaaaatcaatcagcccaagctccctatgcggactctggacccccggatcctgcctaggggtccagactttacgcctgcgttcgcggacttcggtaggcagacccctggcggaagaggagtgccgctgctcaacgttggtagtagaaggtctcagcccggccaacggagggagccacgtaaaataatcacagttagtgttaaagaagatgtgcacttgaagaaggccgagaacgcatggaagccgtcccaaaaacgcgacagccaggctgatgacccggaaaatatcaagacccaggaactgttccgcaaggtgagatcgatactgaataaactgaccccacagatgttcaaccagttaatgaagcaggtgagcggactaaccgtggacactgaggagagactgaagggcgtcatcgacctggtcttcgagaaagctattgacgagcccagttttagtgtggcatatgcaaacatgtgtcggtgcttggtgacccttaaagtacctatggccgacaagcccgggaacaccgtcaacttcagaaaactgttgctaaaccggtgtcagaaggagttcgaaaaggacaaggcagacgacgacgtgtttgaaaagaaacagaaagagctggaggccgcatctgcccctgaggaaagaacgcggctgcacgacgaactggaagaagccaaagataaggctaggaggagaagcatcggcaacattaaattcatcggcgagctttttaaactcaaaatgctaaccgaagcaatcatgcacgattgcgtggtcaagttactaaaaaatcacgacgaagaaagtttggagtgtttgtgtcggctattgaccacaattggcaaagatctggacttcgagaaggctaaaccccgaatggaccaatatttcaaccaaatggaaaagatcgttaaagagagaaaaacttccagcagaattcgattcatgctccaagatgtgatcgacctcagattgtgcaattgggtgagtagacgcgctgaccagggaccgaagacaattgaacaaattcataaggaagctaaaatagaagaacaggaagagcagcgtaaagtgcaacaactgatgacaaaagaaaagcggcgtcctggggtgcaacgggtggacgagggcggttggaacaccgtacagggtgccaagaacagccgtgtgctcgatccgtccaaattcttaaagatcaccaagccaacaatcgacgagaaaattcagctggtaccgaaggcccagctcgggagctggggaaagggcagcagtggcggagctaaggcgtcagagaccgatgctctacgatccagcgcttcttctctcaatcgattcagtgctctccagcctcccgcccctagcggctctacacccagcacgcccgtggagtttgactctaggagaacattgacatcccgaggcagcatgggccgagaaaaaaacgacaaaccactgcccagcgctaccgcccgacctaacacgttcatgcggggcggatcttcaaaggacttgctggataatcagtcccaagaggagcagcgtcgcgagatgctggaaacagtcaagcagttgacgggtggcgttgacgtggagagaaatagtaccgaggccgaacgcaataagacccgcgaaagcgcgaagcctgaaatttctgccatgagtgctcatgataaggccgcgctctcagaggaagagctggaacggaagtctaagtccataattgacgagtttttacacattaatgacttcaaagaggcgatgcagtgcgttgaagagctgaatgcccaaggcctccttcatgtcttcgtgagagtcggagtggaatctactctcgaaagatcacagataactagagatcacatggggcagctgctgtatcagttggttcagtcagagaagctgtcaaaacaggatttttttaagggcttcagtgagacgctggaacttgcagatgacatggccattgatatcccgcacatctggctgtatcttgctgaactggtgaccccaatgctgaaagagggcggaatcagtatgcgcgaactaacaatcgagtttagcaagcccctgcttcctgtggggcgcgccggagtcctcttaagtgaaatcctccatctactctgtaaacagatgagccataaaaaggttggtgctctgtggcgggaagccgacttgtcttggaaggactttctgcccgagggagaagatgtccacaattttctgctggagcaaaagttggactttattgaatctgactccccatgttcctccgaggctctcagcaaaaaggagttgtccgctgaagagctctacaagcgcctcgaaaaactgattattgaggataaagctaacgatgagcagatttttgactgggtggaagcgaacctggatgagattcaaatgagctcccctacgttcctgcgagcgctgatgaccgctgtgtgtaaggccgctattatcgccgattccagcacctttcgggttgatacagctgtgataaaacagagagtcccgattctgctgaaatacctggattccgatacagagaaagagctccaggcactgtacgccctgcaggcctccattgtcaaacttgaccagccagcgaacctgctcagaatgttttttgattgtctttatgatgaggaggtgatctccgaggatgctttctacaagtgggagtcttcaaaagatccagccgaacagaacggtaagggggtggctctaaagtccgtcactgccttttttacctggctccgggaagcggaggaggagtccgaagacaactag

SEQ ID NO: 25142 - DNA, 3087 bp, synthetic construct
  source 1..3087: mol_type = other DNA; note = Synthetic coding sequence
atggccagcgaggccgtgaaggtggtggtgcggtgccggcccatgaaccaacgggaacgtgaactgcgctgtcaaccagtggtcacagtcgactgcgctagggcccagtgttgtattcagaatcctggcgccgctgacgagcctcccaagcaattcacatttgatggcgcgtatcacgttgatcacgtaactgaacaaatttataacgagatcgcttaccctctagtggaaggggtgacggaaggatacaacggtacgattttcgcatacgggcagacgggttcgggcaaatctttcaccatgcagggcctccccgatcctcccagtcagaggggaattataccaagggcctttgagcatgttttcgagagcgttcagtgtgccgagaacaccaaattcttggtgagggcatcttacctggaaatctacaacgaggatgtgagggacctcctgggggctgataccaagcagaaattagaactgaaagaacaccccgaaaagggagtgtacgtgaaggggttgagtatgcacaccgtccattccgtggcacagtgtgagcatatcatggagaccggttggaagaacagatccgtgggatatacactcatgaataaagatagcagtcgttcacatagtatcttcaccatctcaatcgaaatgtctgctgtggatgaaaggggcaaagaccatttgcgtgccggtaagctgaatctagtcgacttggccggctctgagcgccagagcaagacaggggcaacgggtgaaagactgaaagaagcgactaagatcaacttaagcctctccgccctggggaatgtaatttccgcactcgtggacgggcgctgtaaacacgtgccatatagggattcaaagctcacaaggctcttgcaagattccctgggtggtaacacaaagaccctcatggttgcgtgcctcagccccgctgataacaactatgatgaaacgttaagcacccttcggtatgctaaccgtgcaaagaacattcgaaataagccgcggattaatgaagaccctaaagatgccctccttcgtgaatatcaggaggaaatcaaaaaattaaaggcaatcctgacccagcagatgtctcccagtagtctgtctgcattgctgtcgcgacaagtgcctcctgatccagtacaggttgaggaaaagcttctgccccagcctgttattcagcatgatgtagaggctgaaaagcagctaattagagaggagtacgaagaaagattggctaggctcaaggccgactacaaggccgagcaagaaagccgggcccgtctcgaagaagacatcaccgccatgaggaactcctacgatgtccgactctctacacttgaggaaaatctgaggaaggagactgaggctgtgttgcaagttggggtcctctacaaagcagaagtgatgtctagggccgagtttgcctctagcgccgaataccctcctgcttttcagtacgaaaccgtcgttaaacctaaggtgttctctacaaccgacaccctgccgtccgatgatgtgtcaaagacacaggtgtcatcccgcttcgccgagctgcccaaagtcgaaccatcaaagtccgagataagcttaggatccagtgaatcttccagtctggaagaaacttccgtgagcgaagcgttccctggcccagaagagcctagcaatgtggaggtgagcatgcccactgaggaatcgaggagcaggtacttcctagacgagtgtcttgggcaggaggccgccggccacttgctgggcgaacagaattatctcccacaggaggagccgcaggaagtgcctctacaggggctgctgggactgcaagacccctttgccgaggtcgaggctaagctggcgcgactcagttccaccgtggcgcggactgatgcaccacaggccgacgtgcctaaggtcccggtgcaggtgccagcccccacagatctgctggaaccatcagacgccagaccagaggccgaggctgctgatgatttccctccacgtccggaggtggatttggcttctgaggtggctttggaagtggtgaggacagccgagccgggagtgtggttggaggcccaagctccggtggctttggttgctcagccagagcctctgcccgccaccgctggcgtcaagagggaaagcgtgggaatggaagtcgccgtgctcaccgacgatccactgcctgtggtcgatcagcaacaggttcttgcacggttacaactgttagagcagcaggtcgtgggcggggagcaggcaaagaataaggacctgaaggagaagcacaagaggcgcaaacgatacgccgacgagcgcaggaagcaactggtggccgctctccagaattccgacgaggattccggtgactgggttcttttgaatgtttacgacagcatccaggaggaggtgcgagctaagtccaagttgctcgagaaaatgcaacggaagttgcgtgcagcggaagtggagatcaaggacctccagtcagagttccagctggaaaaaatcgactatcttgccaccatccgacgccaagagagggattccatgctgctgcaacaactgctcgaacaggtgcaacccctgatcagaagggattgcaactactccaacctggagaagattctgagggagagctgctgggacgaagacaacggattctggaaaatcccgcaccccgtgatcaccaaaacaagtcttcctgtggtttccaccggcccccagaacaagcctgcacgcaagactagtgccgccgacaacggtgagccaaacatggaagacgatagataccgcctcatgcttagcagaagtaattcggaaaacatcgccagtaactacttcaggtctaaacgtgccagtcagatcctctctacagacgcaagaaagtctcttactcatcacaactcacccccaggactgagttgccctctgtccaataatagcgccatacctcccactcaggctcctgagatgcctcagccacggcctttccggctcgagtctctggatatcccattcacaaaggccaagagaaaaaaatctaagagtaactttggctctgagccactttag

SEQ ID NO: 25143 - DNA, 921 bp, synthetic construct
  source 1..921: mol_type = other DNA; note = Synthetic coding sequence
atgcggcagcacgacacccggaacggccggatcgtgctgatcagcggtaggcggagcttctgctctatcttctcggtgttgccttatcgagactccactcaggtcggagaccttaaactggacggggggagacaatcaaccggggccgtgagcttgaaggaaatcatcggcctggaaggagtcgagttgggagcagatgggaagactgtgtcctatacacaatttctcctgcctacaaacgcgtttggggccaggcggaacactatcgacagcacaagctctttttcccaattccgcaacctgtcccaccggtcattgtctatcggccgcgcttccggcacgcaaggcagtctcgacaccgggtctgacctgggggactttatggattacgaccccaacctcctcgacgatcctcagtggccctgtgggaagcataagcgtgtcctgatctttccaagctacatgactaccgtgattgattacgttaaaccctccgaccttaaaaaggacatgaatgaaacgttcaaagagaagtttcctcatattaaactcacactgtcaaagatccggtcacttaaacgcgagatgcgcaaactggcccaggaggactgcgggctggaggagcctaccgttgctatggccttcgtttattttgagaagctcgccttaaagggcaagcttaacaaacagaatcgcaaactgtgcgccggtgcttgcgtgcttcttgcagccaaaattggttctgatctcaaaaaacatgaagtgaagcacttaatcgataaactggaggagaagtttcgcctcaaccggagagagctgattgcattcgagtttcctgtgctggttgcgctcgagtttgcactgcaccttcccgaacacgaggttatgccacactaccgccggcttgtccagagctcctag

SEQ ID NO: 25144 - DNA, 2820 bp, synthetic construct
  source 1..2820: mol_type = other DNA; note = Synthetic coding sequence
atggccgcccagcccccccggggcatccggctgagcgccctgtgccccaagtttctgcacacaaattccacgtcacatacttggcccttcagtgccgtggccgaattgattgataatgcctatgaccctgacgtcaacgctaagcaaatctggattgacaagacagtcatcaacgatcacatctgcctgacttttactgacaatggcaatggaatgaccagtgacaagcttcataaaatgctgagttttggattcagtgacaaagtaaccatgaacggccacgtaccagtcggtctctatggaaatgggttcaaatcaggctccatgcgcctgggtaaggacgcgatagtgttcacaaagaatggtgaatctatgagcgtgggactgctgagccagacatacttggaggtcataaaagccgagcacgtggtggtccccatcgtagccttcaacaaacatcgccagatgatcaatttggctgagagcaaggcatccttagcggctatcctggaacatagccttttctccactgaacagaagttactggctgaactggatgccatcattgggaagaaggggactagaatcattatttggaatctgagatcatataagaacgcaaccgagttcgatttcgagaaagataagtatgacattagaatccccgaagatctggatgaaatcacgggtaaaaagggctataaaaaacaagagagaatggaccagatagccccggagagcgactacagtctgcgagcctactgcagcattctgtacctgaaacccagaatgcagatcatcctgcggggccaaaaagttaaaacccagttagtttccaaatctctggcctacatcgagcgggacgtctaccgtcccaagttcctgagcaagactgttaggatcacctttggcttcaattgtcgaaacaaagaccactatggcataatgatgtaccacagaaacagattaataaaggcctatgagaaagtgggctgtcagctgcgtgcgaataatatgggagtcggagtcgtgggaatcatcgaatgcaattttctcaagccaacacacaacaagcaggatttcgattacaccaacgaataccggcttacaataaccgcacttggggagaagctgaatgattactggaatgaaatgaaggtaaagaaaaatacagagtatccattgaacttgccagtagaagacattcagaagaggcctgaccagacttgggtccaatgcgacgcctgtctaaaatggaggaagctgcctgatggcatggaccagcttccggagaagtggtattgtagcaataaccccgatccccaatttaggaactgcgaggtgcctgaggagcctgaggacgaggatctcgttcaccccacctacgagaagacctacaaaaagacaaataaggagaagtttaggatcaggcagccggagatgatccctcgaatcaatgctgaactcttgttcaggcctactgccttgtcaacaccttcgtttagctctcctaaagaatctgtgcccaggcgccatctgtctgagggcacgaacagctacgcgacccggctgttaaacaatcatcaggtacccccacagtcagagccggagtcaaatagtctgaaacgcagactttctactcggtcgtcaatactgaacgcaaagaatcgtcgcctgtcatctcaattcgagaatagtgtttataagggcgatgacgacgatgaggacgtcatcatactggaggaaaacagcacacctaaaccagcagtggaccatgatattgatatgaagtctgaacagtcacacgtcgagcagggaggggtacaggttgagtttgtcggggattctgaaccatgtgggcagacagggtctactagtacatcctcctcaagatgcgaccagggaaacacggccgcaacacaaactgaggtccctagtctcgttgttaaaaaggaggaaaccgtagaggacgagattgatgtcaggaacgacgccgtgattctgcccagctgtgtggaagccgaagcaaagattcatgagacgcaggagacaactgacaagagcgcggatgacgccggctgtcagctgcaggaattgcgtaatcagctcttactcgttacggaagagaaggagaattataaacgccagtgccacatgtttactgatcaaatcaaggtactccagcagaggatactcgaaatgaatgataagtacgtgaagaaagagacgtgtcatcaaagcaccgaaacagatgctgtgtttctgctcgagtccataaatgggaagtcggagtctccagatcacatggtctcccagtatcagcaagcactggaagaaattgagcgattgaagaaacagtgctccgccttgcagcatgtcaaggcggagtgcagccagtgtagcaataatgagtctaaatcagaaatggacgaaatggctgtgcagctggatgacgtgtttaggcagctggataagtgctccattgaaagggatcagtataagtcagaagtagagctgctggaaatggaaaagtcccaaatcaggagccagtgtgaagaactgaaaacagaagtggagcagctcaaaagcactaatcaacaaacagctacggatgtgagtacttcatccaacatagaagagtcagtgaaccacatggatggcgaaagccttaaacttcggagcctccgtgtgaatgtggggcagctgttggctatgatcgtgccggacctcgatctgcaacaggtgaactatgacgtcgacgtggtcgatgaaattcttggacaagtggttgagcagatgagtgagatttcaagcacctag

SEQ ID NO: 25145 - DNA, 1149 bp, synthetic construct
  source 1..1149: mol_type = other DNA; note = Synthetic coding sequence
atgagcgccgccaaccccgagacccccaacagcaccatcagccgggaagcatctactcaatcaagctctgcagccgcaagccaggggtgggtcctgcccgaggggaaaatcgtgcccaataccgtatttgtggggggaatcgatgcccgcatggacgagacagagatcgggtcctgtttcggtagatacgggtccgtgaaagaagtgaaaatcatcacaaatcgcacaggtgtaagtaagggttatgggttcgtgtcttttgttaacgacgttgatgtgcaaaaaatcgtgggatcccagatccatttccacggcaaaaaactgaagctcggaccagctattagaaaacagaaactgtgcgcacggcacgtgcagcccaggcctttagtagtgaacccccctccaccgcctcagtttcagaatgtatggcgcaatcccaacactgaaacctacctgcaaccccaaatcacacctaacccggtgacccaacatgttcaggcctatagcgcctacccccatagcccaggacaagtgattaccggatgccagttactggtgtataattatcaggagtaccccacgtatcccgattccgcctttcaggttacaacgggctaccaactccccgtgtacaattaccaaccttttcccgcatatcccagatctccatttcaggtcactgccggataccaactccctgtgtacaattaccaggcattccccgcttatcctaactcaccctttcaggtggctactgggtaccagttcccggtttataactatcagcctttcccagcatatccttcctctccattccaggtaactgccgggtatcaattacccgtgtacaattaccaagctttcccagcatacccgaacagtcccttccaagttgccaccgggtatcagttccccgtgtataattatcaggcattccccgcctaccccaactctcctgtgcaagtgacgactggctatcagttgcctgtgtacaattatcaggccttccccgcttatcctaattctccttttcaggtggcgactggatatcagttccccgtatacaattatcaagccttcccggcttatcccaactcccccgtccaggtgacaacaggttaccaacttcccgtgtataattaccagtag

SEQ ID NO: 25146 - DNA, 5058 bp, synthetic construct
  source 1..5058: mol_type = other DNA; note = Synthetic coding sequence
atgagcctgcccttctaccagcggtgccaccagcactacgacctgagttaccgcaataaagacgtgcgatccaccgtatcacattaccagcgcgagaagaagagaagtgccgtgtatacacaggggagcacagcctactcatcccggtcgtcagcagcacatcgcagagagtctgaggcgttcagaagagcctctgcatcctcatcccaacaacaagcctctcagcacgccctgtccagcgaggtgtcgcgtaaggccgcctctgcctacgactatggcagctcccacggcctcactgacagtagtctgcttctggacgactattcttccaagctctcacccaagcccaaaagggcgaagcatagcctgctctccggtgaagagaaagagaacctcccgtcagactatatggtacccattttctctgggcgacagaaacatgtgtctggcatcacagatacggaggaagaaagaatcaaggaggctgctgcctacattgcccagagaaatctgctcgctagtgaggagggaatcaccacatccaagcagagtaccgccagcaagcagaccacggctagtaaacagtctacagcctctaagcagtccactgcctccaaacagagcactgcttcaaggcagagcaccgcctcccggcagagtgtagtgtccaaacaagcaaccagtgcgctgcaacaggaggaaacatccgagaagaaatcccgaaaggttgtgatccgagaaaaggccgagcgcctctcacttagaaaaaccctggaagagacagaaacgtaccatgccaaactcaatgaagaccacttgctgcacgccccagaatttatcatcaaaccaagatctcatacagtgtgggaaaaggaaaacgtgaaactacactgttcaatcgctggatggcctgagcccagggtgacatggtacaagaaccaggtgcccattaatgttcacgccaacccaggtaaatacatcattgagtccaggtacgggatgcacactctcgagataaatggctgcgatttcgaagacaccgcacaatacagagccagcgctatgaacgtaaaaggtgaattgagcgcgtatgcgtcagtggtggttaagcgctacaagggggagttcgacgaaacaaggtttcacgctggagcgtcaacaatgccactttcctttggggtgaccccctacgggtatgcaagccggttcgagattcacttcgatgacaaatttgacgtctcatttggccgggagggcgagacaatgtccctgggatgtcgggtggtaattactcccgagataaagcattttcagccagagatccagtggtatcggaatggggtccctttgagcccctctaagtgggtgcaaacgctctggagcggagaaagagctacattgacttttagccatctgaataaggaagatgaaggcctgtatacaattagagtgcgtatgggtgaatactatgagcaatatagcgcatatgtctttgtcagagatgccgacgccgagatcgaaggcgctcctgccgcccccctggacgtgaaatgcctggaagcgaacaaagattacatcataatcagttggaagcagcccgccgtcgatggagggtccccgattctgggatactttattgacaagtgtgaggttggtacagactcatggtcacagtgtaacgacactcctgtgaagttcgcccgattccctgtaactggtttaatcgagggtcggagctatatttttagggtgcgcgccgtgaataagatggggatcggctttccatcccgcgtctctgagcccgtcgccgccctggatccagccgagaaggcacggcttaagtcccgcccgagcgcgccgtggacgggccagattattgtaacggaagaagagccatcagaggggattgtgccaggccctcctaccgacctgagtgtaaccgaggccaccagaagttatgtggtactctcttggaagccgccgggccagcgggggcatgaaggcatcatgtatttcgtggaaaaatgcgaggctggcacggagaattggcaacgggtaaataccgagctccccgttaaaagccctcgcttcgctttgttcgatctggcagaaggaaagagctactgctttcgggtgcgttgcagcaattcggcaggggtgggagagccaagcgaggctaccgaagtcactgtagtcggcgacaagcttgatatccctaaggcccccgggaaaatcattccatcaaggaatactgacacctctgttgtggtgtcatgggaggagtcaaaggacgccaaggagttggttggctactacattgaggcttctgtcgcaggctcaggaaaatgggaaccctgcaacaataatcccgtgaagggaagccgtttcacatgtcacggcctcgtcacaggtcaatcctatatttttcgggtgagagctgttaacgcagccggtcttagtgaatacagtcaggacagtgaagctatcgaagtgaaggctgctatcggtggcggagtctctcctgacgtttgccccgctttatctgacgagccaggcggtctgaccgccagtcgaggccgggtccacgaagccagcccccccacctttcaaaaggacgcgctcctgggatccaagcctaacaagcctagtcttccatcctccagccagaacctgggccaaaccgaggtttcgaaagtttccgaaaccgtgcaggaagagctgaccccacccccccaaaaagctgctccacagggcaaatctaaaagcgacccgctcaagaagaaaactgatcgagctcctccctctcctccatgtgatattacctgtctagaatcttttcgtgacagtatggtgttgggatggaaacagccagacaaaattggaggcgctgagataacaggctattacgtgaattaccgggaggtcattgatggcgtacccggaaaatggagggaagcaaatgttaaggctgtgtccgaagaggcttacaagatctcaaacctgaaagaaaatatggtgtatcagttccaggttgctgccatgaacatggcaggcttaggcgcgccatctgccgtttccgagtgctttaagtgtgaggaatggaccatcgcagtccctgggcccccacacagtcttaagtgctccgaggtgagaaaagattcccttgtgctccaatggaagcctcctgtccacagtggcaggacccccgtcactggatacttcgtggaccttaaagaagccaaggctaaagaggatcagtggcggggcttgaacgaggccgcgattaagaacgtgtatctgaaggtacgcgggcttaaggaaggggtttcttacgtgttccgtgtgcgtgcaattaatcaagcaggcgtcggcaaaccttccgacctggccggccccgtcgtagccgaaacccgacccggtaccaaagaagtggtcgtgaacgtcgatgatgacggagtgatttcactcaacttcgagtgtgataagatgactcctaagtccgagttcagttggagcaaagactacgtgtctactgaggactcccctcgcctggaggttgagtcaaaaggcaataagaccaagatgacgtttaaggatctggggatggatgatttgggcatttattcctgcgacgtcactgataccgatggcatagcatcctcctacctgatcgatgaggaggagttgaagcggcttctcgccctttcacacgaacataagttccctacagtgccagttaaaagtgagcttgctgtggaaatcctcgagaaagggcaggtgagattctggatgcaagccgagaaactcagtggtaacgctaaggtcaactacatatttaatgagaaagagatctttgaagggcccaagtacaagatgcacatcgacagaaacacaggcatcatcgaaatgttcatggaaaagctccaggacgaagacgaggggacatatacatttcagctccaggatggtaaggccactaatcacagcaccgtagtgctagttggcgatgtgttcaagaagctccaaaaggaagccgaattccagaggcaggagtggattcgcaaacagggaccccactttgttgagtatctcagttgggaagtgacgggagaatgcaacgtgctcctcaagtgtaaagtcgctaatataaaaaaggagactcatatcgtgtggtataaagacgaaagagaaattagtgtcgacgaaaagcacgacttcaaagacggcatttgcacactgcttataaccgaatttagcaaaaaggacgccggtatttatgaggtgatcttgaaagacgaccgcggcaaggacaagtctcgcttgaaactggtggatgaggcgttcaaagaactcatgatggaagtgtgtaaaaagatcgcgctgtccgctaccgaccttaaaatccaatctacggcagaagggatccaactgtactctttcgtcacatattacgttgaagatttgaaggtgaactggagccacaacgggtctgcgatacgctattctgatagggtcaagacgggggtcaccggagagcaaatttggttacagataaatgagcctacaccaaatgataagggcaagtacgtgatggaattgtttgatggtaaaactgggcaccagaagacggtggacctatcaggccaagcctatgatgaagcctacgccgagtttcagcggttaaagaagtccctgctattccaaaaagacagggcaagagttctgggcggtctgccagatgtcgtgaccatccaggaagggaaagccctcaacctcacatgcaatgtgtggggcgaccctccgcctgaggtgtcttggttgaaaaacgagaaggcccttgcaagtgacgatcactgcaaccttaaattcgaggcgggacgcacagcctacttcacaataaatggcgtgtcgactgccgatagcgggaaatatggtctggtagtgaagaataaatatggtagcgagacctccgattttaccgtaagcgtatttatccctgaggaggaggcaagaatggcagctctggaaagccttaaggggggaaagaaagcaaagtag

SEQ ID NO: 25147 - DNA, 3456 bp, synthetic construct
  source 1..3456: mol_type = other DNA; note = Synthetic coding sequence
atgatggccgccgccctgggcccccccgaggtgatcgcccagctggaaaatgcggctaaggtgctgatggctccgccgtctatggtgaataacgagcagcgccagcatgctgaacacatattcctgtcgtttcgaaaatccaaatcaccgtttgcagtttgcaaacatattctcgagacaagcaaggtcgattacgtgctgtttcaggcagcaacagcaattatggaagcagtagttagggaatggattctgttagagaaaggctccatcgagagccttcgaacgtttctcttaacgtatgtgctgcagagacctaatcttcaaaaatatgtgcgcgagcagatactactagctgtggcagtcatcgtgaaacgcggctctctagacaaatctattgactgcaagtccatattccacgaggtatctcagctcatatcatccggcaacccaaccgtacagactctcgcttgcagcattctcaccgctcttttgagtgagttttcatcttcgagcaaaacatccaacatcggactgagcatggagtttcacggcaactgcaagcgcgtttttcaagaagaggatctcaggcagatttttatgctcacggtggaggtccttcaggaatttagtagacgcgagaacctgaacgcccagatgagtagcgtcttccagcgctacctcgcactggctaaccaggtcctcagttggaacttcctgcctcctaagctgggacgacattacatcgcgatgttcgagtcaagtcagaacgtcctgctcaaaccaacagagagctggcgtgaaacacttcttgatagtcgcgtgatggagctattttttacagtgcacaggaaaatacgggaagattccgacatggctcaggacagcctgcaatgcttggctcaattggcgagcttacacgggccaatatttcctgatgagggatcgcaggtggactatttggcccacttcatcgagggcctgctcaacactatcaatggtatcgaaattgaggacagcgaggccgtcggcatctcttccatcatttccaacctgatcaccgtgtttcctaggaatgtgctaaccgctatcccttctgagcttttctcatcatttgtgaattgcctcacccaccttacgtgctcattcgggaggagtgccgctctcgaagaggtgctcgataaagacgatatggtttatatggaagcctatgacaagctgctggaatcatggctgacactggtccaggacgataagcacttccataaagggtttttcacacaacacgccgtgcaggtgtttaattcatatatacaatgccatctggcagcaccagacggtacacggaatttaacggcaaatggggtcgctagccgagaagaagaggagatttcagagctgcaagaggatgacagggaccagttcagcgatcagctcgcatcagtcgggatgctcggaagaatcgctgccgagcactgcatcccactgcttacatccttgttggaggagagagtcaccagactccatggacagttgcagcgacaccaacagcagttacttgcttcccctggatcctctaccgtcgacaataagatgctggacgatctgtacgaggacatccattggttaattcttgtcaccggctacctgctggccgatgacacacagggcgagaccccgctgataccaccagagataatggaatatagtataaaacactccagcgaggtcgatatcaataccacactgcaaatacttggctcccccggcgagaaagcttcgtctattccaggctacaacaggacggacagtgtgattcggctactttctgcaatactgcgggtgtctgaagtcgagagcagggccatacgcgcagatctgacacaccttttgagcccccagatgggcaaggacatcgtctggtttctgaagcggtgggctaaaacttacttactggtggatgaaaagctgtatgaccagatttcgctgccattttctaccgctttcggtgcagacacagaggggagccagtggataattggctacctccttcagaaagtcatctctaatttatctgtgtggagttccgagcaggatctggcaaacgacacggtgcaactgctggtcaccctcgtggagcggcgggaacgagccaacctggttattcagtgtgagaactggtggaacctggcaaaacagtttgcaagcagatcaccacccctgaactttctgtccagcccagtgcagcgaaccctgatgaaagctctagtcttgggtggtttcgctcatatggacacagaaacaaagcagcaatactggaccgaggttctgcagccccttcagcagcgttttcttagggtgataaaccaggaaaattttcagcagatgtgtcagcaagaagaggtgaagcaggagatcacagccacgctggaggctctgtgtggaattgccgaggcaacacagatcgataacgtcgcaatattattcaactttttgatggacttcctgacaaactgcatcgggttaatggaggtgtataaaaacactccggagaccgtgaacctcattatcgaggttttcgtggaggttgcccataaacagatctgttatctgggggagagcaaggccatgaacctatacgaggcctgcttgaccctcctgcaggtttatagtaaaaacaatctgggacgtcagaggattgatgtgacagctgaggaggaacagtaccaagatcttctgctcattatggaactactcacaaatctgttgtctaaggagtttattgacttttccgacacagatgaggtattccgtggacatgaacccgggcaggctgccaatcgatcagtgtcagccgcagacgtagtgctctacggtgtcaacctgatcctgccgctcatgagccaggacttactgaagtttccgacgctctgtaaccaatattacaagttaataacctttatctgtgaaatatttccagaaaagatcccccaactgccagaagatctcttcaaaagcttgatgtactcactcgagctcggtatgacatccatgtcatccgaggtgtgtcagctgtgtttggaggccctgacacctctggcagagcagtgtgcaaaagctcaagagactgactcacccttatttctcgctacaaggcacttcctcaaactcgtcttcgacatgctggttctgcagaagcacaacactgaaatgactaccgccgctggagaagcattttacaccctagtgtgtctccaccaggcggagtatagcgaattggtcgaaactctcttgtcttcacagcaggatccagtaatctaccaacgcttggcagatgcttttaacaagctgaccgcttcgtccactccccccaccttagacaggaaacagaaaatggcctttttgaagtccctcgaggaatttatggcaaatgttggtgggctcctgtgcgtcaagtag

SEQ ID NO: 25148 - DNA, 420 bp, synthetic construct
  source 1..420: mol_type = other DNA; note = Synthetic coding sequence
atgggcggcggcgagcggtacaacatccccgccccccagagccggaatgtgtcaaagaaccagcagcaactgaacaggcagaagactaaggaacagaattctcagatgaagatcgtacacaagaaaaaggaaagggggcacgggtacaactcatctgcagcagcctggcaggctatgcagaacggtgggaagaacaaaaacttcccgaacaaccagtcgtggaactcatccttaagcggcccgaggctcctattcaaaagccaggcaaatcagaactacgctggggccaaattctccgagcctccgtcgccgtctgtgctgcccaagcccccttcacactgggtaccagtgagcttcaacccttctgacaaggaaattatgacattccagttaaagacacttctgaaggtgcaagtttag

SEQ ID NO: 25149 - DNA, 984 bp, synthetic construct
  source 1..984: mol_type = other DNA; note = Synthetic coding sequence
atgaaggagatgctggccaaggacctggaggagagccagggcggcaagtcatctgaggtgttaagcgccaccgagctgagagtgcaactggcacagaaagaacaagagcttgcccgcgcgaaagaggcacttcaggccatgaaggcagaccgtaaacgcctcaaaggggagaagacagatttagtttcgcagatgcagcagctgtatgcgacgctggaaagccgtgaggaacagctgcgcgactttatccggaattatgaacaacataggaaggagtctgaggacgccgtaaaagcactggccaaagaaaaggatctcctggaacgcgagaaatgggagcttcggcggcaggccaaggaggcgactgatcacgcaacagcactgaggtcacagctcgacctcaaagacaataggatgaaggagctcgaagccgagttagccatggccaagcaatccctcgcaacattaaccaaggacgtacctaagcggcacagcctcgccatgcccggcgaaaccgtgttgaacgggaatcaggaatgggtggtgcaggccgatctacctttaaccgccgccatcagacaatctcaacagactctataccattcacaccccccccacccagcagataggcaagcggtgagggtcagtccttgtcacagccggcaaccctcggtcattagcgatgccagcgcggccgaaggagatcgctcttcaacaccaagtgatattaattcaccacgccaccggacacactcactgtgcaacggcgatagccccggtcctgtccaaaagaatctgcataatccaatcgtgcagagtctcgaagacctggaggatcaaaaacggaagaaaaaaaaggaaaagatgggttttggttccattagtagggtgttcgccaggggcaagcagaggaaaagcctcgatccgggattgtttgacggaacagctcctgattactatattgaggaggacgccgattggtag

SEQ ID NO: 25150 - DNA, 984 bp, synthetic construct
  source 1..984: mol_type = other DNA; note = Synthetic coding sequence
atgaaggagatgctggccaaggacctggaggagagccagggcggcaagagcagcgaagttttgtcagcaacagagctcagggtgcagctggctcaaaaggagcaggagctggcaagggctaaagaagcattgcaggctatgaaggccgaccggaagagactgaagggcgagaagaccgacctcgtgtcacaaatgcagcagctctacgcaacactggagtcccgcgaggagcaactccgggacttcatccggaactatgagcagcatcggaaagaaagcgaggacgccgtcaaggctttagccaaggaaaaggacctacttgaacgtgaaaagtgggagctgcgacggcaagcgaaggaggccacagaccatgccaccgcactaaggagccagctggacctcaaggataatcggatgaaagaactggaagccgagctggccatggccaagcaatccctggccaccctgaccaaggacgtgcccaagcgccatagcttggcgatgcccggtgagacagtactcaatggtaatcaggagtgggtcgtgcaggctgatcttcccctgaccgctgccatccggcagtctcagcagacactttaccactcccacccccctcatccagcagacaggcaagcggtgcgggtttcaccatgtcatagtcggcaaccctccgtgatcagcgacgctagtgctgccgaaggcgatagatcttcaacgccctccgacataaattcaccacgtcataggacgcactcgctctgtaatggcgactcgcccggtccagtgcagaagaatctgcataatccaatagtgcagagtctagaggacctcgaagatcaaaagagaaaaaaaaagaaggaaaaaatgggattcgggtctatctcgagagtcttcgcaagggggaagcagcgtaagtcactggaccctggtttgtttgatggaactgcacccgactattacatcgaggaagacgcggattggtag

SEQ ID NO: 25151 - DNA, 609 bp, synthetic construct
  source 1..609: mol_type = other DNA; note = Synthetic coding sequence
atggacgagcaggccctgctgggcctgaaccccaacgccgacagcgattttcgccagcgagccttggcctactttgaacagctcaaaatctctcctgatgcatggcaggtgtgtgcagaggccttggcccaaagaacctatagcgatgatcacgtgaaattcttctgttttcaggttcttgagcaccaggtgaagtacaagtattccgaactgactaccgtgcagcagcagctgatccgagagactttgatcagttggctgcaagcccaaatgctcaatccccagccagagaaaacctttatccggaacaaggctgcccaggtgtttgcgttattgttcgtgacagaatacctgactaagtggcctaagtttttcttcgatatccttagtgtggtggacctcaaccccaggggagttgatctctatctcagaatccttatggccatcgattctgagctagtggatagagacgtggtgcatacatcagaggaggccagaagaaacacactgataaaagacaccatgagagaacaatgtatccctaatctcgtggagagctggtatcagatactgcagaattatcagttcacaaattccgaagtgacctag

SEQ ID NO: 25152 - DNA, 1803 bp, synthetic construct
  source 1..1803: mol_type = other DNA; note = Synthetic coding sequence
atgagccgggtggccaagtaccggcggcaggtgagcgaggaccccgatattgattctctactcgagactttgagcccagaggaaatggaagaattggaaaaggagctcgatgtggtggaccccgacggctctgttcctgtcgggctgcgacaacgtaatcaaaccgagaagcagagtacaggtgtttataacagagaggccatgttgaatttctgcgaaaaggagaccaagaaactgatgcagcgtgaaatgtctatggatgaaagtaaacaggtagagacgaagaccgacgccaaaaatggcgaggaaaggggacgcgacgcctcgaaaaaggctcttggcccaaggcgggatagcgacttggggaaggagcccaaacgtgggggccttaaaaaatcttttagtagagatagagatgaggctgggggcaagtcaggcgaaaagcccaaagaggaaaaaatcatacgggggatcgataaggggagagtgagagctgccgtggacaaaaaagaggctggtaaggacgggagaggcgaggagagagctgtagccactaagaaggaagaggaaaaaaaaggaagcgatcggaatacaggtttgtcgcgggataaagacaaaaagcgtgaagagatgaaagaagtggcaaagaaggaggatgacgaaaaggtaaagggtgagaggcggaatacagataccagaaaggagggtgaaaagatgaagagagccggggggaacacagacatgaaaaaggaggacgagaaagtgaagcgtggaacgggtaatactgacaccaaaaaagatgacgagaaggttaagaagaacgaaccactgcatgagaaggaagctaaagacgactccaaaacgaagacaccagaaaagcagactccaagcggccctaccaagccaagtgagggacctgctaaggtagaggaagaggccgcaccaagcatcttcgacgagccgctggagcgcgtgaaaaacaacgatcccgagatgacagaagtcaacgtgaataatagcgactgtattaccaatgaaatcttagtgcgctttactgaggcgctcgagttcaatactgtggtaaagctcttcgcactcgctaacacaagggctgacgatcatgtggcattcgcaatcgctattatgcttaaggccaataagacaatcaccagtctgaatctagattcaaatcatatcaccggcaaaggcattctggccatctttagggcccttctacagaacaatactcttactgagctgaggttccataaccagaggcatatatgcgggggcaagacagagatggaaatcgctaagctgttgaaggaaaacaccaccttactaaagctgggatatcattttgagcttgcggggccccggatgactgttaccaaccttctgtcacgcaatatggataaacagcgccaaaagcgcctccaagagcaaagacaggcccaggaagccaaaggcgagaaaaaggacttgctggaggtccccaaggctggtgctgtggccaagggatctccgaaaccatcccctcagccatctccaaagccttcgcccaaaaatagccctaaaaagggaggcgccccagctgccccgccccccccacccccaccactagccccccccctcataatggaaaacttgaagaacagtttaagccctgcaacccagcggaaaatgggtgacaaagtcctgcctgctcaggaaaagaactcgagggatcaacttctggcagctattaggtcctccaatctcaagcagctcaaaaaattggaactccctctgctacttcagtag

SEQ ID NO: 25153 - DNA, 201 bp, synthetic construct
  source 1..201: mol_type = other DNA; note = Synthetic coding sequence
atgatcggcaccaccgaggtgccctgctgcggccccagcgccacctgggccttacggtggtccgaccagatcacgctgccgtccctcccgtggacaatgtcgagcctgtggtgcatcccactgaaaggcatgctggctacgtgcccagttagcctcctggaacacgcttactcaaacgctctccgggggtggaagccttag

SEQ ID NO: 25154 - DNA, 2121 bp, synthetic construct
  source 1..2121: mol_type = other DNA; note = Synthetic coding sequence
atggccaccgccaacttcggcaagatccagatcggcatctacgtggaaattaagcgtagtgatggtcggatccaccaggcgatggttacatctctcaacgaagataacgaatcagtgactgtggaatggattgagaatggtgacactaagggcaaggagattgacctggaatcaatcttcagtctgaatcctgacctggtgcccgacgaggagatcgagccgtcccctgagactccccctcctcccgcttcaagcgctaaagttaataaaattgtgaaaaaccgccggaccgtcgcatccattaagaacgatccccccagtcgcgataatcgcgtcgtgggctccgcaagagcacgaccgagtcagttccccgagcagtcttcctccgcgcagcagaatggttcagtatctgatatcagccctgtgcaggctgctaagaaagagtttggcccccccagccgcaggaagagtaactgcgttaaggaggtagagaaactgcaggaaaaaagggagaagaggaggctgcagcagcaggagcttagggaaaagcgagcccaggacgttgatgctaccaatcctaactatgaaatcatgtgtatgattcgtgacttccggggttctctggactacagacccctgacaacagctgaccctatcgacgagcatcgtatctgtgtctgtgtccgcaaaaggccacttaataagaaagagacccagatgaaagatctggacgtcattacaatcccctcgaaggacgtggtgatggtgcacgagcccaagcaaaaagtggatttgaccagatacctcgagaaccaaacattcaggttcgattatgcgtttgatgatagtgcccccaacgagatggtatatcggttcacggctcgtcctctggtggagaccattttcgagcgaggaatggctacctgcttcgcatacggccaaacaggaagtggcaaaacccacacgatggggggcgactttagtgggaagaatcaggattgcagtaagggtatctatgctctggccgctagggatgtgttcctcatgctgaaaaagccaaactataagaagttagagttgcaggtctatgccacttttttcgaaatctacagcggtaaagtcttcgacctgttgaatcggaagactaaattacgagttctcgaggatgggaagcagcaggtgcaggtagtgggcctacaagaacgcgaagtgaagtgcgtggaggatgtgctcaagctgatcgacatcggtaattcgtgtagaacaagcggccagaccagtgccaatgcccattcttctaggtcgcacgctgtgtttcaaattatcttgcggcgaaaagggaagctccatgggaaattttccctaatcgacctggccggtaacgagcgaggcgcagatacttccagcgcagataggcaaaccagattagagggcgctgagatcaacaagtccctgctggccttaaaagaatgtatcagggctctgggccgaaacaaaccccatactcctttcagagccagcaaactgacccaggttctgcgcgattcttttatcggcgagaatagccgcacctgcatgatcgcaactatctctccaggaatggcttcgtgcgagaacactctgaataccctcaggtacgccaacagagtgaaggagttaaccgtcgatcctaccgccgctggggacgtgcgccccattatgcatcacccaccaaatcagatcgacgacttagagacacagtggggagtgggatcctccccacagcgcgatgatcttaaactgctgtgcgaacagaatgaggaggaagttagccctcaactgtttacatttcatgaagcagttagccaaatggtcgaaatggaggaacaggtggtcgaggaccatcgcgctgtgtttcaggaatcaattcggtggctggaggatgaaaaagcccttctggagatgaccgaggaggtggattatgatgtggacagctatgcaacccaattggaggccattttggagcagaagatcgatattctgaccgaactgcgagacaaggttaagagcttcagagccgcgctgcaggaagaggaacaggcttcaaaacaaattaacccaaagcgccctagagctctatag

SEQ ID NO: 25155 - DNA, 1281 bp, synthetic construct
  source 1..1281: mol_type = other DNA; note = Synthetic coding sequence
atggcccacctgcggggcttcgccaaccagcacagccgggtggaccccgaagaactgttcactaagttggaccggatcggcaaagggtcattcggtgaagtttacaagggaattgacaaccatactaaagaggtggtggcaatcaagataattgacttggaagaggcagaagacgagatcgaagacatccagcaagagatcacagtactgagccagtgcgactccccttacatcacccgttactttggttcatacctgaagtccactaagttgtggattatcatggagtatctgggaggcggaagcgccctggacttacttaaaccaggccccctcgaagaaacctatatcgccacaatcttaagagagatcctgaagggactcgattatctccacagtgagcgcaaaatacacagggatattaaggccgcaaacgtgctgctttccgagcagggcgatgtgaagctggctgatttcggggtcgccggccagctcacagacactcaaattaagcgtaacacattcgtcggaacgccattttggatggctccggaagtgataaaacaatctgcctacgacttcaaggccgacatctggtccctgggtatcaccgccatcgaattagcgaagggagagccccccaattccgatcttcaccccatgcgcgtattgtttctgattcctaagaattccccaccaactctggaagggcagcatagtaagccgtttaaggagttcgttgaagcctgtctcaataaggatccaaggttccgtccgacagcgaaggagctgttgaaacataaattcatcacgcggtataccaaaaaaacttcttttcttaccgagcttatcgatagatataaacggtggaagagcgaaggccacggagaggaatcatcctctgaggactcagacattgatggcgaggccgaagacggcgaacaggggcccatctggaccttccctccaaccattaggccgagccctcacagcaagctacataaaggaaccgccctgcattcatctcagaaaccagcagagcccgttaaaaggcagccccggagtcagtgcctttccactttagttcggcccgtctttggggagctgaaagagaagcacaagcagtccgggggaagcgtcggggcactggaggaactggagaacgccttctctctcgctgaagaatcgtgccccgggatttcagacaagctcatggtgcatctggttgaaagggtgcaacgcttttctcacaacaggaatcacctaacatcaaccagatag

SEQ ID NO: 25156 - DNA, 996 bp, synthetic construct
  source 1..996: mol_type = other DNA; note = Synthetic coding sequence
atgctgcggtgcggccagatgatcttcgcccaggccctggtgtgccgacatctgggacgggattggcggtggacacagagaaaacgtcaacctgacagctactttagcgtgttgaatgcatttattgatcgtaaggactcctattattctatacaccaaattgcccagatgggggtgggcgaaggaaagagtatagggcaatggtacggacccaatacagttgctcaggtcctaaaaaagctggcggtatttgacacatggtcttcgctggcagtgcacatcgccatggataacaccgttgtgatggaagagattcgccgactgtgtcggaccagcgttccttgcgctggtgcgaccgcttttcccgctgactccgatcgtcattgtaatgggtttccggcaggcgcagaagtcactaataggcctagcccctggcgtccgctagtccttttaatcccattgcgtctcggcctgactgatatcaatgaagcatacgtggaaacactgaagcattgctttatgatgccccagagcctaggagtgattgggggcaaacctaattccgcccactacttcatagggtatgtgggggaagagctaatctacttagatccacacaccacgcagccagcagtcgagccaacagatggctgctttatcccagacgaaagtttccattgtcagcatcccccatgccgcatgagcatagccgagctcgacccgtccatcgccgttggatttttttgtaaaaccgaagacgattttaacgattggtgtcagcaggtcaaaaaattatctttgttgggcggtgcactgcctatgttcgaactagtggagctccagccatctcatctggcctgtcccgacgtgcttaatttgtcactgggggagtcctgtcaggttcaagttggcagcctgggggacagcagcgacgtagagcgactcgaacgattttttgattctgaggatgaggacttcgagattctgtcgctgtag

SEQ ID NO: 25157 - DNA, 1461 bp, synthetic construct
  source 1..1461: mol_type = other DNA; note = Synthetic coding sequence
atgagcgtgacctacgacgacagcgtgggcgtggaggtgagcagcgacagcttctgggaggtcgggaattacaaaaggactgtgaaacgtatagacgatgggcaccgtctctgctctgatctgatgaattgcctgcatgaaagagcaagaattgaaaaggcttatgcccagcagcttaccgagtgggcacggaggtggcgacagctggtggaaaaggggccacagtacggcacagtggaaaaggcatggatggcatttatgtcggaggctgagcgagtgtctgagctccatctagaggtgaaggccagcttaatgaatgacgatttcgagaaaatcaagaactggcaaaaagaggctttccacaagcaaatgatggggggctttaaagaaaccaaagaagctgaggacggcttccgaaaagctcagaagccctgggcaaagaaattaaaagaggtggaggccgccaagaaagcccaccatgccgcctgcaaggaggagaagctcgccattagccgcgaggctaacagcaaggccgatcctagcctcaaccccgagcagctgaaaaaactccaggacaaaatagaaaagtgcaaacaagacgtgctgaagactaaggagaaatacgaaaaatcactcaaggagctcgaccagggcactccccagtatatggagaatatggagcaggtcttcgaacaatgccaacagtttgaggagaaaagacttcggttcttcagagaggtcctgttagaggtgcagaagcatctggacctctctaacgttgccgggtataaagctatataccacgacttggaacaatccatccgcgctgctgatgcagtcgaggacctccgctggttcagggcaaatcatggtccaggtatggctatgaactggccgcaattcgaggaatggagcgcggacctaaatcggacactgtccagaagagagaaaaaaaaggctactgatggagtaactttgaccggaataaaccaaacaggcgatcagtccctcccatccaaaccatccagtacactgaacgtgccatctaaccccgcccaatccgcacaaagccagtcatcctataacccgtttgaagatgaggatgataccgggagtacagtcagcgaaaaagacgacaccaaagccaagaacgttagcagctatgaaaagactcagagctaccctaccgattggtctgacgacgaaagcaacaatcctttttcaagcactgatgcaaacggcgactctaacccttttgacgacgatgccacaagcggcaccgaggtgagagtgcgcgccctgtatgactacgagggacaggagcacgacgaactgtcgtttaaagccggcgatgagctcacgaagatggaagacgaggatgaacagggttggtgtaaaggccggctcgataacggccaggtggggctgtacccggccaattatgtggaggcgatccagtag

SEQ ID NO: 25158 - DNA, 3075 bp, synthetic construct
  source 1..3075: mol_type = other DNA; note = Synthetic coding sequence
atgaacttcatcaaggacaacagccgggccctgatccagcggatgggcatgacggtgattaagcagattaccgacgacctcttcgtttggaatgtactgaacagggaggaggtgaatataatttgctgcgagaaggtggagcaagatgccgctagaggcattattcacatgattcttaaaaaaggttctgagtcgtgcaatctgttcctgaagagcttgaaggagtggaactaccccctattccaggacctgaacggccagtccttatttcaccagacctcagagggcgacctggatgatctagcgcaggatctcaaggacctgtatcacacaccttcttttctgaatttctaccccctgggcgaagatattgatataattttcaacctgaagtcaaccttcacggaacctgttctctggagaaaggaccagcaccaccacagagtagagcagcttactctgaatggcctgttacaggcgctgcaatccccttgtattatagagggggagtccggcaaaggcaagtccaccttacttcagcgcatcgcaatgctttggggatccgggaaatgtaaagcactcaccaaatttaaatttgtgttttttctccgtctcagtcgcgcccaagggggactctttgagacactgtgcgatcagctactagatataccaggcaccatccggaaacagacattcatggccatgctactgaagttgcgccagcgcgtgttgtttctcctggacggctacaatgagttcaaaccccaaaattgtcctgaaatcgaggctttaataaaggagaaccaccgttttaaaaacatggtcatagtcacgacgacaaccgaatgtctgagacacattaggcagtttggcgccctgactgcagaagtaggggacatgaccgaagacagcgctcaggccctcattcgagaggtcctcattaaagaactcgccgaaggattgctcctccagattcagaagtcccggtgtttacgtaatctgatgaagacacctctatttgtggttatcacctgcgctatccagatgggagagagtgaatttcattcacatacccaaacgaccctcttccatacattttacgacctgctaatccagaaaaacaaacacaaacacaagggagttgccgcctctgattttatccgatctctggaccactgcggggatttggccctggaaggcgtgttttcgcacaagttcgatttcgagcttcaggatgtatctagtgtcaatgaagatgtgctgttgacgactggcttactgtgtaaatacaccgctcagcgattcaaaccgaaatataaatttttccataagtcctttcaggaatacacggctggtagacggctctcatcccttctgacatctcatgagccagaagaggtgaccaaaggtaatggatatttgcaaaagatggtgtccatcagcgacatcactagtacatattcttcgctgttgcggtatacttgcggctcctcagtggaggctacccgggctgtgatgaagcacctagctgcagtataccagcatggatgcttgttgggactttcgattgccaagcgccctctgtggagacaggagtccctccagtccgtgaaaaacaccacggagcaggaaatcttaaaagctattaacatcaactccttcgtggaatgtgggattcacctctaccaggaaagtacgagcaagagcgccctgtcacaggaattcgaggccttcttccagggaaaatccctgtacattaactcaggaaatatccctgactatctctttgatttcttcgaacaccttcccaattgtgcttcagcgctggacttcattaagctggacttttacggcggcgcaatggcaagctgggaaaaagcagctgaagataccggaggaatccacatggaggaggcgccagaaacttacattccatccagagcggtctccctgttctttaactggaagcaggagttcagaacacttgaagttacactgagggacttctctaagctgaacaaacaagatatccgctacctaggaaagatcttttctagcgcgaccagtcttcggctgcagattaaaagatgtgccggggtggctggcagtctttctctcgtcctctccacatgtaagaatatatatagcctgatggtggaggccagtccactaaccattgaggatgagcggcacattacatcggtgacaaatctcaagactcttagcatacatgatttgcagaaccagagactccctggggggcttactgacagcctcggcaatttaaaaaacctgactaaattaatcatggataatatcaagatgaacgaagaagacgctatcaagctggcagaaggattaaagaacttaaagaagatgtgcctgtttcatctgactcacctttcagacattggcgaaggaatggactacattgtcaagagcctgtcgagtgaaccctgcgatttggaggagattcaactagtgtcctgctgtctgtctgccaatgcagtcaagatattggcgcagaacctgcacaacctggttaaattgtctatactggatctgagcgagaactatcttgaaaaagacgggaacgaagcgctgcatgaacttattgatcggatgaatgtgctggagcaactcacggctcttatgttgccatggggatgcgatgtccagggctcactgagcagtctgctgaaacatttagaggaagtcccacagttagtgaagctggggctgaagaattggagactcacagacacggagatcagaatcctgggcgccttctttgggaagaatccactgaagaatttccaacaactgaacttagccggcaaccgtgtgtcgtcggacgggtggctggccttcatgggtgtgttcgaaaatctgaaacagctggttttcttcgacttctcgacaaaggaattcctgccagatccagctctggttaggaagttaagccaggtactttccaaacttacctttctgcaggaggctagacttgttggctggcaatttgacgacgacgacctctctgtgatcacaggcgcattcaagctggtgactgcttag

SEQ ID NO: 25159 - DNA, 339 bp, synthetic construct
  source 1..339: mol_type = other DNA; note = Synthetic coding sequence
atggacgacaaggccagcgtgggcaagatcagcgtgagcagcgactcagtgagcaccctcaacagcgaagactttgtgctagtatcccgccaaggcgatgagacaccaagcactaacaacgggtctgacgacgaaaagacaggcctcaaaattgtaggcaacggctctgagcagcagttgcagaaggaactggccgacgtgctaatggacccacccatggatgatcagcccggggagaaggaattggttaaaagatcacaattagatggtgagggcgatggtcctctttcaaatcagctcagcgccagctctactattaaccctgtgccgttggtgtag

SEQ ID NO: 25160 - DNA, 441 bp, synthetic construct
  source 1..441: mol_type = other DNA; note = Synthetic coding sequence
atgctgaaggaggactgcgccagcgagctgaaggtgcacctggccaagtccctacccctgccctctagtgtaaatcgaccgcgcattgatctgattgtatttgtggtgaatcttcattccaagtacagtctccagaacacagaggagagcctacgccacgtcgatgcatccttcttcctgggaaaagtctgttttctagctacaggtgctggccgcgagtcccattgcagtattcatcgtcatacagtggtcaagctggcccacacctaccagagcccacttctttattgcgaccttgaggtggagggcttccgcgccaccatggcgcagcgcttggttagggtactgcaaatctgtgctggacacgtgcccggcgtgtctgctctcaacctgttgagcctgctgcgctcgtcagagggaccaagcctcgaggatttgtag

SEQ ID NO: 25161 - DNA, 1203 bp, synthetic construct
  source 1..1203: mol_type = other DNA; note = Synthetic coding sequence
atggccagcgacacccaggccgtgcccgacgtgagcggccggagccgggctaggcgctacgcagaatggtcatctggccttcggtctgggcgcgcaggtggcggggagaccagtgtggagaggcggagaacttgtgctttcgacactcttgaagcctttcttattatggacggggaggatattccagacttttccagcctgaaggaggaaaccgcgtattggaaggagttaagccttaaatacaagcagtcatttcaggaggctagggacgaattggttgaatttcaggaaggctccagagagctggaagccgaactggaagcacagctggtgcaggccgaacagaggaacagggatctccaggccgataatcagagactaaagtatgaggtagaggccctgaaggagaaactggagcaccagtacgctcagtcatacaaacaggtgagcgttctggaggatgacttgagtcagacacgggctataaaagagcagttacacaaatacgtgagagagctggaacaggctaatgacgacctagaaagagccaagagggcaacgattgtgagtctggaggacttcgagcagcgcctgaaccaggccatagaaagaaatgctttcttggagagcgagttggacgagaaagagagcctcctggtgagcgtccagcgacttaaagatgaagcccgggatctgaggcaagagctcgcagtaagagaaaggcagcaggaagttacacgcaaatcagctcccagcagcccaacgttggattgcgagaaaatggacagcgcagtgcaggccagcctgtctcttcccgctacccccgtcggcaagggaacagagaacacttttccctctcccaaggctatacccaatggtttcggcacaagcccacttacaccgtctgcccgaatctcagccttgaatatcgtgggggatcttctgcggaaagtcggggcccttgaaagtaaacttgctgcctgcaggaacttcgctaaggaccaggcctcccggaaatcttacatatcagggaacgtgaattgtggcgtcttgaatggaaacggcaccaagttctccagaagtgggcacacctcattttttgacaaaggggctgtgaatggcttcgaccctgcacctccccctcccggacttggtagctccagacctagtagcgcccctggcatgctcccactgagtgtgtag

SEQ ID NO: 25162 - DNA, 699 bp, synthetic construct
  source 1..699: mol_type = other DNA; note = Synthetic coding sequence
atgacccccccccagcagcccccccccctgcggagcgagcccggcacactggggagcgctgcaagtagctattcaccccttgggctgaatggcgtgcctggctcaatttgggactttgtgagtggatcttttagccccagccccagcccaatcctctctgccggtcccccctccagctctagtgcttcacccaacggcgctgagctcgcccgagttagacggcaactcgacgaagcgaaaagaaagatccggcagtgggaagagagctggcagcaggtgaaacaggtgtgtgacgcgtggcagcgtgaggcccaggaagccaaggaacgtgcgcgcgtggcggacagtgataggcagctcgccctgcagaagaaggaggaggtggaagcgcaagtgaaacagctgcaggaggaacttgaagggctgggagtggcctcgaccttgccggggcttcgcggctgcggcgatattggcaccatacccctgcctaagctgcatagcctgcagagtcagctgcggctcgacctggaagcagttgacggcgtgattttccagttgcgggccaaacagtgtgtggcttgccgcgagagggctcacggagccgttctaaggccctgtcagcaccatattctttgtgaaccttgcgccgctaccgcccctgagtgtccttactgtaagggccagccgttgcaatggtag

SEQ ID NO: 25163 - DNA, 1500 bp, synthetic construct
  source 1..1500: mol_type = other DNA; note = Synthetic coding sequence
atgctgccctggccccccgccctggccatgcccatgcccaccgaggggaccccgccacctctgtccgggacacccattcccgtcccggcttactttcgccacgctgaacctggcttcagtctcaagaggcccagaggcctgtctaggagtcttcctcccccacccccggctaagggcagcattcctatctccaggcttttccctccaaggacccctggctggcatcagctgcagcctaggcgagtctctttccggggggaggcctcagaaacattgcaatctccagggtatgacccctctcgaccggaatctttttttcagcagagcttccaaaggctctctagacttggccacggctcctacggggaggtgttcaaagtgagatccaaggaagatgggagattatatgccgtgaagcgcagcatgtccccgttccgaggaccgaaggatagagctcgcaaactggctgaggtcggcagtcatgagaaggtggggcagcacccttgctgcgtgagattggaacaggcctgggaggaaggaggcattttatacttgcagacggaactctgtggcccgagcctgcagcagcactgcgaggcatggggggcaagcctgccggaagcccaggtgtggggctatctccgagataccctactcgcccttgctcacctgcacagccaaggactcgttcatctggatgtaaaacctgccaacatttttctgggcccgcgaggccgctgcaagttaggagattttgggctgttagtggaactcggaaccgccggggcaggggaagtgcaggagggagaccccaggtatatggcaccagagctactccaagggtcttatggaactgccgccgacgtattctccctgggtctgaccattttagaggtagcttgtaatatggagctgccccacggcggtgagggctggcagcagctgaggcaggggtacctgcctcccgagttcaccgccgggctgagttcagagctgcgttccgtcctcgttatgatgctggaaccagacccaaagctgagggcaaccgcagaagcgctgctcgcactgcctgtactgaggcagcctagagcctggggggtactgtggtgcatggcagctgaggcccttagcagaggctgggccctctggcaggcactgttagctctcttatgctggctgtggcacggcttggcacatcctgctagctggctgcagccccttgggcctcccgccacgccgccaggcagcccaccatgttccctattgctggatagtagcctcagtagcaactgggacgatgactccctaggtcccagtctttccccggaggctgttttggcccgtactgtgggcagcacgagcactccgcgaagccgttgcacacctcgggacgccctggacctgtccgatatcaattccgagccacctcgtggatcattcccctcttttgagccccgtaatctgctgtcactgttcgaagacacccttgaccccacatag

SEQ ID NO: 25164 - DNA, 3153 bp, synthetic construct
  source 1..3153: mol_type = other DNA; note = Synthetic coding sequence
atgctgtgctggggctactggagcctgggccagcccggcatcagcacaaaccttcaaggaatcgtcgccgaaccacaggtgtgtggtttcatttcggatcggagcgtgaaggaggtggcctgtggcggcaatcattctgtctttctcctggaagatggtgaggtgtacacatgtgggttgaacacgaagggacaactgggacatgaaagggagggcaacaaacccgaacagatcggagcgctggccgaccagcacatcattcatgtagcttgcggggagagtcactcacttgccttaagtgatagaggccaattattttcctggggggctggcagcgatggacagttgggcttgatgactacggaagatagcgtcgcggtgccgcgactgattcagaagctcaatcaacagactatcctccaggtttcatgtgggaattggcactgcctggcactggcagctgatggacagtttttcacctggggtaaaaactcccacggacagctgggccttggcaaggagttccctagccaggcatctcctcaaagggtgaggtccctggagggaatccccttggcccaggtggccgccggcggggcccattcttttgccctcagcttaagcggtgctgtgtttggttggggcatgaataacgctggacagcttggcctgtcagacgaaaaggatcgtgagtctccgtgccacgtgaagttgctcagaacacagaaggtcgtgtacattagttgcggcgaagaacataccgctgtccttacgaagagtggcggagtcttcacttttggcgctggatcgtgtgggcaactggggcacgacagcatgaacgatgaggtgaaccctcgccgcgttctggaactgatgggtagtgaggtgacacagatcgcttgcgggcggcagcacacactggcattcgtgccatcaagcggcctcatctatgcattcggttgcggagcgagaggacaattaggaactgggcacacatgtaacgtaaagtgtccgagccccgttaagggatattgggctgcacactccgggcagctgtctgctcgggcggatcgtttcaaatatcacattgtgaagcagatcttttcagggggtgaccaaacattcgtattgtgttccaagtatgagaactactctccagccgttgatttccgcacaatgaatcaagcccactatactagtctgatcaacgatgagacaattgcagtgtggcgccagaaactttcagagcataataatgcaaataccattaacggcgtcgtgcagatcctgtctagtgccgcatgttggaatggatcttttctggaaaaaaaaatcgacgaacattttaaaacaagtcccaagatcccagggatcgatcttaactccacccgagtcctgtttgaaaagctgatgaatagccaacattcaatgattctagaacagatactcaactcctttgagagctgcctgatccctcagctctcatcgagcccccctgacgtcgaggctatgagaatatatctgatcctgcccgaatttccccttcttcaggactctaaatattacattaccctcactatcccattggccatggcaatcctgcgtctagacacaaaccccagtaaggtcctcgacaactggtggtcacaagtgtgcccgaagtatttcatgaaactcgtgaatctctataaaggtgcggtgctttacttactgagaggcagaaagacattcctgattcccgtcctttttaacaattatataaccgccgccctcaagcttctggagaagttatacaaggtcaatctgaaagtcaagcacgtagagtatgatactttctatattcccgagattagcaatctggtcgatatacaggaggactacctaatgtggttcctccatcaagctgggatgaaagccagaccctccattatacaagatactgttacgttatgcagttatccttttatctttgacgcacaggcaaagacaaaaatgctgcagacagatgctgagctccagatgcaggtcgccgtaaacggagctaacttacagaacgtgtttatgctgctaaccttagaaccactcctcgcccggtctccctttctagtgctccacgttcggaggaacaatctagtaggagatgcactgagggaattgagcatacacagtgacatcgatcttaagaaacccttaaaagtcatctttgatggcgaagaagccgtggatgccggcggtgttactaaagagttcttccttctgctgcttaaggagctgctgaatcccatttatggaatgtttacatactaccaggatagtaatctgctctggttttccgacacatgcttcgtggagcacaactggtttcatttgattggtattacctgtggcttggcgatctataattcaactgtggtggacctgcactttcccctggctctgtacaagaagttactgaacgtcaaaccaggattagaagatctgaaggaactgtcgccgaccgagggtcgctctctccaagaacttctcgattatccgggggaggatgtggaggaaacattctgtttaaacttcaccatctgcagagaatcttatggggttatcgaacagaaaaagctgatccccggtggggacaatgtaaccgtatgcaaagacaaccgccaggaatttgtcgatgcctatgtgaactatgtgttccaaatatctgtgcatgaatggtatacagccttcagcagtggcttcctgaaggtgtgcggtgggaaggtgctcgaactattccagccaagcgagttgcgggctatgatggtgggaaacagcaactacaactgggaggagctcgaagagaccgcaatctataagggggattatagcgctactcaccccaccgtgaaattgttctgggaaactttccacgaatttcctttagaaaaaaaaaaaaaatttcttttgttcctgacaggtagtgatcggataccgatctacggtatggcctctctgcagatcgtgatacagtctaccgcttccggagaggaatacctccccgtggctcacacctgttataatctcctcgaccttccaaaatattcttccaaggagatactgtccgcccgcttgacccaagcactggataattacgagggatttagcctggcttag

SEQ ID NO: 25165 - DNA, 363 bp, synthetic construct
  source 1..363: mol_type = other DNA; note = Synthetic coding sequence
atgagcatcggcgtgcccatcaaggtgctgcacgaggccgagggccatatcgttacgtgtgaaaccaataccggggaggtgtatcgtggcaagctcattgaggcggaagacaatatgaattgtcagatgtccaacatcaccgtgacttatagggacgggcgcgtagcacaactggagcaggtttacattagaggcagtaagatacgatttctgatactacctgacatgctgaaaaacgcaccaatgctaaagtctatgaaaaacaagaaccagggctctggcgccggtagaggaaaggctgccattctaaaggcccagggctacctctcgagtctcgaatgggtactcgttcacatttgctag

SEQ ID NO: 25166 - DNA, 1182 bp, synthetic construct
  source 1..1182: mol_type = other DNA; note = Synthetic coding sequence
atggaggagaacaacctgcagtgcagcagcgtggtggacggcaactttgaagaggtcccccgggagacggctatccaatttaagccaccactgtaccgacaacgataccagttcgtcaaaaatctggtcgatcagcacgaaccgaagaaagtggccgatcttggttgtggggataccagtttacttaggttattaaaagtgaatccctgtatagagctgctcgtgggagttgacattaacgaagataagctgaggtggaggggcgattccctggccccttttttaggggacttcctgaagccacgcgatctgaatctcacgatcactctctaccacggcagcgtcgtggaaagagattcccggctcttggggtttgatctgatcacatgtatagagctgattgagcacctagatagcggggacctcgccagatttcctgaggtggttttcggctacctttcacctagcatgattgtgatcagtacccctaattcggagtttaacccactgttcccttcagtgacactgagagatagcgatcacaaattcgagtggacccgcatggaatttcaaacctgggctctgtatgtggcaaataggtatgactattccgtcgaatttaccggcgtgggtgaacctcccgcgggagcagagaatgtgggatactgcacgcagatcggcatcttcaggaagaacggtggcaaagccacagaatcctgtctatcagagcagcatgatcagcatgtctacaaggccgtttttactacaagctaccccagcctgcagcaggaacgcttcttcaaactggtcctggtgaacgaagtgtcccagcaagtcgagtccctgagggtcagccacttaccccggcgcaaagaacaagccggagaaagaggggataaaccaaaggatatcggtggctctaaggcacctgtcccttgttttgggcccgtctttaccgaagtcgaaaaagcaaagattgagaattctccgacacccttctgcgtgggcgataagttttttgtgcctctgcagcgcttactggcctatcctaagttaaatcggttgtgcgccaatgaggagatgatgagatccgtaatcgccgacagcatccctctgtcctcagatggatctgctgtcgtggctgacctcaggaactatttcgatgagcagtttgagttctag

SEQ ID NO: 25167 - DNA, 228 bp, synthetic construct
  source 1..228: mol_type = other DNA; note = Synthetic coding sequence
atgagcccccagaagcgggtgaagaacgtgcaggcccagaaccggacaagccaaggatcctcaagtttccagaccaccctcagcgcatggaaagtgaaacaggatcccagcaatagtaagaatatcagcaagcatggccaaaataatcctgtgggcgattacgagcacgccgatgaccaggctgaggaggacgctttgcagatggcagttgggtattttgagaaatag

SEQ ID NO: 25168 - DNA, 996 bp, synthetic construct
  source 1..996: mol_type = other DNA; note = Synthetic coding sequence
atggccttcgtgacccggcagttcatgcggagcgtgagcagcagctcgacagcctccgcctccgcaaagaagataattgtgaaacatgtgacggtaattggcggaggactaatgggagctggaatcgcgcaagtggctgcagctaccggccataccgtggtcctggtggatcagacagaggacatactcgcaaaaagcaaaaaggggatcgaggagtcactacgaaaggtggcgaagaaaaagtttgcggagaatcttaaagcgggggatgagtttgtggagaagactttgagcacgattgcaaccagtacagatgccgccagcgtcgtgcattccaccgacctggtggtggaagcaattgtagagaaccttaaggtcaagaatgagctctttaagcggctggacaagttcgccgctgaacacaccatcttcgcatcaaacacttcatcccttcagatcaccagtatagccaacgccactacaagacaagacaggttcgcagggctgcacttctttaatccagtccccgtgatgaagctggtggaagtgataaaaactccaatgacgtcccaaaagacgttcgagagtctcgtagatttttctaaggctttaggcaaacaccccgtgtcctgtaaggatactccaggctttatagtgaatcgcctcctcgttccttacctgatggaggcgatcagactttatgagcgggactttcagacttgcggcgacagcaatagcggcttgggtttttctctgaagggagatgcaagtaaggaggatattgacaccgcgatgaaattaggtgctggctatccaatgggacccttcgaacttttagactatgtgggacttgatacgacaaagttcattgtagatgggtggcacgagatggatgccgagaaccctttgcatcaaccaagccctagcctcaacaagctggtggccgaaaacaagttcggtaaaaaaaccggcgaggggttttacaagtacaagtag

SEQ ID NO: 25169 - DNA, 1281 bp, synthetic construct
  source 1..1281: mol_type = other DNA; note = Synthetic coding sequence
atggcccacctgcggggcttcgccaaccagcacagccgggtggaccctgaagagctgtttacgaagctcgaccgaatcgggaaagggtccttcggggaggtttacaaaggaatcgacaaccacacgaaggaagtagtggcaatcaaaattattgatcttgaggaggccgaagatgagattgaggatattcagcaggagatcacagtgttatcccagtgtgattccccatacatcactaggtatttcggcagttacctgaaatctacaaagttatggataattatggaatatcttgggggtggaagtgccctggatctgctcaagcccggtcccctggaggagacatacatagctacaatcctgcgagagattctgaagggactcgattatctgcactcagagaggaaaatccaccgagatatcaaagccgcaaacgtgctgctgagtgaacagggtgacgtgaaattggcagacttcggagttgccggacagctgactgacacacagattaagcggaatacatttgtcgggaccccattttggatggctcctgaagtgattaaacaaagcgcttacgatttcaaagccgatatctggagccttgggataacagccattgagttggccaagggggagccccctaacagcgatctccatcccatgagagtacttttcttaattcctaagaattcccccccgacccttgaagggcagcactcaaagccttttaaggagtttgtagaagcctgtttaaataaagaccctaggtttaggcctaccgcaaaggaactgctgaagcataaatttatcactcggtacaccaaaaagacatctttcctgactgaactgattgatcgatacaagcgttggaagtctgaaggtcacggcgaggagagctcgagcgaagattccgacatcgacggcgaagcagaggacggtgaacagggccccatctggacattcccacctaccatccgtcctagcccacacagtaagttgcacaaaggtactgccttgcacagcagccagaaacccgccgagccagtgaagcgtcagcccagatctcagtgtctcagtacgctcgtgcgccccgtgttcggcgagctaaaggagaagcacaagcagtcgggcggctcggtgggagcccttgaggagctggaaaatgcgttcagccttgcagaggaaagctgtccaggtataagcgataaattgatggtgcacctggttgaacgcgttcaacgcttttcccacaacaggaaccacctgactagtaccagatag

SEQ ID NO: 25170 - DNA, 1290 bp, synthetic construct
  source 1..1290: mol_type = other DNA; note = Synthetic coding sequence
atgcccaacgtgctgctgccccccaaggagagcaacctgttcaagcgaattctaaagtgctacgagcaaaaacagtataagaacggtctgaagttctgcaaaatgattctctcgaatcccaagttcgccgagcatggggaaactctggccatgaagggcctgactcttaactgtctgggaaagaaagaagaggcttatgaatttgtgcgcaagggcctcagaaacgacgttaaatcccacgtgtgttggcatgtttacggactgctccagcggagtgacaaaaaatatgacgaagccatcaaatgttatcgcaatgctctgaaactggataaagacaacctccaaattctgagagacctgtctttgctacagattcagatgcgtgatcttgagggctatagagagactagataccagctcctacagctacgtccaacacagcgcgctagctggatcgggtatgccattgcctaccaccttctcaaggattatgacatggccctcaaattgctggaggagttcaggcaaacccagcaggtaccaccaaacaaaatcgattacgagtattctgaactaatcctctaccagaatcaggtaatgcgcgaggcggatttactgcaggagagcttagagcacatcgaaatgtatgagaagcagatatgtgataagctgttggttgaagaaataaagggagaaattctgttgaaattgggcagacttaaagaggcctctgaagtattcaaaaatctaattgatcgaaatgcagaaaactggtgttactatgagggtcttgaaaaggctttacagatcagcacgcttgaggaacggctgcagatatacgaggaaatcagtaaacagcatcctaaggctattactcctcgcaggttgccgcttaccctggtcccaggagaacgatttcgcgagttaatggataagttcctgcgggtcaatttctcaaagggttgcccaccactgtttacaactctgaagtcattgtattacaacaccgagaaggttagcatcattcaggagctggtgaccaattatgaagccagtctcaagacctgtgacttcttctcaccatatgagaacggcgaaaaagagccccccaccacactactgtgggtgcagtacttccttgcccagcattttgacaaactggggcagtattctcttgcccttgactatattaacgccgcgatcgccagtactcccactctgatagaacttttttacatgaaagccaagatatataaggttaagagtgaatcttgtttcttgtcttcttag

SEQ ID NO: 25171 - DNA, 360 bp, synthetic construct
  source 1..360: mol_type = other DNA; note = Synthetic coding sequence
atggacaagaacatcggcgagcagctgaacaaggcctacgaggccttcagacaggcctgcatggatcgagacagcgctgtgaaagagctacaacagaagacggagaactacgagcaacggattcgcgagcagcaggagcagctctccttgcagcagactatcatagacaaattaaaaagtcagctcctgctcgtcaactcaacgcaggataataactacggctgtgtgcctctgctggaagacagtgagacaaggaagaataacttgacactggatcaaccacaagacaaagttatctccggcattgcaagggaaaagctgccaaaagtagacattgcttccgctgagagctccatctag

SEQ ID NO: 25172 - DNA, 699 bp, synthetic construct
  source 1..699: mol_type = other DNA; note = Synthetic coding sequence
atgacccccccccagcagcccccccccctgcggagcgagcccggcactctggggagcgcggccagctcatactcccctctaggcctgaacggcgtgcctggcagcatctgggacttcgtgagcggaagtttttcaccctcaccttctcccattctaagcgccggcccacccagctctagtagcgcgagtcctaacggggccgagctggcccgagtgcgacgccaactggatgaagccaagcggaaaatccggcagtgggaggagagctggcagcaagtaaaacaggtctgcgacgcatggcaacgtgaggcacaggaggcaaaggaacgggcacgcgtggcggatagtgacaggcagctagctcttcaaaaaaaggaggaggtggaagcccaggtgaagcagctgcaggaggagctcgaggggttgggagtcgcctctactctccccggtcttcgtgggtgtggtgatataggaaccattcctctgccaaaacttcatagcctgcaaagccaactgagacttgacctggaggccgtggatggcgtgattttccagctgagggctaaacaatgtgtagcttgcagagaaagagctcacggcgccgttctgaggccctgccaacaccacattctgtgtgaaccctgtgctgccaccgctcccgagtgcccgtactgcaagggccagccactgcagtggtag

SEQ ID NO: 25173 - DNA, 1461 bp, synthetic construct
  source 1..1461: mol_type = other DNA; note = Synthetic coding sequence
atgagcgtgacctacgacgacagcgtgggcgtggaggtgagcagcgacagtttttgggaagtggggaattataaacggactgtgaagagaatcgacgatgggcatcggctgtgctctgatttaatgaactgcttgcatgaacgggcaagaattgagaaggcatacgctcagcagctaactgaatgggcccggaggtggcgccaactggtagagaagggcccgcaatatggaaccgtcgagaaagcatggatggccttcatgtccgaggcggagcgcgtgtccgaactacatctggaagtgaaggctagcctcatgaatgatgatttcgagaagatcaaaaactggcagaaggaagcgttccataaacagatgatgggtgggtttaaggaaacaaaggaggctgaagatggcttccgcaaagctcaaaaaccttgggcaaaaaagctgaaggaagtggaggccgccaagaaagcacaccatgccgcatgcaaggaggagaagttggccatcagccgtgaagcaaactccaaggcagatccatctttaaaccccgaacagctgaaaaaactgcaggacaaaatagagaagtgtaaacaggatgtgttaaaaacgaaagaaaaatacgagaaatccctgaaagagctggatcaagggacgccccagtatatggagaacatggaacaggtctttgaacagtgccagcagtttgaggaaaagaggttaagattcttcagagaggtgctgcttgaagtgcagaaacatctggacctgagcaatgtcgctggatacaaagctatctaccacgacttggagcagtcaattcgggcggccgacgccgttgaggatctgcgctggttcagggccaaccacggacccggtatggccatgaactggccacagttcgaagaatggagcgccgatttgaataggacgctgagccggcgggaaaagaaaaaggctacagatggcgttacgctcactggcatcaatcagactggcgaccaatcactgcccagtaaaccatcctctactctcaatgtgccctccaaccccgcccagtctgcccagtcccaatcttcttacaatccgtttgaggatgaggatgatacgggttctactgttagcgaaaaggatgatactaaagccaaaaatgtgtcatcctatgagaagactcagtcctatcctactgattggtcagacgacgagagcaacaacccgttctctagcacagatgcaaatggcgactctaatcctttcgacgacgacgctacatctgggacagaagtgagggtccgcgccttgtatgattacgagggccaggagcatgacgaacttagcttcaaagccggcgatgagttgactaaaatggaggacgaggacgagcagggttggtgtaaagggcgtttggataacgggcaggtgggtctgtaccccgccaactacgtggaagccattcagtag

SEQ ID NO: 25174 - DNA, 3075 bp, synthetic construct
  source 1..3075: mol_type = other DNA; note = Synthetic coding sequence
atgaacttcatcaaggacaacagccgggccctgatccagcggatggggatgaccgtgattaaacaaatcaccgacgacctgttcgtctggaacgttcttaaccgcgaggaggtgaacattatttgctgcgagaaggtggagcaggacgccgcacgaggcatcattcacatgatcctcaaaaagggaagtgagtcatgcaatctgtttctgaagagcctcaaagaatggaattaccccttgtttcaagatttgaacggccagagtctgtttcaccagacctcggaaggcgacctggatgacctggcccaggatttgaaagacctgtaccacaccccctctttcctcaacttttacccattaggagaagatatcgatatcattttcaacttgaaaagcacgttcactgagcctgtcctctggagaaaggaccagcatcaccatcgtgtcgagcaacttacactgaatggtctactacaggcgctgcagagcccttgcattattgaaggtgagagcgggaagggtaagagcacactcttgcagaggatagcaatgctctggggaagcggcaaatgtaaagccttgacaaagttcaagttcgtgttctttctccgactctcacgggcacagggcgggctctttgaaaccttgtgcgaccagcttctggatatcccaggcactatccggaagcagacatttatggcaatgctgctgaaactgcggcaaagagtgcttttcctgcttgatgggtacaatgagttcaaacctcaaaactgcccagagattgaggctctgataaaggagaaccaccggtttaagaatatggtgatagtgacgaccacaacagaatgcttacgccacatcaggcagtttggcgctttgaccgctgaagtcggtgacatgacggaagactccgctcaggccctgatcagagaggtgcttattaaggagctggccgagggcctgctcctgcagatccagaagagccgatgtttacggaatttgatgaagaccccactgtttgtggtgatcacatgtgccattcagatgggcgaatccgagttccatagccacactcagactacgctgtttcacactttctacgacctactgattcagaagaacaagcacaagcataaaggagttgcagccagcgattttattcggtcgctcgaccattgcggagacctggcacttgaaggcgttttcagtcacaagtttgactttgaattacaggatgtgagttcagtgaacgaggatgtccttctaaccaccggcctcctgtgcaaatacaccgctcagcgtttcaaacctaagtacaaatttttccacaagagtttccaggagtacaccgcaggccgccgattaagcagcctgttaacgagccacgaacccgaagaggtgaccaagggaaatgggtatctgcaaaaaatggtctctatcagtgacattacatctacctattctagcctgctccgatatacctgcggctctagcgttgaggccactcgagctgtcatgaagcaccttgccgccgtttatcagcacggttgcctgctcggcctgagtattgccaagcgtcccttatggaggcaagaaagcttgcaaagcgtgaagaatactacggagcaggagatcttgaaggccatcaatatcaatagtttcgttgagtgtggtatacacctctatcaggaatcaactagtaaatccgctctttcccaggagttcgaggctttcttccagggtaagtcgctgtatataaattccggcaatatacccgattacctgttcgattttttcgagcatctgccgaactgcgcttccgccctcgattttatcaagctcgacttttacgggggagccatggcctcttgggagaaagccgccgaggatacgggtgggatccatatggaagaagccccagaaacctacataccaagcagagccgtcagcctgttttttaattggaagcaggaatttcgaacccttgaggtgacattacgagatttcagtaagctcaataagcaggacatccgctacctggggaaaattttttcgtcagccactagcctaaggttgcagatcaagcgctgcgccggtgtcgccggctcccttagcctggtccttagcacatgcaaaaatatttacagtttgatggtggaagcttctcctttgacgattgaggatgaacgacacatcacaagcgtgacgaacttaaagacacttagcatccatgatctgcagaatcagcgactgccaggtggcctaacagacagcctcgggaacctgaaaaacctcaccaaactcattatggacaacataaaaatgaatgaagaggacgctatcaaactagcggaagggctgaagaatctcaagaagatgtgcctcttccacctcacgcaccttagtgacattggcgaaggcatggattatatcgtaaagtccctcagctccgaaccgtgcgatcttgaggaaatccagctcgtgtcatgttgcctgtctgctaacgccgtcaagatccttgctcagaatctgcacaacctcgtgaagctctctatccttgacctgagcgagaattacctggagaaagacggcaacgaagcgctgcatgagctcattgataggatgaacgtgttagaacagctgacagcgctaatgttaccttggggctgcgatgtacagggctccctgagctccctcctgaagcaccttgaggaggtccctcagcttgtaaagctgggcctgaagaattggcgactaactgatacggagattaggatcctcggggcttttttcggaaagaatccactgaaaaacttccagcaacttaacctggccggtaatcgagtttcttcggacggctggctggcttttatgggcgtgttcgagaacctcaaacagctggttttcttcgacttctctaccaaggaattcttgcccgatcccgccctggtgagaaagctgtctcaggtgctcagtaagctgacatttctgcaagaggctcggcttgtggggtggcagtttgacgatgacgatctctcggtgatcacaggagccttcaagttggtgacagcttag

SEQ ID NO: 25175 - DNA, 1767 bp, synthetic construct
  source 1..1767: mol_type = other DNA; note = Synthetic coding sequence
atgagcagctgcgtgagcagccagcccagcagcaaccgggccgccccacaggacgaactggggggcagaggctctagttcctccgaatctcagaagccatgcgaggctctgcggggcctaagctcgctgagtatccaccttggtatggaatcgttcatagtggtgaccgagtgcgagccgggttgtgccgtcgatctaggcctggcacgagatcgacccctcgaggctgacggtcaggaagtgccactggacacgtccggatcccaagcacgaccccacctctcaggccgcaagctgtcacttcaggagcggtcacagggaggtctggcagccggaggttccctggacatgaacggtcgctgtatttgcccatctttgccttacagtcctgtgagctcaccgcagtcaagcccaaggctgccccgcagaccaaccgttgaatcacaccacgtctccattacgggtatgcaggattgcgtgcagctgaatcaatacactttaaaggacgagatcggcaagggcagctatggcgtggtaaaacttgcttataatgagaacgacaacacttactacgctatgaaggtcctcagtaaaaagaaacttattcgacaggctggtttcccacgcagaccaccacctcgggggactcgacccgcacctggcggatgcatccaaccccgtggtcccatagaacaggtctatcaggaaatagctatcctcaaaaaacttgaccaccccaacgtggtgaaacttgtggaggtgttagacgatcccaatgaagatcatttgtatatggtttttgagctggtcaaccagggccctgtgatggaggttccgactcttaagcccctgagcgaagaccaggcgaggttctatttccaagacttaatcaagggtatcgaataccttcactaccagaaaattatacatcgggatattaagcctagcaaccttctcgtgggagaggacggtcatattaagatcgcagacttcggcgtgagtaacgagtttaagggttcagatgccctcctttccaacacagtaggtactcctgccttcatggcacctgaaagtctctccgagacccgaaagatttttagcgggaaagccctggacgtgtgggccatgggcgtgaccctgtattgctttgtttttggacaatgtccctttatggacgagcgtattatgtgtctgcacagcaagataaaatctcaagccctagagttccccgatcaacctgatattgcagaagatctgaaggacttaattaccaggatgctcgataaaaatccggaatctcgaatagtggttccagaaatcaagcttcatccatgggtgacccgccacggggctgagcctctgccatcagaggacgagaactgtaccctggtcgaggtgaccgaagaagaagttgagaactcggtgaagcacatcccttctctggcgaccgtcattttggtgaagacaatgatccgtaaacggtcattcgggaatcccttcgaaggatcccgcagagaggaacggagcctaagcgcaccgggcaacttgcttaccaaaaaacccaccagggagtgcgagtcactttccgagctcaaagaggctaggcagcggcgacaacctcctggccaccgccccgcaccccggggcggaggtggatctgcactagttagaggttcaccctgcgtggaatcttgttgggcgcccgcacctgggagcccagctcgtatgcaccccctgagaccggaagaagctatggagcccgagtag

SEQ ID NO: 25176 - DNA, 666 bp, synthetic construct
  source 1..666: mol_type = other DNA; note = Synthetic coding sequence
atgctgaagaacaagggccacagcagcaagaaggacaacctggccgtgaatgccgttgcactgcaagatcatattcttcatgatcttcagctccgcaatctgtccgtggctgatcactcgaagacccaggttcagaaaaaagagaacaaatctcttaaacgcgacactaaagccatcatcgatacaggcctcaagaagacaactcagtgcccaaaactggaggacagtgaaaaggagtacgttcttgatccaaagccaccaccgctgactctcgcccaaaaacttggcctgatcggacctccccctcccccactcagcagtgacgaatgggagaaagtgaaacagcgctcactcctacaaggcgattctgtacagccttgtcccatttgcaaggaggaatttgaactccgcccacaagtgttgctctcttgctcacacgtttttcataaggcctgtctgcaggccttcgagaaattcaccaacaaaaaaacttgccccctatgccgcaagaatcagtaccaaacccgtgtcatccacgacggagctagattatttagaattaaatgtgtaacgcgcattcaagcatattggagaggctgcgtggtgagaaagtggtaccgaaatctgaggaagacggtacctcccacagatgccaagctgcgatag

SEQ ID NO: 25177 - DNA, 900 bp, synthetic construct
  source 1..900: mol_type = other DNA; note = Synthetic coding sequence
atggtggacaagaagctggtggtggtgttcggcggcaccggcgcccagggcggttctgtggctcgtacactcttggaggacgggaccttcaaagtgcgcgtcgtgactcggaacccccggaagaaagcagccaaggagctcagactgcagggggctgaagtggtgcaaggtgaccaggacgaccaggtgatcatggagttggctttaaacggcgcctacgctacttttatcgtaaccaactattgggagagctgctcccaggagcaggaggttaagcagggaaagctgctggccgatctggcccggaggttggggttacactatgtggtgtattccggtctggagaatatcaagaagctgacagctgggcgtttggctgctgctcacttcgacggtaaaggtgaggttgaagaatactttagggatatcggagtgcctatgaccagcgtgagactcccttgctacttcgagaatctgctgtcgcactttctccctcagaaagcccctgatgggaagagctacctactcagtttaccaactggtgacgttcctatggacggcatgtctgtctctgacttgggtccggtcgtcctgtctcttctgaaaatgcctgagaagtacgtggggcagaacatcggcctgtccacctgcaggcataccgctgaggaatatgctgccctgttgactaagcacacacggaaagtggttcatgacgctaaaatgactcccgaagactacgagaagctgggattccccggggccagggacctagccaatatgttccggttctatgcacttcggcccgaccgcgatatcgaactcaccctcagactcaacccaaaagccctcactctggaccagtggctagagcagcacaagggtgattttaacctgctatag

SEQ ID NO: 25178 - DNA, 2193 bp, synthetic construct
  source 1..2193: mol_type = other DNA; note = Synthetic coding sequence
atggaggacctgttcgagaccttccaggacgagatgggcttcagcaacatggaggatgatggtccagaggaagaggagcgagtcgctgaacctcaggctaattttaacacgcctcaagcccttaggttcgaggagctgctcgctaatttgctgaacgaacagcaccaaattgcaaaagaactgtttgaacagttaaaaatgaaaaagccctccgccaagcagcagaaggaggttgaaaaggtgaaaccgcagtgcaaggaggtgcaccagacactcatcctggatccggcccagaggaaaagattacagcagcagatgcagcagcatgttcagctgctcacacagatccaccttctcgccacctgtaatccaaacctcaacccagaggcaagcagcaccaggatctgcctgaaggaattaggtacctttgcacagagctccattgcgttgcaccaccagtacaatcccaaattccaaaccctctttcagccctgtaacctaatgggggcgatgcagcttatcgaagatttctctacacatgtcagtattgattgctcccctcacaagaccgtcaaaaaaactgctaacgaatttccctgtttgcccaagcaagtggcctggattttagcaacctccaaagttttcatgtacccagagctgctgccggtgtgcagcctgaaggcgaaaaatccccaggataagatcttattcacaaaggccgaggacaataaatacctgctcacgtgcaagactgctaggcagttgacagtacgcatcaagaacctgaacatgaatagagctccggacaatatcattaagttctacaaaaaaaccaaacagctgccagtcctgggaaagtgctgtgaagagatccagccacaccaatggaagccgcctatcgaacgcgaggagcatcgcttacccttttggctgaaggcttcattacccagcatccaggaggagctacggcatatggccgatggcgcccgagaggtgggcaatatgacaggcaccactgaaattaattccgatcagggactagagaaggataactctgagctggggagcgaaaccagatatccgctactcctgcccaagggggtcgtgttgaagctgaagccggtcgccgaccgcttccctaagaaagcttggcgtcagaaacgatcttcagtgttgaaacctttgttgattcagccaagtccttctcttcagccctctttcaacccaggcaaaacaccggcacagagtacgcactctgaagcacctcctagtaagatggtgttaaggattccccaccctatccaacccgctaccgtcctgcaaaccgtgcccggagtccctcctctcggtgttagcgggggagagagctttgagagcccagcagcactccccgcaatgccccccgaggcccgcaccagctttcctctaagtgaatcacagacactgctgagcagcgccccggtgccgaaagtgatgatgcctagtccggcgtcctctatgttccgcaaaccatacgtgcgcaggaggccaagcaagagaagaggggccagggcttttcgctgcataaagcccgccccagttattcaccctgcgtctgtcattttcactgtcccggccaccacagtgaagattgtttccctaggggggggttgcaatatgatccagcctgtgaacgctgccgttgctcagtcaccacagactatccctatcgccacactattggttaacccaacgtcattcccctgcccgcttaaccagcccctcgtcgccagttctgtgagcccgctcattgtctctggaaacagcgtcaatctaccaatccccagcacacctgaggacaaggcacatatgaacgtagacattgcctgcgctgtcgcagatggagagaacgcgtttcaggggctggagcccaaactggaaccacaagagctttcacccttgagcgccacagttttcccgaaagtggaacactcaccagggccccccccagtcgataaacagtgccaagaaggcctgtctgagaactccgcatatagatggacggtcgtaaaaacggaggaaggtaggcaagccctggaaccattgccgcagggaattcaggagtccttgaataatagttctccaggagacttggaagaggtagtaaaaatggagcctgaagatgccacggaagagataagcggctttttgtag

SEQ ID NO: 25179 - DNA, 1563 bp, synthetic construct
  source 1..1563: mol_type = other DNA; note = Synthetic coding sequence
atgttcgtgagcgacttccggaaggagttctacgaggtggtgcagagccagcgagtactcctgttcgtcgctagcgatgtggatgccctctgtgcatgtaaaatcctgcaggcgcttttccagtgcgaccacgtgcagtatacattggtaccggtatccgggtggcaggaattggagacagccttcctcgaacacaaggaacagatcaaacttctgataaagcaagatgacgacttggaggtcccagcatatgaggatattttccgagatgaagaggaggatgaggagcattcaggaaacgacagtgatggcagcgagccaagcgagaagcggacgcgtctggaagaagaaatcgtagaacaaactatgcgccgcagacagcgtcgggagtgggaggctcgcaggagagacattctgtttgactatgaacagtacgagtatcacggcacgagctccgcgatggttatgttcgagctggcttggatgctgagcaaggatctgaatgatatgctctggtgggcaatcgtcggcctgactgatcaatgggttcaggataaaatcactcaaatgaaatatgtcacagacgtgggggttctacagcgtcacgtcagcagacacaaccatcgtaacgaagacgaagaaaataccctctcggtcgattgtacgagaatctcctttgagtatgatcttcggctagttctgtatcagcactggtccctgcacgactccttgtgcaacaccagctataccgctgctaggtttaaactgtggtcagttcatgggcagaagcggctccaggaattcctcgcggatatgggcctgccactcaagcaggtgaaacagaagttccaggccatggacatttcgctaaaagagaacctccgcgagatgattgaggaaagtgcgaacaaatttgggatgaaggatatgcgggttcagacattctctatccatttcgggttcaaacacaagttcctggcatcggatgttgtgtttgctacaatgtctctaatggagtcaccagagaaggatggatccgggacagaccatttcattcaagcgttggactctctttcacgtagtaacctggacaaactgtaccatggcttagagcttgcgaagaaacagcttcgcgcaacccaacagacaatcgcatcgtgtttatgcaccaatctggtgatttctcaggggcccttcttgtactgtagcttgatggagggcacccctgatgtgatgctgttcagccgacccgcgtctctgtccctcttgtcaaaacaccttctgaagtcttttgtctgttcaacaaaaaataggaggtgtaaacttttaccactagtgatggctgcccccctatccatggagcatggtaccgtcaccgtcgtggggatcccacctgagaccgatagctcagaccgtaagaacttctttggcagggccttcgaaaaagccgccgagagcacatcgagtcgaatgctgcacaatcatttcgatctatctgtgattgaattgaaggccgaagatagatcaaagttcctggatgccctgatttccctgctcagctag

SEQ ID NO: 25180 - DNA, 567 bp, synthetic construct
  source 1..567: mol_type = other DNA; note = Synthetic coding sequence
atgaccgcccccagctgcgccttccccgtgcagttccggcagccctctgtgtctgggctgtcacaaattacgaagagcctctatatctcgaacggcgtggctgctaacaacaaactgatgctttccagtaatcagatcaccatggtgataaatgtctctgtggaggtcgttaacacactttacgaggacatacaatatatgcaggtccccgtagccgactcccccaattctcgactgtgtgacttttttgacccaattgctgaccacattcatagtgtggaaatgaaacagggcaggaccctcctgcattgcgctgccggcgtgagcaggtctgcagctttgtgcctggcatatctgatgaaatatcacgctatgtcactattagatgcccatacatggactaaaagctgtaggccgattatccggcccaacagcggtttctgggaacaactcattcactacgaatttcagctgtttggcaagaatactgtgcacatggtgtcgtcgcctgtcggcatgatccccgacatctacgagaaggaggtgcgtctcatgattcccctgtag

SEQ ID NO: 25181 - DNA, 1182 bp, synthetic construct
  source 1..1182: mol_type = other DNA; note = Synthetic coding sequence
atggacgccgccaccctgacctacgacaccctgcggttcgccgagttcgaagattttcctgagacatctgaacctgtgtggattctagggcgaaagtacagtatatttacagagaaggatgaaatactgagtgatgtcgcctcaagattgtggttcacgtaccggaagaatttcccagccattgggggtacagggccgacctccgatactggatgggggtgcatgctccgatgcggacagatgattttcgcccaggctctagtctgccggcatctgggccgagactggagatggacgcagaggaagaggcagcccgactcttacttttcagtgctcaatgctttcatcgaccggaaagactcctattactctatacatcagattgcccagatgggggttggagaaggaaagtctatcggccagtggtacggaccgaataccgtggcccaggtgcttaaaaagctcgccgtgttcgatacctggtctagtctcgcagtccacattgccatggacaacacagtggttatggaagagatccggcggctatgccggacttctgtaccgtgcgcaggggccaccgcatttcccgctgactcagaccgccattgtaatgggtttccagccggggcagaggtcaccaatcgccctagcccttggaggcctttggttctcctcatccctctgcgtttaggcctgaccgatatcaatgaggcatacgtggaaaccctgaagcactgttttatgatgcctcagagcctgggcgtcatcgggggaaagcccaatagcgcacactacttcataggttatgtaggcgaggagttgatttacttagatccacataccactcagcctgcggtggagcccacagatggatgttttattcccgacgagtcattccactgtcagcacccaccctgtcggatgagtatcgccgagctggacccttctatcgctgtagggttcttctgcaagaccgaggacgacttcaacgactggtgtcaacaggttaagaaactgtccctgcttggcggcgctctgcccatgttcgagttagtggagctccagccatctcacttggcctgtcctgatgtattgaacttaagcctcgactcctccgacgtcgagcgactggaaagattcttcgatagcgaggatgaggacttcgaaattctgagcttgtag

SEQ ID NO: 25182 - DNA, 780 bp, synthetic construct
  source 1..780: mol_type = other DNA; note = Synthetic coding sequence
atgaaggacgtggacaacctgaagagcatcaaggaggagtgggtgtgtgaaaccggcagcgataaccagcccctggggaacaaccaacaatcaaactgcgagtatttcgtggattcgttgttcgaagaagctcagaaagtctcctctaagtgcgtgagtcccgccgagcagaagaagcaggtggatgtcaacattaaactgtggaaaaatggttttacggtgaatgatgacttccggtcatattccgacggggcaagccaacaattcctgaattccatcaagaagggcgagctgccttccgagcttcagggaatcttcgataaggaggaagtcgacgtaaaggttgaggacaagaagaacgagatatgcctgagtacaaagcccgtgttccagccattctcgggccagggtcatagactcggctcggcaaccccgaagatcgtctcgaaagccaaaaatatcgaggtggaaaataagaataacctcagcgcagtgcctttgaacaaccttgaaccgattacgaatattcagatttggctcgcaaacggcaagcgaatcgtacagaagtttaatataactcaccgtgtcagccacatcaaggacttcatagaaaaataccagggaagtcagaggagcccaccattttcactggctactgcactgcctgtactgcggctcctagacgagacattgaccctcgaagaagctgatttacaaaacgctgtgattatccagcgcctacaaaagactgccagctttagggagttaagcgaacactag

SEQ ID NO: 25183 - DNA, 852 bp, synthetic construct
  source 1..852: mol_type = other DNA; note = Synthetic coding sequence
atgatccccccccaggaggccagcgcccggcggcgggagatcgaggacaagctcaaacaggaagaggaaacactgagttttatacgcgactccttggagaagtcagaccaactgaccaagaatatggtcagcattctcagtagcttcgaaagtcgactaatgaaactagaaaatagtataatccctgtgcacaaacagacggagaacctgcagcgtctgcaggaaaacgttgaaaaaaccctgagctgcctagatcacgtgatctcttattaccatgtggcgagcgataccgagaaaatcatcagagaaggtcccactggccgactggaggaatacctggggtccatggccaaaatccaaaaggccgttgaatatttccaggataattcccccgactctcccgagctgaacaaagttaagctcttatttgaaagggggaaagaggcactcgaatccgagtttcgttccctgatgacccgccactctaaagtggtctcacccgtcctaattctggacttaatcagcggagacgacgatctagaggcacaggaagatgtgaccctggagcacctgcccgagagcgttttacaggacgtgatcagaatctcaaggtggttggttgaatacgggcggaaccaagatttcatgaacgtgtattatcagatcaggtcatctcagctggacagatcaattaagggactgaaggagcacttccacaagagctcaagctcaagtggcgtcccttattcccccgcgatccccaataaaaggaaagacactccgacaaagaaacccgtgaagcgccctggggagccgcctagctggcccatttctgcaacggcaaggggctag

SEQ ID NO: 25184 - DNA, 2121 bp, synthetic construct
  source 1..2121: mol_type = other DNA; note = Synthetic coding sequence
atgaacgaggccatggccaccgacagcccccggcggcccagccggtgcaccgggggggtcgttgtccggccacaggcagtaacagaacagtcgtatatggagtcagtggtgacgttccttcaagatgtggttcctcaggcctactcaggcacaccattgacggaggaaaaagaaaagattgtgtgggtgcggttcgagaacgcggatctgaatgatacgagccgaaatctcgagtttcacgagatacatagtactggtaacgagccaccactgttgataatgattggctattccgacggtatgcaggtgtggtccatacctatcagtggagaggctcaggagttatttagcgtccgccatggccccatccgggccgcccggatacttcctgctccccagttcggggcccagaagtgtgataactttgccgagaagagacccctactgggcgtgtgcaaaagtatagggagttcaggtacatcacctccctattgctgcgtggacctatattcattgcggactggcgaaatggtgaagagtatacagtttaagacccccatttatgatttgcactgtaataaacggattcttgtggtggtccttcaggagaaaattgccgcattcgacagctgtacattcaccaaaaaattcttcgtgaccagttgctacccctgccccggtcctaacatgaaccctatcgccctgggttcccgatggctggcttacgccgaaaacaagttaatacgctgtcatcagagtcgtggaggcgcttgtggggacaatatccagtcctacaccgccacggtgatttccgccgccaagaccttgaaatcgggtctgactatggtggggaaggtcgtgacacagcttaccggtactttgccatcaggggtgactgaagatgatgtcgcaatccacagcaattctaggcgcagtcccctggtgcctggcatcattaccgtcattgatacagaaaccgttggtgaaggacaggtccttgtgagcgaagattcagactctgatggaatcgtggcccactttccagcccatgagaagcccgtgtgctgtatggccttcaataccagtggcatgctcctggtcactaccgatacactgggtcatgatttccatgtgtttcagattctcacccacccatggtccagtagccaatgtgcggtgcatcacctgtatacactgcatcgcggagagacggaagctaaagttcaggacatctgtttcagccacgactgtagatgggtggtggtatctaccctgcgcgggactagccatgtgtttccgataaatccatacggcggccagccttgcgtgaggacgcatatgtcacctagagtggtgaacagaatgagcagatttcagaagtctgccggcctcgaagaaatcgagcaggaacttacttcgaagcaagggggacgctgctctcccgtccccggcttaagctccagcccttcaggcagtccacttcatggcaaactgaactcacaagactcatacaataattttacaaacaataacccgggcaatcctaggctgtctcccctgcccagcctgatggtcgtcatgccactcgcccagattaaacagccgatgaccctcggtactattacaaaacgtaccggaccctacctctttggcgctggctgtttctccataaaagccccatggtcatatatcatgaccaagtatattttttacattaaacccccaaacaaggtcaagcctccacctcaaatttctccctcaaagtctatgggcggagaattttgcgtagcagctatattcggaacttcacgatcatggtttgccaataacgctggcttgaaacgagagaaggaccagtctaagcaagtggttgttgagtcactgtatattatttcctgttatggtacccttgtggaacatatgatggaaccccgtcccctgtcaacagcgccaaagatctcagacgatactccactggagatgatgacttccccacgggcatcttggaccctcgtgcgaactccacagtggaatgagctgcagcctccgttcaatgccaatcacccattgctgctggccgccgatgccgtccagtattaccagttcctactggccggctag

SEQ ID NO: 25185 - DNA, 1815 bp, synthetic construct
  source 1..1815: mol_type = other DNA; note = Synthetic coding sequence
atgggcggctgcttcagcaagcccaagcccggcgccgccctgcccactgtcgagctgaagatcgaggtggttctacctgaaaaggaaagagggaaggaggagctgtcagcatccggcaagggaagcccaagagcgtatcaaggcaatggaaccgcccgacatttccatactgaagaacgactgagcacaccccacccctacccgtctccccaggactgtgtagaggcggccgtgtgccatgtgaaggatctcgaaaatggccagatgagagaggtcgagctggggtgggggaaggttctgctggtgaaggacaatggcgagtttcatgcactcggccacaagtgtcctcactacggagctccactcgttaaaggtgtattgagccgcggtcgggtgcggtgtccctggcacggagcctgtttcaacatctctaccggggatctcgaagactttccaggattggactcccttcataaatttcaggtgaagatcgagaaagagaaggtctatgtccgggccagcaagcaggcactgcagcttcagcgccgaaccaaggtgatggccaagtgcatctcaccttcagccgggtacagttctagcacaaatgtactgattgtcggggcaggggcggccggcctggtttgcgccgaaactctgcggcaggaaggcttcagcgaccgcatcgtcttgtgcaccctcgatagacatttaccctacgacaggccaaaacttagcaagagcctcgacacccagccggaacagctggctctgcgcccaaaagaattttttagagcgtatggcatcgaggttctcacagaggcacaggtagttacagtggatgtgcggacgaaaaaggtagtgttcaaagacgggtttaagctggagtacagtaagctcttgcttgccccaggctcctcacccaagacactttcttgcaaggggaaggaagtcgaaaatgtgtttaccattaggacgcctgaggatgccaacagggttgtaagactggcgcgaggtagaaacgtcgtggtcgtaggagccggattccttgggatggaggtcgccgcctaccttactgagaaggctcatagcgtatccgtggtggagctggaggagaccccgttccgccgttttctcggggaacgagtaggtagggccctgatgaaaatgtttgaaaataacagagttaagttttacatgcagactgaagtgtcggaattacgcggccaggaaggcaagttgaaagaagtggtacttaaatccagcaaggtggtaagggctgatgtctgcgttgtcggcatcggggctgtgcctgctactggcttcctgcgacagtctggcatcggactcgactcacgcggatttatccccgtcaataagatgatgcagactaacgttccgggagtctttgcagccggagacgcagttacatttcctctggcctggaggaacaacagaaaggtgaatattcctcactggcagatggcccacgcacagggacgcgtcgcagctcagaatatgctcgctcaggaggccgagatgtcaactgtgccctacctgtggaccgctatgtttggtaaaagcctaagatacgcaggctacggggagggcttcgatgacgtgatcattcagggtgacctggaggagctcaagttcgtagccttctacacaaaaggagatgaagtcatcgctgttgcctcaatgaactatgaccccattgtgtcaaaagttgcagaggtgctggcctctggccgcgcaattcgaaaacgggaagtggagaccggggacatgagttggttgaccgggaagggctcatag

SEQ ID NO: 25186 - DNA, 744 bp, synthetic construct
  source 1..744: mol_type = other DNA; note = Synthetic coding sequence
atgagcaccgccgccgtgcccgagctgaagcagatcagccgggtggaagcaatgcgtctcggcccaggctggtcacactcctgccacgccatgctgtatgcggcaaacccaggccagctgttcggaagaataccaatgagatttagcgtgctgatgcagatgcgattcgacgggctcctggggttccccgggggatttgtggaccgtcgcttttggtctctggaggacggtttgaaccgcgtattaggcctgggcttaggctgcctgcgcctcactgaggcagattatttgtcgtctcacttgactgaagggccccatcgagtggttgctcatctttacgcccgtcagctcaccctggaacagctgcacgccgttgagatctcagcagtccactcaagggatcacggcctggaagtgggtccacctccagggccccgcccccccccacggggtctcgccctggctccctggaaggccccgatgggaaacacctcccctgaaggaccactcgccggactcgggagggtgtctttatcccccgcgatgggctggggggagggtagcggtgctgggagacccggcaaggaaggccgcgggtggggtccggcactcggacttcctcagggatgtgtgactagcgcacttctgcctgcaattgctaaccctgggagcgggggcgtgggtagcgtcggaagaaagggatggggacggtccggagactgcctgggcagttgggaaacatag

SEQ ID NO: 25187 - DNA, 1338 bp, synthetic construct
  source 1..1338: mol_type = other DNA; note = Synthetic coding sequence
atgtaccccaaccccctgatctactgcacctgctgggacccctggaacctagggccaagaaagttaatcaagaccccccagctgccgcgcaagaactccacgggttcatccaagctcacacccttagtacctgctccaaagaaccacaattacctgcagcctacaaaacctgttgtctcacccaagatgaagatccacagcgctagacaggaagagaccaacaaatccttttatgaagtgataaatgtgtcgccaggctaccagctagtacgcaacagggagcaaattagcgtaaccctcggggatgaaatgtttgacagaaaaaaaagatgggagagcgaaataccagataagggccgattctctaggaccaacatcatttcagatctggaagagcagatatcagagctgaccgctattatcgaacagatgaatcgggatcaccagtctgcgcaaaaattgttatccagcgagatggacttacgttgtgcggagatgaaacagaacttcgaaaataaaaatcgcgaacttaaggaagcccacgaggcagagctgagcgaattggagaataactacaaggcggccctgaaggcagagaagcttgctgctcaggagaagctggaggagatgggtaaggagtacaaatacctcaagaatatgttccgcacttatcaggattccatttacgatgagatggaggaaaaatggtctaagcaaaaggccaaatggaagaaagatgagaagtttgagcgtgagaacatcctgctgcaacagaaaaagaagatgaccaagaaatttgagatggagtcaggagaggaagacaaaaagataaacgagtcatgttcagctgtgtttgagaactttatccaggaaaaggaagaactgctgaagcagcatcaatccgataccctgcagctggaggagttaaggaaaactaaggaagtcccttggaggcgtgatcaaatcaataggcactggcacgatgttctgcagcaactgctcctgatgcaggtcatgcaagaagaactgcacgctcaggccctgatccttgagtcactgaatactaacctctactacacgcagctggagctccaaaaagaaaaggcaattgtggggaacctagaaaaaatgctccaaaccaaatttgcggagactgaggaaaaatacaaacacacaatccaaatcctgacagaagaaaatatccacttgaagcagaaaataatcagcaaaaacgaagagatctgcgagggatgcagcggtcgtctggcttcaatcactgtttcaaaggatgactccgacactgttcaggacggcagcaagaaaggacaggagtcctag

SEQ ID NO: 25188 - DNA, 1335 bp, synthetic construct
  source 1..1335: mol_type = other DNA; note = Synthetic coding sequence
ttccgggtgcccgccgccggccggcggtgccccctggcccggggcgcccggagaccccccgactctgcatgcggtcggttcccgccagatccggggtcccctccagaggaagaggacgctgacctctcagagcgcgaagaaagttggttgcttgcagagcgggaagaaaaccaggaagctgagttccctggtctgcggagagccgtgcagctgaacctgtcacgccctatcgaagagcagggaccactagatgtgatcatccacaagcttactgacgttattctcgaagcagatcagaatgattctcagtccctggaactggtgcaccgatttcaggaatatatcgacgcacatcccgagactatcgtcctcgaccccctgcctgcaattcggaccttgttggacaggagcaaatcatatgagttaatccggaaaatcgaggcctacatggaagatgacagaatctgttctcccccttttatggagctcacctccctgtgcggtgacgacactatgaggctgcttgagaagaacgggttgacattcccatttatttgcaagaccagagttgcccacggtactaatagccacgagatggccattgtatttaaccaggagggcttgaatgccattcagccgccatgcgtcgtgcaaaatttcatcaatcataacgccgtgctatacaaggtttttgtggtcggagagtcatacaccgttgtgcagagaccaagtttgaagaacttttccgccggcactagcgatcgagagagcatcttttttaattcccataacgtgtcgaagcctgagtcttcgtccgtgctgactgagctggacaagattgaaggtgtgttcgaacgtccctccgacgaagtcatccgcgaactctccagagccctaaggcaagccctgggcgtgtcgctgttcggaatcgacatcattataaacaaccaaaccggacagcacgctgtcatagatatcaatgcgtttccagggtatgaaggggtaagcgagtttttcaccgatctactcaaccacatcgcaaccgtgctccaagggcagtccacagccatggctgccactggagatgtggcgctcctgcgtcattccaagctgctggctgaaccagctggcggacttgtgggagagcggacttgctctgctagccctggttgttgcggctctatgatgggacaggacgcgccctggaaggctgaagctgacgctggcggaactgccaagttgccgcaccaacggttgggctgcaacgctggagtatcaccttcgttccagcagcattgcgtggcctccttggcaacaaaagcctctagtcagtag

SEQ ID NO: 25189 - DNA, 864 bp, synthetic construct
  source 1..864: mol_type = other DNA; note = Synthetic coding sequence
atgtgcggccggcggcggcggcagcgggccgccctgctgagccactgggatccaaccctatccagcgattgggacggggaacgcacggcccctcaatgcctgctgcgcatcaaaagggatattatgtcaatctataaggagcccccaccgggtatgtttgttgtgccagataccgtggacatgacaaagatccacgcgttgattaccggcccattcgataccccctacgaagggggattcttcctctttgtcttccgttgtcctccggactaccccatacacccaccacgggtaaagctgatgacaaccgggaacaataccgtgagatttaaccctaacttctatcgaaatggaaaagtctgtctgtccatactcggcacatggacaggtcccgcctggagtcctgcccagtcaatctcatccgtactgatcagtattcagtcattaatgactgagaacccatatcataatgaaccaggttttgagcaagaacggcatccgggcgactcaaagaactataacgagtgcatccgccatgaaaccatccgtgttgctgtctgcgatatgatggagggaaagtgtccatgcccggaacccctgaggggcgttatggagaaatctttcctggagtattacgacttttacgaagttgcctgcaaagataggttacacttacagggtcaaacaatgcaggacccgtttggggaaaagcggggtcacttcgattaccagagtcttctaatgcgactgggactgatccgccagaaggttcttgagcgactgcataacgaaaatgctgaaatggacagcgattcaagctcctccggcactgaaacggaccttcatggaagccttcgcgtatag

SEQ ID NO: 25190 - DNA, 852 bp, synthetic construct
  source 1..852: mol_type = other DNA; note = Synthetic coding sequence
cccccctgcagcctgatcagcgactgctgcgccggcaaccagcgggactcagtgggcgtcggccctagcgagccaggatgctacccttgtcccggccccaacatgaaccctattgccctgggatcccgatggctggcctacgctgagaataagctcatcagatgccaccagtccagaggcggggcctgtggagataatatccaatcttataccgcgactgtgatctcagccgcgaagaccctgaaatccggactcactatggtcggtaaagttgtgacccaacttactggcacgctcccatcgggagttactgaagatgatgtggctatccactccaactccagaaggagtcctctcgtgccaggaattataaccgtgatagataccgaaaccgtgggagaaggtcaagtcctcgtaagcgaagattccgatagtgacggtatagtggctcactttcctgcccatgaaaagcctgtgtgctgtatggccttcaacacttccggaatgttactcgtgacaaccgatactctgggccacgacttccacgtcttccagatacttacacatccgtggagcagttctcaatgcgctgtgcatcatttgtacactcttcataggggtgaaacagaagctaaagtgcaggacatctgtttcagccatgattgccgctgggtggttgtctccaccctgcggggcacgtcccatgttttcccaattaacccatatgggggacagccttgcgttcgcacgcacatgagtcctcgcgtggtgaacaggatgtccaggtttcaaaagtctgccggtctagaggagattgagcaggaattaacaagtaaacagggagggaggtag

SEQ ID NO: 25191 - DNA, 2235 bp, synthetic construct
  source 1..2235: mol_type = other DNA; note = Synthetic coding sequence
atgagcgccgccaaccccgagacccccaacagcaccatcagccgggaagcttccacccaaagctcgtctgctgccgcctctcagggatgggtcttgcctgagggaaagatcgtgccaaataccgtttttgtaggggggatcgacgcacgtatggacgaaaccgagatcggaagttgcttcggacgctacggatcggtgaaagaggtcaagatcataaccaacaggacaggcgtctccaaggggtatggttttgttagctttgtcaacgatgtggatgttcagaagattgtaggctctcaaattcactttcatggcaagaaattaaaacttgggcccgccattagaaaacagaagctgtgcgcacggcatgtccagccccgccccctggtcgtgaacccgcccccccctccacagtttcagaacgtgtggcggaatccaaacaccgagacctatctgcagccccagatcacaccgaaccccgttacccagcacgtgcagtctgccgctaaccctgaaacaccaaacagcacgatctccagagaggcgagtacccagagtagtagtgctgccgcgagccaagggtgggtgctgcctgaaggcaaaatagtgcccaataccgtgttcgtgggggggatagacgcacgaatggacgagacagagattggctcctgcttcggaagatatgggtcagtgaaggaggtgaagatcattactaaccgtactggtgtgagtaagggatatgggtttgtgtccttcgttaacgatgtcgacgttcagaaaattgtcggctcacagatccactttcatgggaagaagctgaagctgggccctgctatcagaaagcagaagctgtgcgctcgacacgtccagccaaggcccctcgtcgttaaccccccgccccctcctcagttccaaaacgtatggcgcaacccaaacacagagacttatcttcaaccccagatcacccccaaccccgtgactcagcacgtccagtccgccgccaatcctgagacccctaactctactattagtcgtgaagcctcaacacagtccagttctgctgcggcctcacagggatgggtgctgcctgaaggcaaaattgttcccaacactgtattcgtggggggcattgatgcacggatggacgaaacagagattggatcatgctttggacgttacggttctgtgaaggaagtgaaaatcataacaaataggactggtgtctccaaaggctacggattcgtgagtttcgtgaacgatgtcgatgtgcaaaagattgtgggtagccagatccatttccacggaaagaaattaaaactcggccctgcaataagaaaacagaagttgtgtgcccgccatgtgcaaccccgacctctggtcgtgaaccctccgccgcctcctcagttccagaatgtctggcggaacccaaacacagagacttatcttcaaccgcaaattacacccaacccagtgacccagcacgttcaggcctattccgcctacccacattcaccaggccaggttatcaccggctgtcagttattggtatacaattatcaggaatatccaacctatcctgactccgcattccaggtgaccacaggctatcagctgccagtatacaattaccagccattccctgcatacccccgaagtccgttccaggtcactgccggatatcaactgcctgtgtacaattatcaggccttccctgcctatccaaattctccatttcaggtcgccaccgggtatcagttccctgtctacaactaccagcccttcccggcatacccgagttccccatttcaggtaaccgctggttatcagctacctgtttataattaccaagcattcccagcctacccaaactcacccttccaagttgccaccggataccagtttccagtctataactaccaagcttttccggcttaccccaactcgccggtgcaggtcaccacaggataccagctccccgtttataattaccaggcttttcccgcttatccaagctccccattccaggtgacgaccggctaccagttgcccgtatacaactaccaagcattccccgcctacccaaactccgcggtgcaagttactactggataccagttccatgtctacaattaccaaatgccacctcagtgtcctgtcggagaacagcggaggaacttatggaccgaagcttataagtggtggtacctcgtctgtctgatacaacgcagggactag

SEQ ID NO: 25192 - DNA, 1089 bp, synthetic construct
  source 1..1089: mol_type = other DNA; note = Synthetic coding sequence
atgctgaagaacaagggccacagcagcaagaaggacaacctggccgttaacgcggtggcactccaggatcacatactccatgacttacaactgaggaacctgagtgtggccgatcacagtaaaacacaggtgcaaaaaaaggagaacaagagcctgaaaagagatactaaagcaataatagatacaggtctaaagaagactacacagtgcccaaaactagaggattccgagaaagaatacgtactggaccccaaaccgccacccttgaccctcgcccaaaagctcggattgatcggccctcctccccccccactgtcttcggatgaatgggagaaggtcaagcagaggagccttctccagggcgactcagtgcagccctgtccaatctgtaaggaggaattcgagttgaggccacaggtgctcctttcctgcagtcatgtctttcataaggcctgtctccaggcttttgagaaattcacaaacaaaaaaacgtgtccactctgccgaaaaaaccagtatcagacccgggtaatacacgatggtgctcgattgtttagaatcaagtgcgtcactcgaatacaggcctactggcgtggctgtgtggtacgcaagtggtataggaaccttcggaaaactgtccccccaactgacgctaaactccggaagaaattctttgagaagaagtttaccgagatttctcatcgcatcttgtgtagctacaatacaaacattgaagagctgtttgccgagatcgatcagtgcctggccattaaccgaagtgttttacagcagctggaagaaaagtgcggacatgagattaccgaggaggaatgggaaaagatccaagttcaggctctcagacgagaaactcacgagtgctcaatctgtcttgccccactgagcgctgccggtggccagcgggtgggggctggccgacgatcacgcgagatggccctacttagctgttctcacgtcttccaccacgcctgcctcctggccctggaagaatttagtgtcggagataggccgccttttcacgcctgtccactatgccggtcctgttaccagaaaaagatactagaatgctag

SEQ ID NO: 25193 - DNA, 2130 bp, synthetic construct
  source 1..2130: mol_type = other DNA; note = Synthetic coding sequence
atggccgacgccggcatccggcgggtggtgcccagcgacctgtacccgctggtcctgggttttctgcgggacaatcagctctcagaggtggccaataagttcgcaaaggccaccggcgccacccaacaggatgcaaacgcctctagccttctagacatttactctttctggctgaagagcgcgaaggtgccggagaggaagttacaagctaacggccccgtcgcaaaaaaggccaaaaagaaggcttccagctccgactctgaggattcatccgaggaagaggaagaagttcagggtccacctgcgaagaaggccgcagtgcccgccaaaagggtggggttgccgccgggcaaagccgcagccaaggcttcagaatcctcatccagcgaagagtcatcagatgacgatgacgaggaggaccagaagaagcagcccgtgcaaaaaggcgtgaagccacaggccaaggcagccaaagctcctccgaaaaaagctaagtccagcgactcagatagcgactcttcttcagaagatgagccccctaagaatcagaaaccaaagattactccagttactgtgaaggcccagaccaaggccccacccaagcccgcgcgagcagcgcctaagatcgccaatggtaaggcagcaagttcctcctcaagctcctctagctcctctagtagcgatgacagcgaggaagagaaagccgctgccacccctaagaaggtatggactatcacctcagtcagggcagaaaccgtacccaaaaaacaggttgtcgcaaaggcacccgttaaagctgctacaacccctactcgcaaatccagctcatcagaggactcgagctccgatgaagaggaagaacagaaaaagcccatgaaaaacaaaccaggaccttatagctccgttccccctccgtcagcccccccgcccaaaaaatcgctggggacacagccacccaaaaaagccgtcgagaaacagcagccagtcgagtcttctgaagatagtagtgacgagagtgattccagcagcgaagaagaaaaaaaaccccctacaaaagctgtcgtgtccaaggcgactacaaagccacccccagcgaagaaagcggctgaaagcagctcagacagtagcgactccgattcaagcgaagacgatgaggcccctagtaagcccgccggaactaccaagaactcaagcaataagccagcagttactaccaagagtcctgctgtgaaaccagccgcagcccccaaacagcccgttggaggcggtcagaaacttctcacccggaaggccgacagcagtagctctgaggaggagtcttccagcagcgaggaggagaaaactaaaaagatggtcgcaacaacaaaacctaaggcgactgcgaaggccgcccttagcctgcccgcgaagcaagctccacaagggtctagagatagctcctcagattccgacagctcttcatctgaggaggaggaggaaaagaccagtaagagcgcagtcaagaaaaagccccaaaaagtggcaggtggggccgccccgtccaagcctgcttccgccaaaaaaggcaaagccgagtcctccaactcaagctctagtgatgatagttccgaggaggaggaggagaaactgaagggcaaaggcagtcctaggccccaggctcctaaggccaacggcacctccgccctcacggcgcagaatggaaaggccgctaagaacagtgaagaagaagaggaagagaaaaagaaagccgccgtagtcgtctccaagtctggcagtcttaaaaagcgcaaacagaatgaggcggccaaggaggccgaaactccacaggctaaaaaaatcaagttacagacccctaacacgttccctaagagaaaaaagggtgagaaacgcgctagtagcccattccgcagggttcgcgaggaagaaatagaggtggattctcgtgtggccgacaacagcttcgatgccaagagaggtgccgcaggagactggggggaaagagcaaaccaggttctgaaattcactaagggcaaatctttcagacacgagaagacaaagaagaaaagaggatcttatcgcggcgggtcaatatctgtgcaagtaaactccattaaattcgatagtgagtag

SEQ ID NO: 25194 - DNA, 558 bp, synthetic construct
  source 1..558: mol_type = other DNA; note = Synthetic coding sequence
atgcagcagaagagccagaagaaggccgagctgctggacaacgagaagcctgctgccgtggtggcccccatcaccactgggtacacagtcaagatctcaaactacgggtgggaccagtccgacaaatttgtgaaaatctatatcacgctgactggggtgcaccaagttccaaccgaaaatgtccaggttcatttcactgagagaagcttcgacctcctggtaaagaatctgaacgggaagagctacagcatgattgtcaacaatcttttgaagccaatcagcgttgaaggaagctctaaaaaggtcaaaacggacacagtgctgatcctttgccgaaagaaagtcgaaaacacacggtgggactacttgacacaggtcgagaaagaatgcaaggagaaggaaaaaccttcttatgacactgaaacagacccatccgagggcctcatgaacgtgctgaagaagatatacgaggatggggacgacgacatgaagcgtaccatcaacaaggcctgggtggagtcacgggaaaaacaggctaagggggacaccgagttttag

SEQ ID NO: 25195 - DNA, 1764 bp, synthetic construct
  source 1..1764: mol_type = other DNA; note = Synthetic coding sequence
atggccagcgaggacatcgccaagctggccgagaccctggccaagactcaggttgccgggggccaactctcttttaaagggaagagcctcaagcttaatacagccgaagacgccaaagacgtaatcaaggagattgaagactttgattccctagaggctcttcggctcgagggaaacacagtgggggtggaagccgcccgagtcattgcgaaagccttggaaaaaaaatcggagctgaagagatgccattggtcagacatgttcacaggtcgcctccggaccgaaatcccgccagccctcatcagcctaggcgagggcctaatcactgcgggagcacaacttgttgaactggacctctctgataacgctttcgggcctgacggagtgcagggatttgaggcgttacttaagtcgtccgcctgctttactctgcaggagctgaagctcaacaattgtggtatgggcatcgggggcgggaaaatcttggccgcagccctgacagagtgccaccgaaaaagctccgctcagggaaagcctttggcgctcaaggtgtttgtcgccggccgaaacaggctggaaaatgatggtgctacggctcttgccgaggcatttcgggtgatcggcacgctcgaagaggttcacatgccccagaatggaatcaaccacccagggattaccgctctcgcgcaagcattcgcggtaaaccccctcctgcgggtgataaacctgaacgacaacacattcaccgagaagggagctgtcgcgatggcagagaccttgaagaccctgcgccaggtggaggtgataaacttcggcgactgtctggttaggagtaaaggcgctgtggccattgcagatgcgatcagaggtggcttgccaaagttaaaggaactgaacctatcattctgtgaaattaagcgagacgctgcactagcagttgcggaagctatggccgataaggccgaattggaaaaattggacttgaacggcaacaccctgggcgaggagggttgtgagcaactacaagaggtcctggagggtttcaatatggcaaaggtgcttgcttctctctcggacgatgaagatgaggaagaagaggaagaaggggaggaagaggaggaagaggcagaggaggaggaggaggaagacgaagaggaggaggaggaggaagaagaggaggaagaagaggagccgcagcagcggggacagggagaaaaatccgccaccccatctagaaaaatacttgatccaaacacaggcgaacctgcacctgtgcttagttcccctcctccggcagacgtttccactttcctagcctttcctagtcccgaaaagctcctgcgcctaggacctaaaagctcagtgctaatcgcacaacagaccgatacatccgaccccgaaaaggtggtctctgctttcctgaaagtgtcctcagtgtttaaggatgaagccaccgttcgaatggctgttcaggacgcggtggatgccctgatgcagaaggctttcaattccagctcttttaactccaatactttcttgacacggttactcgtccacatgggtctccttaagagcgaggacaaggtgaaagccattgccaatctgtatgggccattgatggcgctcaatcacatggttcagcaggactatttcccaaaggctcttgcgccactgttgttagccttcgtcaccaagcctaactccgcccttgaatcttgctcattcgcacggcacagtcttcttcagacgctgtataaagtatag

SEQ ID NO: 25196 - DNA, 1098 bp, synthetic construct
  source 1..1098: mol_type = other DNA; note = Synthetic coding sequence
atgaaggagctgtggtgcgtgatggactgggccgtgcccggcctgttagggtcaggaacttacttcaaaaaacaatttagcgatccagtagagcatggccagagacataccgctacaaaacgagaactggcaacaggcagaaaagccatgcagcgactggccaagaagatgagtgggtggtttctgaggcgcactaagacgttaattaaggatcagctaccgaagaaagaagaccggatggtctactgttccttgaccgatttccagaaggctgtctaccagaccgtgctggaaactgaggacgtgacgctgatcctccagtccagcgagccatgcacatgtcgatcggggcagaagcgacggaattgttgctataagaccaatagtcacggcgagaccgttaagacattgtacttatcgtatcttaccgtgttgcagaaagtggcaaaccatgtggccctcctccaggccgcatccaccagtaaacaacaggaaacactcattaagcgcatatgcgatcaggtattctcccggtttcctgattttgtgcagaaaagcaaggatgcagctttcgagaccctgagtgaccctaagtacagtgggaaaatgaaagtactgcagcagcttctgaatcactgccgaaagaatcgcgataaagtgttattattcagtttcagcacgaagctccttgatgtccttcagcagtattgtatggcctcaggactggactaccggcgccttgatggatccacaaaaagcgaagaaaggctcaagatcgtgaaggagttcaacagcacacaggacgtaaacatttgtctggtgagcaccatggccggaggtctcgggttaaacttcgtgggagccaacgtggttgtgctcttcgatccgacgtggaacccggcaaacgacctgcaggccatcgacaggactcagacgcattgccgtcgcgaacgggacgcggaacctctgtcttccgcgccgggcctccagaatggcagcgagaatgctgttccatacccttggtggtgctgtgtaaccggggccagtatcagttgttggcgatgcgagatttgtcgcatccaggacgtcctggagtag

SEQ ID NO: 25197 - DNA, 1104 bp, synthetic construct
  source 1..1104: mol_type = other DNA; note = Synthetic coding sequence
atggagaagaagaagatggtgacccagggcaaccaggagcccaccacaacacctgacgccatggtccagcctttcaccaccatccccttccctcctccacctcagaacgggatcccgactgagtacggtgttcctcacacccaggactatgctgggcagaccggagagcacaacctcactctctatgggtccacccaggcgcatggggagcagagttctaatagcccaagtactcaaaacggttccctgacacagaccgagggaggtgcacagactgacgggcaacagtcccagactcagagcagtgagaatagtgaaagcaaatctacacctaagcggctgcacgtgagtaatatccctttcaggttccgggatccagatctgcgccagatgttcggccagttcgggaaaattctcgacgttgaaattatttttaacgagcgaggttccaagggcttcgggttcgtgacatttgaaaatagcgctgatgcagatagagctagagagaagctgcatggaaccgtcgtggagggccgcaagatcgaagttaacaacgctaccgctcgggtcatgacaaacaagaaaatggtcacaccctacgctaacgggtggaaactcagtccagttgtgggagctgtatacggccccgagctttacgcggcctcatcatttcaagccgatgtcagcttaggtaacgacgccgcagtaccactgtccggaaggggtggcataaacacatatattcctctgataatccctgggtttccgtacccaacagcagcaactaccgcggccgcttttcgcggtgcccacctccggggcagggggcggaccgtgtacggggcggtccgcgccgtgccccccacagctatacccgcctaccccggggttgatatgcagcctacggacatgcattcactgctgctgcagcctcagccacctctgctacagccgcttcagccgctgacggtgacggtaatggctggttgcactcaacccactccaaccatgcctctaccccttccccttgcaatggagcttgcactctggcgggtatacacggaggtcgcgactgcagacctgcccccaaccgaggttacctag

SEQ ID NO: 25198 - DNA, 1764 bp, synthetic construct
  source 1..1764: mol_type = other DNA; note = Synthetic coding sequence
atggccagcgaggacatcgccaagctggccgagaccctggccaagactcaggtggcaggtggtcagctctcttttaagggaaagagtcttaagcttaatacagccgaagacgccaaagatgtcattaaagaaattgaggattttgattcactggaggcccttcggctggaaggcaacaccgtgggagtcgaggcagccagggtgatcgcgaaagctctcgaaaagaaatctgagctgaagcgttgtcactggagcgacatgttcactggaaggctgcgtaccgagattccgcccgcgctgatatcgctcggggaagggctgattacggccggagcgcagctggttgaactcgatcttagcgacaatgccttcgggccagatggcgttcaaggtttcgaggcactcttgaaaagctccgcatgcttcacactgcaggagctcaagctgaacaactgcggcatgggtatcggcgggggaaagatactggccgcagccctgactgagtgtcacaggaaaagctccgcacagggaaagcccctggccttgaaagtgtttgtggctgggaggaacagactggagaacgacggggctaccgccttggccgaggccttccgggtcatcggaacgctcgaggaagtgcacatgcctcagaacggcatcaatcatccaggaattaccgctctcgcccaagccttcgccgtgaaccccctcttacgcgtgatcaatctaaacgataatacatttacagaaaagggggcggtcgctatggcagaaacgctgaagaccctaaggcaggtggaagtcatcaatttcggcgactgtctcgtgcgttcaaaaggcgctgtcgccatcgccgacgcaattagaggggggctaccgaaactaaaagagctgaacctcagtttctgcgaaattaagagggatgctgcactggccgtcgctgaagctatggcagataaggcggagctagagaagctggatcttaacgggaacacattgggtgaagagggatgtgagcagctgcaagaggtactcgaaggattcaacatggccaaagttctggcatctctctcagacgacgaagacgaggaggaagaggaagaaggtgaggaggaagaagaggaggccgaagaagaggaggaggaagacgaggaggaagaggaagaagaggaggaggaggaagaggaagaaccgcagcagcgagggcaaggcgagaagagtgccaccccgtcccgaaaaatcctcgacccaaatacaggtgagccagcaccggtcctgtcaagcccaccgcctgctgacgttagcacattccttgccttcccttcccctgagaagctgctccgtctgggcccaaaatcctctgtgctgattgcccaacagacagatactagcgacccagaaaaagtggtgtctgctttcctgaaggtctcttctgtcttcaaggacgaggctactgttagaatggctgttcaggacgcagtggacgctttgatgcaaaaagccttcaatagttcttcctttaacagcaacacatttcttaccaggcttctcgtgcacatgggcctgctgaagtctgaggataaagtcaaagccatagcgaacctttatggaccactcatggctctgaatcacatggtgcagcaagactacttccctaaggcactagcacctttactccttgccttcgtcacgaagcctaatagtgcattagaatcatgttctttcgcacgacattccctgctgcagacactttacaaggtgtag

SEQ ID NO: 25199 - DNA, 1143 bp, synthetic construct
  source 1..1143: mol_type = other DNA; note = Synthetic coding sequence
atggacgccgccaccctgacctacgacaccctgcggttcgccgagtttgaggatttccctgagactagtgaacctgtgtggatcttgggcaggaagtactccattttcacagagaaggatgagatcctgagtgacgttgcatcccgcctgtggttcacgtaccgcaagaacttccccgccataggcggcacaggaccaacttccgacaccggttggggatgcatgctgcgatgcggccaaatgattttcgctcaggccctcgtttgtcggcatcttgggcgagactggcggtggactcagagaaagaggcagcctgactcatatttctcggtcctgaacgcgtttatcgacagaaaggatagctattactctatccaccagattgcccagatgggcgtgggggaaggtaagagcatcggccagtggtatggcccaaatacagtcgctcaagttctgaaaaagctggccgtgttcgacacatggagctcgttagccgttcatatagctatggacaacacagtggtgatggaagagattaggagactgtgtcggacatctgtgccctgtgctggcgccactgcattccccgctgactcggataggcactgtaacggattccccgccggcgcagaggttaccaaccggcctagtccatggagacccctggtgcttctaattcccctaaggcttggactgaccgacatcaacgaagcatatgtcgagacactgaagcactgtttcatgatgccacaatccctaggggttataggcgggaagcctaatagtgcgcactatttcattggctacgtgggcgaagagctaatctaccttgatccccatacgacccaaccggcggttgaacccaccgatggctgttttatcccagacgagagcttccactgccaacaccccccttgtagaatgagcattgcggaattagaccccagcatcgccgtcggatttttttgtaaaacagaggatgactttaatgattggtgccagcaagtgaagaagctgtcattattaggcggcgcacttcccatgttcgagctggtggaactgcagcccagtcatctggcttgcccggatgtgctgaacctgtctctgggcgagtcttgccaggtgcagatcctgttaatgtag

SEQ ID NO: 25200 - DNA, 2124 bp, synthetic construct
  source 1..2124: mol_type = other DNA; note = Synthetic coding sequence
atgatccccccccaggaggccagcgcccggcggcgggagatcgaggataagctgaaacaggaggaggagacactgtccttcatccgggactctctagagaagtcagatcaattgacaaaaaacatggtttccatccttagttccttcgaaagtcgcctgatgaagttggaaaactcaatcatccccgttcacaagcagactgaaaacctgcaaagactgcaggagaatgtggagaagacacttagctgtttggaccacgtaatcagctactaccatgtggcctctgatactgaaaagattatacgagagggcccgacaggacgactcgaagagtacttaggctccatggctaagatccagaaagccgtggagtattttcaagacaactcgccagacagccctgaactgaataaggttaagttgctgttcgaacgaggaaaggaggcccttgagagcgagtttcgcagtctgatgacacggcatagtaaggttgtgtctccggtactaattctcgatttgatctccggagatgacgaccttgaggctcaagaggacgtcaccctcgaacacttacccgagtccgtccttcaggatgtcattagaattagcaggtggctggtggagtatggccggaaccaggacttcatgaatgtgtattaccagatccgctcatcacagctggatcggtctatcaaaggcctgaaagagcactttcataaaagctcatcctcttcgggagtgccatacagtccagccatccctaacaaacgtaaggatacccccacgaagaaacctgtcaagcgacccggcacaattagaaaggctcagaatcttctgaaacagtacagccaacacggccttgatgggaaaaagggggggtccaaccttatacccttggagggacatgagcacgatttcagggtaaaacacctgagtgaagctttaaatgataaacatgggccccttgccggtagagatgacatgcttgatgtggagacagacgcctatattcactgcgtctcggccttcgtgaagctggcacagagcgagtaccagctcctcgccgatataatccctgaacatcaccagaagaagacattcgacagcctcattcaggatgccctggacggcctaatgttggaaggcgagaacatcgtgtccgccgctagaaaggccatcgtgcgtcatgattttagcacagtactcactgtcttcccaatcttgcggcatttgaaacagacaaaaccagagtttgaccaggtgctgcagggaacagctgcatctacaaagaataagctgcctggactgattactagcatggagactattggggctaaagccctggaggattttgctgacaacattaaaaacgaccccgacaaggagtacaatatgccaaaggacgggacggtccacgaactcacgtcgaacgcaatcctctttctgcagcaacttctggacttccaagaaactgcaggagccatgctagcatcccaagagacttcctcttcagcaacctcttactcttcagagtttagcaaaaggcttttgagtacttacatttgtaaggtcctggggaatctgcaattaaacctgctgtccaagagtaaggtttatgaagacccagccctgagcgcaatcttcttgcataacaactacaattatattctcaagagcctcgagaagtccgagctgattcaactcgtggccgttacccaaaaaacagccgaaagatcataccgggaacacatcgaacagcagattcagacctaccagagaagttggctcaaagtgactgactatatcgccgagaagaatcttcccgtgtttcaaccgggagtcaaactcagagataaggagagacagatcattaaagagaggttcaaaggattcaacgacggactcgaggaattatgcaaaatccagaaggcgtgggcgatccccgataccgagcagagagaccgaattaggcaggcccaaaagaccatcgtcaaggaaacatacggagcatttctccagaaatttggatcagtgccatttacgaagaatccagagaagtacattaaatatggtgttgaacaggttggagatatgattgataggctcttcgatacaagtgcctag

SEQ ID NO: 25201 - DNA, 1026 bp, synthetic construct
  source 1..1026: mol_type = other DNA; note = Synthetic coding sequence
atggcccaggagagccccaagaacagcgccgccgagatccccgtgacaagcaatggcgaagtggatgatagtagagaacactcatttaatcgagacctcaagcattccctgccctcagggcttggcctttctgaaacacagattacctcccacgggttcgacaataccaaagaaggagtcatcgaggccggggccttccaggggggccagagaactcagaccaagtccgggcccgtcatcctcgctgacgaaattaagaacccagccatggaaaaattggagttggtgcggaagtggtctcttaacacctacaagtgcacgagacagattatcagcgaaaagctaggcagaggatcaaggaccgtggaccttgaattggaggcacagattgacatcttgcgagacaacaagaagaagtatgaaaacattcttaagcttgcccagacactttctacccaactttttcagatggtccacacacagcgtcagctgggtgacgcctttgccgacctgagtttaaagagtcttgagctgcatgaggagtttgggtataacgctgacacccagaaacttcttgctaaaaacggtgagactctgttgggcgcaatcaattttttcattgcatccgttaacacactggtgaataagaccatcgaggatacattgatgaccgtcaagcagtatgagtctgcacgtattgagtacgatgcatacaggaccgatctggaggagctgaatcttgggccaagggacgcaaacaccctgccaaagatcgaacagagccagcacctatttcaggcccacaaggaaaagtacgacaaaatgcgcaatgacgtctctgtgaaactgaagttccttgaggagaacaaggtcaaagtgctacataaccagcttgtcttatttcataacgccattgctgcttatttcgctggaaaccagaagcagttggagcagacactaaagcagtttcatattaagctgaagacccctggggtcgacgcaccgtcatggctcgaagaacagtag

SEQ ID NO: 25202 - DNA, 1488 bp, synthetic construct
  source 1..1488: mol_type = other DNA; note = Synthetic coding sequence
atggccggcgtgggccggagcggcggcccctggggccggacccgggggggtcggagtggtcggctgggagtgagtctgggagctctgtcatcactgccacttgaagaactgcctcgcccgttgtgctgtcggcgatgtcggcgtcatttcggctttgctctcagaggcgagacaattcccgtgtcagtggctgggagcgcttctagccaattcgcgccactcgccctgcacctttcattactgctgtctcggatatccgcctcccggctcacccgttggccaccccctgataagcgtgaaggcagtgccgtggaccccggcaagaggaggagtttggccgctactccatcctcaagtctcccctgcaccctcatcgctctggggctgcggcatgaaaaggaggctaacgaactgatggaggatctctttgagacgttccaagatgaaatgggtttttctaatatggaggatgacggccctgaggaagaggagagggtcgcggagccacaggccaatttcaacaccccgcaggcattgcggttcgaggagctgctagctaatctgttaaatgaacagcatcagattgccaaggagttgttcgagcaactcaaaatgaagaagcccagcgccaaacagcagaaagaggttgaaaaggtgaagccacaatgcaaggaggttcatcaaaccctaattctcgatcccgcgcagagaaagagactgcagcagcagatgcagcagcatgtgcagctgctcacccagattcatctgctggctacttgcaatcctaatctgaacccagaagcgtcttctacacgaatttgcctgaaagagctcggtacatttgctcagagctccatcgccctgcaccaccagtacaacccaaaatttcagactctgtttcagccgtgtaacctgatgggcgcaatgcagctgattgaagattttagtacacatgtgagcattgattgctccccccacaagacggtgaagaagaccgcaaacgaattcccatgcctgcccaagcaggtcgcgtggattctggctacttcaaaggtcttcatgtaccccgaattgctgcccgtgtgctctcttaaagctaagaaccctcaggacaagatcttatttacgaaggcagaagataacctgctggctctggggcttaaacactttgagggaaccgagttcctcaatccactgatcagcaagtatctgctcacatgcaagaccgccaggcaacttacggtgaggattaagaatcttaatatgaaccgagccccagacaacatcatcaagttctataaaaaaactaagcagctacctgtgcttggcaaatgctgcgaggaaattcagccccatcagtggaagccgccaattgagagggaggaacaccgtcttcctttttggctgaaagtacagccttccagctctaagagcgtcggtggcagacgctccttaaaagtgctacgggagtatcaaggtttgccatag

SEQ ID NO: 25203 - DNA, 180 bp, synthetic construct
  source 1..180: mol_type = other DNA; note = Synthetic coding sequence
atggccgcccccggcgccctgctggtgatgggcgtgagcggcagcggtaattgggacggcaacagtatgatgctgatgatcatcactcgtcgcaagattgagggcaggtgggagaaggcttatcgatctatgacccggaccggtttccacgggtcagtgacatgtatgacattctactag

SEQ ID NO: 25204 - DNA, 207 bp, synthetic construct
  source 1..207: mol_type = other DNA; note = Synthetic coding sequence
atgggcgagaccgagggcaagaaggacgaggccgactacaagcggctgcaaacctttccccttgttcgtcacagtgacatgcccgaggaaatgcgcgtcgaaacaatggagctctgcgttaccgcatgcgagaagttcagtaataataacgaagtccttcccgctgttcaagcagcccctagggcattcgatggaccctgcgggtag

SEQ ID NO: 25205 - DNA, 2451 bp, synthetic construct
  source 1..2451: mol_type = other DNA; note = Synthetic coding sequence
atggtgctgatgttccagatccggtacatcagccagacccagggcctacctgcggaatacctgcttagcgccggaacgaagactactagattttttaacagagacccaaacctgggctacccgttgtggcgactcaaaactccagaggagcacgagctggagactggcatcaagagtaaagaagcccggaagtacatttttaattgtctggacgatatggcgcaagtaaacatgtccactgacctagagggcactgacatgttggcagagaaggctgatcgacgcgagtatatagatctgctcaaaaagatgctgacaatagacgctgacaaaaggatcacgcctcttaaaaccctcaatcatcagtttgtgaccatgacccatctcctcgattttccacactccaatcatgtgaagagctgcttccagaatatggagatctgcaagcgacgcgttcacatgtacgatactgtttcccagataaaaagcccgtttaccacccatgtggctccaaatacgtctacaaaccttacgatgtcgttcagtaaccagctcaacaccgttcataaccaggcctcggttctggcaagttcatcaacagctgctgcggcaactctgagtctggccaattcagacgtgagcctcctgaattaccaatccgctctatacccttcgtccgctgcgcccgtgccgggagtggcacaacagggagtgtcattacagccggggaccacccagatatgcacacaaaccgacccctttcagcagaccttcattgtttgtccaccagccttccagactggccttcaggccacaaccaagcatagcggattcccggttaggatggacaatgcggtcccaattgttccacaggcccccgcagcgcaacctctgcagattcagtccggagtccttacacagggcagctgcacccccttgatggtggccactttacacccacaagtggcaacaattactccacagtatgccgtacctttcaccctgagttgtgccgccggccgaccagcactggtggaacagactgccgcagtccttcaggcatggcccggcgggacacagcagattctgttaccatccacctggcagcagctgcctggtgttgcccttcataactctgttcagccaaccgccatgatcccagaggctatggggtccgggcaacaactagccgattggcggaacgcccattcacacggtaaccagtactctaccatcatgcagcaaccttccctgttaacgaatcacgtgaccctggctaccgctcaaccactcaacgtaggggtggcacatgtggtcagacagcagcagtcaagtagtctcccaagcaagaagaacaaacaaagcgcgcctgtatcaagtaagtcttctctggacgtgctgccaagtcaggtgtactctctggtcggcagttcccctctcaggacaaccagctcatataattctctcgtaccagtgcaagatcagcaccagccgatcatcatcccagacacaccatcaccaccagtgagcgtgatcacaatcaggtctgatactgatgaggaggaggacaacaaatacaagcccagcagtagcggcctgaagccacggtctaatgtgatctcctacgtgactgtgaatgattcgcccgactccgactcgtctctgagttccccatacagtacagatactctctctgctctgcgaggtaacagcggatccgttcttgaggggcctggccgagtggtagcagacggaactggcacgagaacgatcattgtccccccgctgaagacccaactaggtgactgcacagtggctacacaagccagtggccttctctccaataaaacaaagcccgtggcatcggtgagcggacagagttcaggatgttgcatcacccccacaggctatcgggctcagagaggcggcaccagcgcagcacagcccttgaatctgagccagaaccagcagagctccgctgctcctacatcacaagagaggagcagcaatcctgcccctcggcgccagcaagccttcgttgctcccctgtcccaggcaccctacacattccagcatgggagccccctccactccacaggtcaccctcacctggcgccggcaccggcacacctgccatcacaggcacacctgtacacctacgccgcacctacctcagctgctgccctcggctctacaagtagcatcgcgcatctcttctcaccccaggggtcctctcggcacgccgcagcttacaccacacacccttccactcttgtgcaccaggtgcctgtaagtgtgggcccttctctcctcacctcggcgagcgttgcaccagctcagtatcagcatcagtttgccacgcagtcctatatcggctcatctcgggggtccaccatatataccggctatcctctgtcccccaccaagattagccagtattcttatctgtag

SEQ ID NO: 25206 - DNA, 1119 bp, synthetic construct
  source 1..1119: mol_type = other DNA; note = Synthetic coding sequence
atggacgtgctgagccccctgagcttcatcaaggtgagccacgtgagaatgcaaggtattctcctactagtgtttgcaaagtaccagcatctaccatacatccagatcctgtccacaaagtcaacacccacaggattgtttgggtattggggaaataagggcggagtgaacatttgtttgaagctgtacggctattacgtctcaatcatcaattgccacctcccaccgcatatcagcaataactaccagcgattagagcactttgatagaatcttggaaatgcaaaattgcgagggtcgtgatattccaaatatattagatcacgatcttataatctggttcggcgatatgaattttcgtatcgaagactttggcctacactttgttagggaatccattaaaaataggtgctatggtggcctgtgggagaaagatcagctgtccatcgcaaagaaacatgatccactgctgcgtgagttccaggagggtcggctgcttttccctccaacatacaaattcgacagaaatagcaatgactacgatacatccgagaagaagcggaagccagcttggaccgatcggattttgtggcgactgaaacgacagccctgtgccggacccgacaccccgataccacctgccagccacttctctctaagtctaagaggctattcaagccacatgacatacgggatctcagaccataaacctgtgtccggcacgtttgacctggagctgaagcccctggtgagtgcacccctaatcgtccttatgcctgaggatctgtggacagtggagaacgacatgatggtgtcatattcatccacttccgactttccatccagcccctgggattggataggactgtataaggtgggactccgggatgttaacgattatgtgtcctatgcatgggttggtgattccaaggtgtcatgtagcgataatctgaaccaagtgtacattgacatttcaaatatcccaaccactgaagatgagttccttctctgttactatagcaattctcttcggtctgttgtgggtatcagtcgcccgttccagatcccgcccggcagcctgagggaggaccccctcggggaagcacagccgcagatttag

SEQ ID NO: 25207 - DNA, 480 bp, synthetic construct
  source 1..480: mol_type = other DNA; note = Synthetic coding sequence
atgatccccccccaggaggccagcgcccggcggcgggagatcgaggacaagctgaagcaggaagaagaaaccctgagctttatcagagactcactcgaaaaatcagaccagctgacaaaaaatatggtgtctatactgagcagtttcgaatcccggctaatgaaactggagaatagtatcataccagtgcacaagcagactgagaatcttcaaagactgcaagagaacgttgagaaaacactgtcatgcctggaccacgtgatcagctactatcacgtggcttccgacaccgagaaaattatccgcgaggggcccacaggtcgtctggaggaatatctggggtccatggccaagatacagaaggcggttgagtacttccaagacaacagccctgattccccggagctaaataaggtcgtgaggggcccccagaataatgtgcggagcttgggaattagtgtatcggctctcgtgtcatag

SEQ ID NO: 25208 - DNA, 243 bp, synthetic construct
  source 1..243: mol_type = other DNA; note = Synthetic coding sequence
atggccagcgaggagctgcagaaggacctggaggaggtgaaggtgctattggagaaggcaaccaggaagcgggtccgagatgctctgactgccgaaaagagcaagattgaaactgagatcaaaaacaagatgcagcagaaaagtcagaagaaggccgagctgttagacaacgaaaagcccgctgcagttgttgcgcctatcacgaccggatatacggacggaatatcccagatatccttgtag

SEQ ID NO: 25209 - DNA, 606 bp, synthetic construct
  source 1..606: mol_type = other DNA; note = Synthetic coding sequence
atgcccagcgagaccctgtgggagatcgccaaggccgaggtggagaagaggggtatcaacggaagcgaaggcgatggcgccgagatagctgagaaattcgtgttcttcataggtagtaagaatggaggaaagaccacaattattctccgctgcttggacagggacgaacccccaaaaccaaccttggccctcgagtatacttacggacgccgagccaaaggtcacaacacccctaaggacatagctcacttttgggagttaggaggagggactagtctgttggacctgatttcaattcctattactggggacacgctccgcacttttagtctggtgttggtcctggatctgtccaagcccaatgatttgtggcctacgatggaaaacctgctgcaggcaacaaagagtcatgtcgacaaagtgatcatgaaactaggcaagacaaacgctaaggctgtttctgagatgagacagaagatctggaacaacatgcccaaagatcatcccgtgtcctgttgtcttgggttgttattggagtccctagtgccgttcatcgtgaacgacaatatcacaaacaacttttttagattcctgtgcatgacatag

SEQ ID NO: 25210 - DNA, 1401 bp, synthetic construct
  source 1..1401: mol_type = other DNA; note = Synthetic coding sequence
atgagctaccggcccgtggtgagccccgtgatgagcctgacccggcgctgtatgcgtagccgcacgagcatgcgcacagatgcagtgtttctgatcctgtacaaggagctatactaccgacacatatatgctaaagtgtcaggggggccgtctctggagcaaaggttcgaatcgtactataactactgcaatctcttcaactacattttgaacgccgatggtccagccccgttggagttgccgaaccaatggctgtgggacattattgatgagttcatatatcaatttcagtctttctcacagtacagatgcaaaacagccaagaaaagtgaagaggagatcgactttttgcgctctaatccaaaaatctggaacgtacacagcgtactgaacgtgctgcactctctggtcgacaagtctaacatcaatcgccagctggaggtgtatacctcgggcggtgatcccgaatctgtcgctggcgagtacgggcgacactcgctatacaaaatgctaggctacttctcactggtgggtcttctaagacttcacagcttgcttggcgattattaccaggcaatcaaggttctggaaaacatcgagttaaacaaaaaaagcatgtacagcagagtgccggagtgccaggtgacaacgtactattatgtaggcttcgcctacctcatgatgagacggtatcaagatgcaattcgggtgtttgctaatattctcttatatatccagagaacgaaaagcatgttccagcggactacatataaatacgagatgataaacaaacagaatgaacagatgcatgcactcctggcaatcgccctgacaatgtatcctatgcgcattgatgaatcaattcacctccaactcagggaaaagtatggggataagatgttaagaatgcaaaagggcgatccgcaggtgtacgaggagctttttagctattcctgtcctaagttcctgagtcccgtggtacctaattacgacaatgtgcaccccaattaccataaggagccctttctgcaacagctaaaggtgttctccgacgaggttcagcagcaggcacagctctcaacaatccgaagtttccttaaactctataccactatgcctgtggctaagctggccggtttcttagacctgaccgaacaggagtttcgcatccagctactcgtgttcaagcataaaatgaagaacttagtttggacttctgggatcagcgcgctagatggggagtttcagagcgcttcagaggtggacttttacatcgacaaggatatgatccatatcgctgacaccaaagttgccaggaggtacggtgacttctttattcggcaaatccacaaattcgaggaactcaaccgaactctgaaaaaaatgggccagcgtccttag

SEQ ID NO: 25211 - DNA, 597 bp, synthetic construct
  source 1..597: mol_type = other DNA; note = Synthetic coding sequence
atgagccgggccgtgaccatcgccgaggccttctgccacatcctgttcaggattataagcgaaatcctgatgaggatgctcgaagagcaatgcctgttccccctacccgaacctcaggatctgttccaagcgagccagatgaagtttgaagactttcagaaggacctgcggaagctgaagaaggacttgaaggcttgcgaagtggaagcgggcaaggtttaccaggtgagtagcaaagagcatatgcagccttttaaggaaaacatggagcagtttataattcaagccaaaattgaccaggaagccgaagaaaattcactcactgagacccataagtgctttctcgaaacgacggcttactttttcatgaagccgaagctgggtgagaaagaggtcagcccaaacgcctttttctccatctggcatgagttcagctcagacttcaaagatttctggaaaaaggaaaacaagctcctgctgcaggaacgggttaaagaagcggaggaggtatgccgtcagaagaaagggaagtcgttgtacaaaattaaacctcgacacgactcaggtataaaagccaagatctccatgaagacctag

SEQ ID NO: 25212 - DNA, 441 bp, synthetic construct
  source 1..441: mol_type = other DNA; note = Synthetic coding sequence
atggagcccacccgggactgccccctgttcggcggcgccttcagcgcaatcttgcccatgggcgcaattgatgtcagcgatttgcggcctgtacccgataatcaggaggtgttttgccaccccgtaaccgatcaatccctgatcgtcgaattactggaactccaggcccacgtgaggggggaagctgcagcacgatatcatttcgaagatgtcgggggcgtgcagggggcgagggcagtgcacgttgagagcgtacaaccattgtccctcgagaacctagcactccgcggaaggtgtcaggaagcatgggtattatctggcaagcagcaaatagccaaggagaaccagcaagttgcaaaagacgtcacgctccaccaggcactgttgagactgccccaataccagactgacctgcttcttaccttcaaccagcccccatag

SEQ ID NO: 25213 - DNA, 1584 bp, synthetic construct
  source 1..1584: mol_type = other DNA; note = Synthetic coding sequence
atgagcctgtgcggcgcccgggccaacgccaagatgatggccgcctacaatggtgggaccagtgccgcagccgcaggtcaccaccaccatcaccaccaccacctcccacacctccctcctcctcatctgcaccaccaccaccatcctcagcatcacttgcaccccgggtccgccgccgcagtccaccctgtgcagcagcatacttcttccgctgcagccgcggccgccgccgcagccgcagctgctgctatgttgaaccctggacagcagcagccttacttcccttcacccgcgccaggccaggcacctggcccggccgctgccgcacccgctcaggtccaagcagcagctgcggcaactgtcaaagcccaccaccatcagcacagccatcatccacagcagcagcttgacatcgaacctgatcgcccaatcggatatggagccttcggggtggtgtggtccgtgactgatcccagggatggtaaacgggtagcgctcaagaaaatgcctaacgttttccaaaatctggtgtcttgtaagagagtgttccgcgagttaaagatgttgtgcttttttaaacacgacaacgtgttgagtgccttagatatcttgcagccacctcacatagactacttcgaagagatctacgtcgtcaccgagctcatgcagagcgatctgcacaaaataatcgtctcacctcagcccctgagttcggaccatgttaaagtgtttctgtatcagatcctgcgcggattgaaatacctccacagtgccggcattctccacagagacattaagccaggaaatctactggtaaatagcaattgcgtactgaagatttgcgacttcggactcgcgcgagtggaggaactggacgagtcacgccatatgactcaggaggtggtgacacagtattatagggcacctgagatcctgatgggctctcgccattactctaatgcaatagacatctggtcagtgggatgcatcttcgcagaactgttgggcagacgaatcctctttcaggcccaatcaccaattcagcagttggacctgatcaccgacctattgggcactccatctttagaggcaatgcgcaccgcgtgtgagggagcaaaggctcatatccttcgggggccccataagcagccatccctgcccgtcctttacactctgtcctcacaagctactcacgaggcggtccatttgctatgcaggatgctggtgtttgatccttccaaaagaatcagtgccaaggatgcgctcgcgcacccttaccttgacgagggccggctgcggtaccatacttgtatgtgcaaatgctgtttctccacctcaaccggcagagtgtatacttcagacttcgaacctgtgacgaaccctaaattcgacgataccttcgagaagaacttgtctagtgtgagacaagtgaaggaaataatccaccaattcatattggagcagcaaaaaggaaatagagtacctctctgtattaatccacaatcagcagccttcaagtcttttatatcatcgacagttgctcaaccatctgagatgcccccttcaccattggtctgggaatag

SEQ ID NO: 25214 - DNA, 2742 bp, synthetic construct
  source 1..2742: mol_type = other DNA; note = Synthetic coding sequence
atgaacgaggccatggccaccgacagcccccggcggcccagccggtgtaccgggggagtcgtggttcgtccgcaagccgtcactgagcaatcctacatggaaagtgtggtgacttttctccaggatgttgtgcctcaggcatatagtggcacaccactcacagaagagaaggaaaagattgtgtgggtcaggtttgagaacgctgatttaaacgacaccagccggaatctggagtttcacgagatccactctactggcaacgaacctccattattaattatgatagggtacagcgacggtatgcaggtgtggagcatcccaattagtggcgaggcccaggagcttttctccgttcggcatgggccaattcgtgctgcccgcatcctgccagcccctcagtttggtgctcagaaatgtgacaattttgcagagaagcgccctctcttaggtgtgtgtaaaagcatcggatcgtcaggcacctccccgccctactgttgcgtggatctctactctttgagaaccggggagatggtcaaaagcatccaattcaagacccctatttacgacctccactgtaataaacgcatcctcgtggtggtgctgcaggaaaagatcgccgccttcgattcgtgtacctttactaaaaagtttttcgtgacatcgtgctatccatgcccaggtcccaacatgaatccgatcgccttaggcagcaggtggttggcgtatgcagagaacaagctgatccgttgccaccaaagcaggggtggcgcttgcggtgataatatccagagctatacagccaccgtgatttcagcggccaagaccctgaagtccggactcacaatggttggcaaggtggtaacacaattaacaggaactcttccctctggagtaaccgaggatgacgtggccatccattcgaactcaagaagatccccgttagttcccgggatcattaccgttattgacactgaaactgtgggcgagggccaggtcctggtgagcgaggattctgatagcgacggaatagtcgcacacttccccgctcacgaaaaacccgtgtgttgtatggcatttaatacaagcggcatgcttttagtgaccaccgatacactgggacatgacttccacgtctttcaaattttaacacacccctggagctcatctcagtgcgctgtccaccacctgtacaccttgcaccgaggggaaacagaagcaaaagttcaggacatctgcttttcccacgattgccgctgggtggtcgtcagtacactgcgcgggacaagtcatgtgttcccgattaatccttatggtggacagccttgtgtgaggacccacatgagcccgcgcgttgtgaacagaatgtccaggtttcaaaagagtgccggattagaggaaatcgagcaggaacttacaagcaaacaaggaggaaggtgttctcctgtaccaggattatctagctcacctagcggtagcccactgcacgggaaattgaactcgcaggactcttataataacttcaccaataacaatcctggcaatccccgtctatcacctctgccctccttgatggtggttatgcccctggcccaaataaaacagcctatgacacttggaactataacaaagcgtactggcaaggtgaagcctcctcctcagatttcaccctctaaatctatggggggggagttttgcgtggcagccatattcggcacctctaggagctggttcgccaataatgccggcctgaaacgggaaaaagaccagtctaagcaggtggtggttgaatcgctgtacatcatctcttgctatggcacactcgttgaacacatgatggaacctaggccgctctctaccgctccaaagatcagtgatgatacccccctggagatgatgacctcacccagagcaagttggactttagttagaacgccgcagtggaacgagctacagcccccgttcaacgccaaccacccactcttgcttgccgccgacgctgttcagtattaccagttcctcctcgccggcttagtgcctccaggaagcccagggccgataacaaggcacggatcatatgatagcctggcctctgatcattcaggccaggaagatgaggagtggctgtcccaggtggagatcgtgacgcatactgggccccatcggcggctatggatgggccctcagttccagttcaaaactattcatccctcaggacagacaactgtcatctcctcctcttcgagcgtgctgcaaagccacggaccatccgacacaccccaacctctcctggatttcgacaccgacgatctggatctcaattctctacgcattcagcccgtccggtctgatcctgtctccatgcccggaagctctagaccagtaagcgaccggcgcggcgttagcactgttatcgatgccgccagcggcactttcgatagatctgtaacacttcttgaggtatgcgggtcctggccagagggattcggtctcaggcacatgtcttcaatggagcacacggaagagggactgagagagcgactggcagacgctatggcagaaagcccatcacgcgatgtcgtgggctccggcacagaacttcagagggaaggaagcattgagaccttgtctaacagcagtgggagcacctctggatccatccctcgcaattttgatgggtatcggtctccgctgcctacgaatgaatctcagcctctttcattatttccaacagggtttccatag

SEQ ID NO: 25215 - DNA, 2160 bp, synthetic construct
  source 1..2160: mol_type = other DNA; note = Synthetic coding sequence
atgggcttcagcaacatggaggacgacggccccgaggaggaggagcgggtggctgaacctcaggccaactttaatacccctcaggcgctgagatttgaagagctcctggctaacctgctgaacgagcagcaccagatagccaaggagttattcgagcagctgaagatgaaaaaaccatctgctaaacagcagaaggaagttgaaaaagtgaaaccccagtgtaaggaagtccaccagactctcatcttagatccagctcagaggaaaagactacaacagcaaatgcagcagcatgtacagctgctcacccagattcatcttctggcaacttgtaatccaaatctaaacccagaggcatcctcaacacgtatctgtttgaaggagctgggcaccttcgcacagagcagcatcgccttgcaccaccagtacaaccctaagttccaaaccctgtttcagccgtgcaaccttatgggggccatgcagctgatcgaggacttttcaacacatgtgtctattgattgctctccacacaagactgttaaaaagacagcgaacgagttcccatgcctgcctaaacaggtggcatggatcttggccacctctaaggtcttcatgtatccagaattgcttccagtgtgcagtcttaaagccaagaaccctcaagacaagatcctgtttacgaaggctgaagataataaatatctgttgacatgcaagacggcacggcagcttaccgtgcgcatcaaaaacctcaatatgaacagagcaccagacaatatcattaagttttacaagaaaacgaagcagctccctgtcttggggaaatgttgcgaggagatacaaccacatcagtggaagcctccaatcgagcgcgaagaacaccgcctgcccttttggctgaaggcatccttaccttctatacaggaggagctccggcatatggccgacggcgctcgagaggttggaaatatgacaggaacgacagagattaactctgaccagggattggagaaggacaattccgagcttggcagcgaaacgcggtacccattgctgctaccgaagggtgtggtgctgaaactgaagccagtggccgatcgctttcccaaaaaggcttggcgacagaaacgatcctccgtgctgaagccactgctaattcagccttcccctagcttgcagcccagtttcaacccaggaaagacacctgcacagagcacccacagcgaggctccaccaagtaaaatggtacttagaatccctcaccccatccagcccgcaacagtgctgcagaccgttcctggagtgcctcctctgggcgtatcagggggggaaagcttcgaatctcctgcagctctccccgcgatgccccctgaggctaggactagctttcctctctcggagagtcagaccttgttgagttccgcccctgttccaaaagtgatgatgccttctcctgcatcatccatgtttagaaagccctatgtccgtcgaagaccctccaagagaagaggcgcgagagccttcaggtgcataaagccggccccggtgatccaccccgcctcagtcatattcaccgtacccgctacaacagtgaaaatagtatcactcggcgggggatgcaacatgatacagccagtcaacgccgctgtagcccagtccccacagacaattccaatcgccactctcctggtaaatccaacatccttcccatgccctctgaatcagcctctggtggcctccagtgttagtcccctgatcgtttcaggaaatagcgtaaatctgcccatcccttccactcctgaggacaaagctcatatgaacgttgacatcgcatgtgccgtggcggacggggaaaatgcttttcagggcttggagccaaaactggaaccacaggagctaagccctctctccgctacagtgtttccaaaagtggagcactcacctggccccccgccagtggataaacagtgccaggaaggcctgagtgagaattccgcctatcgctggactgttgttaaaacagaagaaggcaggcaggcgcttgagcccctcccccagggtattcaggagtctctgaacaactcgtcgccaggggatttggaggaggtggtgaagatggagccagaggatgccacagaagagatctccggctttctctag

SEQ ID NO: 25216 - DNA, 324 bp, synthetic construct
  source 1..324: mol_type = other DNA; note = Synthetic coding sequence
atgagcgtgctgcggcccctggacaagctgcccggcctgaacaccgcaacaatactgctggtcggcactgaagacgctctgctgcagcagctcgctgattctatgcttaaggaagactgcgccagtgaattaaaagttcaccttgcaaagagccttcctctcccttcaagtgtcaacaggccaagaattgacctcatcgtttttgtcgtgaatcttcacagtaagtatagcttgcagaacactgaggaatccctacggcacgtggatgcctccttcttccttggaaaggtgtgttttttggctaccggaggaggccggctctag

SEQ ID NO: 25217 - DNA, 1599 bp, synthetic construct
  source 1..1599: mol_type = other DNA; note = Synthetic coding sequence
atgttcgtgctgggcatccccctgtgccccgccctgagcttcagcggcggagatgatagtcagacccagttgtttgtgtcaagtaaggacgtgatcaaggagattgaggattttgattccctggaggcgctgagactagagggcaataccgtcggagtggaagcggccagggtgatcgctaaagccctggagaagaagtcagaattgaaacgctgccactggtcggacatgtttactggacggctgaggactgagatccccccggctctgatttccctcggcgaagggttaatcactgctggggctcagttagttgaactcgacctctccgacaacgcctttggcccggatggtgtccaaggcttcgaagctctcctgaaaagcagtgcttgctttacactccaagagcttaaattgaacaattgtggtatgggaatcggtgggggaaaggtcatcggcactctagaagaggtccatatgccgcagaacgggatcaatcaccctggtatcaccgctctggcacaggccttcgcagtgaaccctttacttcgcgtgattaatctcaacgataatacattcacagaaaagggcgccgttgctatggccgaaaccttgaagacactgaggcaggtcgaggttattaattttggggattgtctggttcgatctaagggagcagtggccattgctgatgctattagaggcggcctccccaaactcaaagaattaaatctatctttctgtgagataaagagggacgcagccttggctgtggccgaggctatggcagataaggcagaactggagaagttagacctgaatggcaacacgctgggggaagaggggtgcgagcagctccaggaggtcctggagggctttaatatggccaaagtgctggcctcccttagcgatgatgaagacgaagaagaggaagaagagggcgaagaagaggaggaggaggcagaagaggaagaggaggaagatgaggaggaggaggaagaggaagaggaggaggaagaggaggaaccccagcagaggggacagggcgaaaagtccgccactccaagcaggaaaatccttgacccaaacactggggaaccagcacctgtgctgtcctccccaccacccgcagatgtgtcaactttcctggccttcccaagcccagagaaactgctgagactcggccccaagagttccgttttaattgctcagcagactgatactagcgatccagagaaagtcgtgtctgcgtttttgaaggtttccagtgtgttcaaagatgaggctacagttagaatggcggtccaggatgctgtggatgccttaatgcagaaagcattcaatagtagctcattcaactccaacacattcctgactcggctccttgtacacatgggcctgctcaagagcgaggataaagtgaaggccattgcaaacctctacgggccattgatggcgctaaaccacatggtgcagcaagactactttcccaaggccctggccccgcttttattggctttcgtcactaaaccaaattccgccctggaaagttgttcttttgccaggcattctttactccagaccctgtacaaagtttag

SEQ ID NO: 25218 - DNA, 1383 bp, synthetic construct
  source 1..1383: mol_type = other DNA; note = Synthetic coding sequence
atggacagcgagctgatgcacagcatcgtgggcagctaccacaagcccccagagcgcgttttcgtgcccagctttacccagaatgagccttcacagaattgtcacccagccaatctcgaagtcacctctcctaaaattcttcacagtcccaacagtcaggctcttattctcgccctcaaaaccctccaggagaaaatccaccggctagagctggagagaactcaggcagaagataatcttaatatcctgtctcgggaagccgctcagtataagaaagcgttggagaacgaaactaacgaacggaatcttgcccaccaggaattgatcaagcagaaaaaagacatcagcattcaattgtcatccgcccagagcaggtgcacattacttgagaaacagcttgaatatacaaagagaatggtgttgaacgtggagagagaaaagaatatgatcctcgagcaacaagcccagctgcagagggaaaaagagcaggatcagatgaagctgtatgccaaactggagaagttagatgtattagaaaaagagtgcttcagactgaccacaacccagaaaacagccgaggacaaaatcaaacacctggaggagaaattgaaggaagaggagcaccagcgtaaactatttcaggataaagcctcggagttgcaaacaggcctcgagattagcaagattatcatgtcttccgtctcaaatctgaagcattctaaagaaaaaaaaaagtccagcaagaaaactaagtgcataaaaaggaggcctccttggcaaatctgctccaaattcggcgctctgccgttcgtggctgagaagatgaggcagcatagggatccccatatcctccagaagccatttaatgtcacagagactcgttgtctgccgaaacctagccgcacaacgtcctggtgcaaagccattcctcctgatagtgagaaatcaatttccatttgtgataacctctccgagttactaatggctatgcaagacgaattggatcagatgtcaatggaacatcaggaactactcaaacagatgaaagagacggaaagtcattcagtgtgcgatgatatagagtgcgaactggagtgtctgctgaaaaagatggagatcaaaggagaacagattagcaaactgaagaaacatcaggactctgtctgcaagctccagcagaaagtccagaactctaagatgagtgaggcttccggcatacagcaggaggactcctatccaaaaggatccaagaacatcaagaattctccaagaaaatgtctgaccgatacgaacctctttcagaagaattcgagttttcaccctatacgtgttcacaacctccaaatgaaactgcgcagagatgatatcatgtgggaacagtag

SEQ ID NO: 25219 - DNA, 567 bp, synthetic construct
  source 1..567: mol_type = other DNA; note = Synthetic coding sequence
atgaccgcccccagctgcgccttccccgtgcagttccggcagcccagtgtgtctggtctctcccagatcactaaaagtttatacattagtaacggcgtcgctgctaacaataaattaatgctgtcgtccaaccagatcacaatggttatcaatgtgagcgtcgaggtggttaataccctgtatgaggatatccagtacatgcaggtcccagtagcggattcccccaactcccggttgtgtgattttttcgatccaattgccgatcatatacactccgtcgagatgaaacagggccggacgctgctccattgcgctgcgggcgtgtccagatccgcggccctgtgcctcgcatacctgatgaaatatcacgctatgtccttgctggacgctcacacttggacaaagtcctgcagaccaataatccggccaaacagtggtttctgggagcagctcatccactacgagtttcagctcttcggtaaaaacaccgtgcacatggtgtcatctcctgttggcatgattcccgatatttacgaaaaggaggtaaggctaatgattcctctatag

SEQ ID NO: 25220 - DNA, 1596 bp, synthetic construct
  source 1..1596: mol_type = other DNA; note = Synthetic coding sequence
atgaacaagaccaaccaggtgtacgccgccaacgaggaccacaactcccaattcatcgacgattacagtagctccgacgagtccctaagcgtatcccattttagcttttcaaagcaatcacaccggccacgcacaattcgagaccgcacctcctttagctctaagttaccttcccacaacaaaaaaaacagcactttcattccgcggaagccaatgaaatgctctaatgaaaaggtcgtaaaccaagaacagtcctatgaatctatggacaaatttctagatggggtccaggaagtcgcctatatacacagcaaccagaacgtaatcggaagctcaaaggctgagaatcatatgagtaggtgggcagcccacgatgtgttcgaactgaagcagttttcccagctgcccgcgaacattgccgtgtgttcgagtaagacctacaaggagaaagtggacgccgacacattgccacacactaagaaaggacagcagccctccgaagggtcaatttcacttccgctctacatctccaatcccgtgaatcaaaaaaagaagaaagtataccatactaaccagactacatttattataggagagacaccaaaggggatccggaggaaacagttcgaggagatggccagctatttcaattcttcttctgtgaatgagttcgcaaaacacatcaccaacgcaaccagcgaagagcggcagaagatgctgcgggacttttacgcctcccagtacccagaagttaaggaattctttgttgactcagtgtcacagtttaacaattctagtttcgaaaagggagaacagcgcacccggaaaaagagcgacaagcgcgagagccttatcaagcctaggctgtcagacagcgagacattatcattcaaggattctactaacaagatcagtcaggtgtgctctctgaagacatataaacgcaaatctgtaaaatttcaaaaccacatcagctatcgcgaagaggtgtttttcaacgatgccgaaactaaaaaatccccagtttcctctacccaagaaatcgactccggcaaaaattcacaggccagtgaggacacagtgaccagccggtcacttaactctgagtccgaaacccgcgaacgcaggctcgagaacaccatgaaagaccagcaggacctcacccggaccggaataagcaggaaagaacccttgctgaagctggaaaataagaagattgagaatcccgtactggaaaacacaagcgtgatcagccttctgggggatacctcgatcctggacgacctgttcaaatcccacggtaatagccctactcagctacccaagaaggttctgtctggcccaatggagaaggccaaacaacgaccaaaggacttttgggacattctgaacgagcaaaacgatgagtctctttcaaaactgaccgatctagcagttatcgaaacactgtgcgagaaggctccactcgcagcaccatttaaaagacgggaagagccagcgacaagcctgtggaaatccaacgaaaagtttctttggaagaaatttagccccagcgataccgacgagaatgctaccaacactcagtctactacctag

SEQ ID NO: 25221 - DNA, 1089 bp, synthetic construct
  source 1..1089: mol_type = other DNA; note = Synthetic coding sequence
atgaccggccacacccggagcagcctgccccggtgcaccggcatcgtcctgttgatcaagctgcgatttagtgaacgtctgacaggacatttgcacgctcagggaaccccgccctatgtaatcaatcttgatcctgccgttcatgaggttccatttccagccaacatcgacatacgtgacactgttaaatataaagaggtcatgaagcagtatggcttagggcctaatggcggaattgtgacaagcctgaatctgttcgctactcggtttgaccaggtgatgaagtttatagagaaggcacagaacatgagcaagtacgtgctgatcgataccccaggacagattgaagttttcacctggagcgcctccggaaccatcataactgaagcgctggcctcctcttttcccaccgtcgttatatatgtgatggatactagccgctctaccaatcccgtgacctttatgagtaatatgctgtatgcttgttcgatcctgtacaagactaagctgcccttcatcgtcgttatgaacaaaactgatatcatcgatcacagctttgctgtggagtggatgcaggatttcgaggcttttcaggacgcccttaaccaggagacgacgtatgtatctaatctgacgcgctctatgagtctcgtcctggatgaattttattccagtctcagagtcgtcggcgtgtcagctgtcttgggtacaggtctcgacgagctcttcgttcaggtaactagtgccgcggaagaatacgagagagagtatcgaccagagtacgagaggctgaagaagtcacttgcgaacgccgaatcacagcagcagagagaacagttagagaggctgcggaaggacatggggtccgtggcgctcgacgcgggcacagctaaggattcactctctcctgtccttcacccgtctgatctgatcttaacaagggggacgctcgatgaagaggatgaggaggctgactccgacaccgatgacatcgaccatcgggtcacggaggagagtcacgaagagcccgccttccagaactttatgcaggagagtatggcgcagtattggaagagaaacaataagtag

SEQ ID NO: 25222 - DNA, 1338 bp, synthetic construct
  source 1..1338: mol_type = other DNA; note = Synthetic coding sequence
atgagcgtgacctacgacgacagcgtgggcgtggaggtgagcagcgattctttttgggaggttggtaattataagcgtaccgtcaaacgtatcgacgacggccacagactgtgctccgatcttatgaactgccttcacgagagagcacggatcgaaaaggcctatgcgcagcagcttactgaatgggccaggcgctggagacagctcgtggaaaagggccctcaatacggaactgtagagaaagcctggatggcctttatgagcgaggccgagagggtgtccgagctgcacttagaggtgaaggccagcttgatgaatgacgattttgagaaaattaagaattggcagaaggaagctttccacaaacagatgatgggcggtttcaaggaaaccaaggaggccgaagatgggttccggaaggcccagaagccgtgggcaaaaaaactcaaggaggtagaagccgccaaaaaggcccaccatgccgcttgtaaggaggagaagctcgctatctcgcgcgaggcgaatagtaaggccgaccctagcctcaacccagagcagctcaaaaagttgcaggataaaatcgaaaagtgcaagcaggacgtgttaaaaacaaaggagaagtatgaaaaatctctcaaggagttggatcaaggaaccccccagtacatggaaaatatggaacaagtattcgagcaatgtcagcagtttgaagaaaagcggttgagattctttagagaggtgctactcgaggtacagaagcatttggacctaagtaacgtagcaggttacaaggctatttatcacgaccttgaacagtcaatcagagctgcagacgctgttgaagatctgcgctggttcagagctaatcacggaccaggaatggccatgaactggccacagtttgaagaatggagcgccgacctgaacaggacactgagccgccgtgaaaaaaagaaggccacggacggggtcaccctgactgggatcaaccagacaggagatcaatctctaccaagtaaaccctcgtccgtgtcaagttatgaaaaaacccagtcatatcccacagattggtcagacgatgaatctaacaacccatttagctctacggatgcaaacggggattccaaccctttcgacgacgatgccaccagtggcacggaagttcgcgtgcgggcactgtatgattacgagggccaggagcacgacgagctgtcgtttaaagctggtgacgaactgactaaaatggaagacgaagacgaacagggttggtgtaaaggccggctggataacggtcaggtgggactgtacccagccaattatgttgaagcgattcagtag

SEQ ID NO: 25223 - DNA, 405 bp, synthetic construct
  source 1..405: mol_type = other DNA; note = Synthetic coding sequence
atgagcgagaacgccgcccccggcctgatcagcgagctgctgctgcagcgcggaacaaccaaagttgccacaggtctcgttctcaatcgtgatcaacgactggcttgggccgaaaactctattgactttatttcacgtgaactctgcgcccacagtattcggaaattgcaggcccacgtgctcttaattaaagcggtgcacgggtactttgatagtcgccagaactatagcgaaaaagagagcctctctttcatgatcgatacgatgaagtccaccctgaaggagcagttccaattcgtggaagtgcccggtaatcactgcgtgcacatgtctgagccgcaacatgtagccagcataatttccagctttctgcagtgtacccatatgcttcctgcccagctgtag

SEQ ID NO: 25224 - DNA, 321 bp, synthetic construct
  source 1..321: mol_type = other DNA; note = Synthetic coding sequence
atgagcagcaagggcagcagcaccgacggccggaccgacctggccaatggtagcctctccagcagccctgaagagatgagcggggcagaagaagggagagagacctcatcgggaatcgaggtggaagcaagcgatctctccctttccctcaccggagatgacggcgggccgaatcgaaccagcacagaatctcggggtaccgacactgagagcagcggcgaagataaagactctgactccatggaagacaccggccactactccatcaacgacgagaaccgcgtccatgatcgcagcgaggaagaagaggaggaggagtag

SEQ ID NO: 25225 - DNA, 990 bp, synthetic construct
  source 1..990: mol_type = other DNA; note = Synthetic coding sequence
atggtgcggaccaagacctggaccctgaagaagcacttcgtgggctaccccaccaattcagactttgagctcaagaccgccgaactgcctccccttaaaaatggagaagtgctgctagaggccctgttcttgactgtggatccgtatatgcgggtggcggccaaaagattgaaggaaggcgacaccatgatggggcagcaggtggcaaaggtggtcgaaagcaagaacgtggctcttcccaagggaaccatcgttcttgcttcccccggttggaccactcattcgatatccgatggaaaggacttggaaaaactcctcacagaatggccggataccattccattaagtctcgctctaggcactgttggaatgccaggtcttacagcctacttcggcctgctcgagatctgcggggtgaagggtggcgagacagtcatggtcaacgcggcagcaggcgccgtcggctctgttgtagggcagattgcaaaactgaagggctgcaaagtggtcggggccgtgggcagcgatgagaaggtggcatatctgcagaagctggggtttgatgtcgtgttcaattataagactgtcgaaagcctcgaagaaaccttaaaaaaagcatcccccgatggctatgattgttactttgacaatgtcggaggagaattcagcaacaccgtgataggccagatgaaaaaatttgggaggatcgctatctgcggggcgatctccacatataatcgaactggcccactgccgccaggccccccaccagagatcgtgatataccaggagttgaggatggaagcctttgtcgtatatcgatggcaaggggatgccagacagaaagctctgaaggaccttctcaaatgggtattggaagggaagatccagtacaaggaatacatcatagaaggcttcgagaacatgccagcggccttcatggggatgttgaaaggggacaatctcggcaaaactattgtgaaagcttag

SEQ ID NO: 25226 - DNA, 2235 bp, synthetic construct
  source 1..2235: mol_type = other DNA; note = Synthetic coding sequence
atggccaccgccaacttcggcaagatccagatcggcatctacgtggaaatcaaaagatctgatgggcgcatacatcaggccatggtgacctctctgaacgaggacaatgagagtgtgacagtagagtggatcgagaatggcgataccaaagggaaggagattgatcttgaatcaatttttagccttaatccagacctcgtgcctgatgaggagattgaaccttctcctgaaactccaccaccaccagcctctagcgctaaggtaaacaagattgtaaagaacagaaggacagttgcctcgatcaagaatgatccaccctctagggacaatagggtggtcggctccgccagggccagaccaagccaatttcccgagcagtcctcaagtgcccaacagaacggtagcgtctcagacatcagccccgtccaggcagcgaaaaaggagttcggcccaccctccagacgtaagtcaaactgcgtcaaggaggtggaaaagcttcaggagaaaagggaaaagcgtcgattgcagcagcaggagctgagagagaagcgagcgcaggatgtggatgcaaccaatcccaactatgagataatgtgcatgatccgagatttcaggggtagcttagattataggcctctgacgactgctgatccgattgatgaacatcggatctgcgtctgcgtgagaaaacgacctctgaataagaaggagacacaaatgaaagaccttgacgttattacaattccaagcaaggacgtggttatggtacacgaacccaaacagaaagtggacctgacgcgctatcttgaaaatcagacatttcggtttgactatgcctttgatgattcggcaccaaatgagatggtctatcgatttaccgcccggcccctcgtggagactatatttgagagggggatggcaacatgtttcgcatacggccagaccggcagcggaaagactcatacaatggggggcgacttctctggcaaaaatcaggattgttcgaaaggaatatacgcactggctgcacgtgacgtgtttctcatgctgaaaaagccaaattataagaagctcgaactgcaggtgtacgccactttcttcgaaatttattcaggcaaggtttttgacctcctgaacaggaaaactaagctccgggtcttggaggacgggaagcagcaggttcaggtagtcgggctgcaagagagagaggttaagtgtgtggaggacgtactgaaactgatagacatcggaaatagctgtcgtacctccggccagaccagtgctaacgcacactcatccagatctcatgccgtgttccagatcattctaagaagaaagggcaagttacacggcaaattcagtcttattgacctcgcaggaaacgagcggggagctgatacttctagcgccgaccgtcagacacggttagaaggggccgaaatcaacaagagtctgctggcactgaaagagtgcatcagagccctggggagaaacaaacctcacactccatttagagcttctaaattgacacaggtgctgcgggattcattcatcggggaaaattctagaacttgtatgatcgcaacaatttcccccggtatggcctcatgtgagaacacattaaacaccctgaggtatgctaatcgcgtcaaggagttcggcatcagccctagcgacatccccttcagccaaggaagtggcagcagaccagatctgagcccatcttacgagtatgatgatttcagccccagcgttacgcgggtcaaggagcttactgtagatcctaccgctgccggcgacgtaaggcctatcatgcatcacccacccaaccagatcgatgacctggagactcagtggggcgtagggagctccccccaaagagatgatctgaaactgctgtgtgaacagaacgaagaggaggtcagtcctcagctcttcacgttccacgaagccgtgagccagatggtggagatggaggagcaggttgtcgaggaccaccgcgctgttttccaggagtccataagatggctggaggatgaaaaagcgttgctggaaatgacagaagaagtggattacgatgtggactcatacgcaactcaacttgaggcaatcctggagcagaagatcgacattcttacagagctaagggacaaggtgaaatcgttcagggctgcactgcaggaggaggagcaggcctcaaagcagattaatccaaagcggccaagggctctttag

SEQ ID NO: 25227 - DNA, 1701 bp, synthetic construct
  source 1..1701: mol_type = other DNA; note = Synthetic coding sequence
atgttcgtgagcgacttccggaaggagttctacgaggtggtgcagagccagagggtattgctgtttgtggctagcgacgtcgacgctttgtgcgcatgtaagattcttcaggccctcttccaatgcgaccatgtgcagtataccttagttccagtgtcaggctggcaagagcttgaaacggcctttctggagcacaaagagcagtttcactattttatccttatcaactgtggggccaatgtcgaccttttagacattctgcagccagacgaggatacgatctttttcgtctgtgatacccaccggcctgttaatgtggtaaacgtgtacaatgatacacaaatcaagctgttgatcaagcaagatgatgacctggaagtcccagcttacgaggacatctttcgcgacgaggaggaggacgaagaacattcaggcaatgatagtgatggttccgaaccttccgaaaaaagaacccgcctggaggaggaaatagtggaacaaactatgagacgccggcaacgaagggagtgggaggccagaaggagagacatcctcttcgattacgaacagtatgagtatcacgggacttcctctgccatggttatgttcgagctcgcttggatgctgtctaaagatttaaacgacatgctgtggtgggcgattgtggggctgaccgatcaatgggttcaagataagatcactcagatgaagtacgtgacagatgtgggggtgctgcagcgtcacgtaagtagacacaaccaccgaaacgaagatgaagagaatacgcttagtgttgattgtactcgtatctctttcgaatacgatcttcgactggttctgtatcaacactggtccctgcacgattcgctgtgcaacacttcctataccgccgcacgttttaagctgtggagcgtccatggccaaaaaagattacaggaattccttgcggacatggggttacccctgaagcaggtgaagcagaaatttcaggcaatggacatctcccttaaagagaacctgcgggagatgatcgaagaaagcgctaacaagtttggcatgaaagacatgagagtgcagactttctctatccatttcggcttcaaacacaaatttttggcttccgacgtagtttttgcaaccatgtcgctcatggagtcacccgaaaaagatggatctggaaccgaccattttatccaggctctggactccctgtcacgctccaatctcgacaaactgtaccatgggctggagcttgcaaagaaacagctgcgggccacacagcagacaattgccagttgcctgtgcacaaacttagtgatttcccagggcccgtttctctactgctccctgatggaggggacacccgatgtcatgctgttcagcaggcccgccagcctctcactgctcagcaagcatctgctcaaatcttttgtgtgcagcaccaaaaacagacgctgcaagctgctccccctggttatggcagccccactctctatggagcatgggaccgtaactgtggttggcatccctccggagaccgacagctcagatcgaaagaatttcttcgggcgcgctttcgagaaggcagcagaatctacgagtagtcgtatgttacataatcatttcgacctaagcgttatagaattgaaagctgaggatcgatcaaaatttctcgatgctcttattagtctattaagctag

SEQ ID NO: 25228 - DNA, 798 bp, synthetic construct
  source 1..798: mol_type = other DNA; note = Synthetic coding sequence
atgtgcaccagcgagaccttccaggccctggacaccttcgaggcccgccatgacgatatagtgctggcatcttatcccaagtgcgggtctaactggatcctgcacatcgtgagcgagctcatctacgccgtgtctaagaagaagtacaagtaccccgagtttccagttcttgagtgcggagattcggagaagtaccagcgcatgaaggggttccctagtccacgcattctcgcgacccacttacactatgataagcttcctgggagtatctttgagaataaggcgaagatattggtgatatttcgcaacccaaaggacactgcagtgtcatttcttcacttccacaacgatgtgccagacattccaagctatggctcatgggacgaattttttaggcagttcatgaagggacaggtgtcttggggacggtatttcgacttcgccataaattggaacaagcatttggatggtgacaatgtaaagttcatcctctatgaagacttaaaggagaacctggctgccggcatcaaacagatcgcagaattcctaggtttcttcctgacgggcgagcagatccagacaatttcggttcaaagcaccttccaggccatgcgagccaagagccaagacacccacggtgcggtgggaccgttcctgttcagaaagggtgaggtcggggactggaagaatttgttttctgaaatccagaaccaagagatggatgaaaagttcaaggaatgcctcgccggtacctccctgggggctaagctgaagtatgagtcatattgtcagggatag

SEQ ID NO: 25229 - DNA, 2808 bp, synthetic construct
  source 1..2808: mol_type = other DNA; note = Synthetic coding sequence
atgaacgaggccatggccaccgacagcccccggcggcccagccggtgtacagggggagtggtggtgcggccacaggcagttacggaacagagctacatggagtctgtagtcacattcctccaggatgtcgtgcctcaggcgtacagtggaactccactgaccgaggagaaagagaagatagtctgggtccgcttcgagaacgctgacttaaacgataccagccgcaatctagaattccatgagatccattctacaggaaatgaaccgcccctgctcatcatgatcggttactccgatggtatgcaggtgtggagtattccaattagcggagaagcacaggaattgttctcagtgagacatgggcctatcagagcagcaaggatcctgcctgccccccaatttggcgctcagaagtgtgacaacttcgccgagaaaagacccttgctgggcgtgtgcaagtccattgggtctagcggaacttctccaccatactgttgcgtggatttatacagcctgcgaactggtgagatggttaagagtatccaattcaagacgcctatttacgatcttcattgtaacaaacgcatcctggtggtggtcttgcaagaaaagatcgccgcctttgattcctgcacattcaccaagaagtttttcgttacgtcctgttatccatgccccggtcctaacatgaatcccattgctctggggagccggtggctcgcctatgctgaaaacaagctgatccgctgccaccagtctagaggcggagcctgcggcgacaacatccagtcatatacggccactgtcatttccgcagccaagacactcaaatcagggctcactatggttgggaaagttgtaacacagctgaccggcacgttgcctagtggtgtgactgaagatgacgtggcgatccatagcaactctaggcgctcaccgctggttcccggcatcatcacagtgattgatactgagacggtcggggaaggccaggtactggttagcgaagatagcgactctgatggtatcgtcgcccattttcccgcgcatgaaaaacctgtatgttgcatggcttttaatacttcaggaatgctgctggtcaccaccgacacactgggccacgatttccacgtctttcagatactaacccatccctggagctcatcacagtgcgcggtgcaccatttatacaccctgcaccggggggaaacggaagctaaagtgcaggacatttgttttagccatgactgccggtgggttgtcgtcagcacgttacgcgggacatcccatgtatttcctattaatccctatggagggcaaccgtgcgtcagaacgcacatgagcccgagggtggtcaatcgcatgtctaggttccagaaaagcgccggtttggaggagatagagcaggaactcacttctaaacagggtggccgttgctcccccgtgcccggattgtcttcatcaccttctggctctcctctgcacgggaaactaaattcacaggatagttacaacaacttcacaaataataaccccggcaatcccagattgagtccccttccatcgctgatggttgtgatgccactggcccaaattaaacagcccatgacacttggaacaattactaaacgaacgggaaaggttaagcctcccccacaaatttcaccaagcaagagcatggggggggagttttgtgtcgctgcaatcttcggaacctcccggagttggtttgcgaacaatgccgggttgaagagggagaaggaccagagcaaacaagtggtagtggagtccttgtacataatttcctgttatggcacactggtggagcatatgatggagcctagacccctttccactgcccccaagatcagtgacgatacgccgctcgagatgatgacctccccacgggcttcctggacactggtccggactcctcagtggaatgaattgcaaccaccttttaatgccaatcatcccctgctgctagccgccgacgccgtgcagtactaccaatttttactagctggacttgtgccacctggctctcccggccctatcacccggcatggaagctatgattctctggcttctgaccattctgggcaggaagacgaagagtggctgtctcaggtggaaatagtcacccacacgggacctcaccggaggctgtggatgggacctcaattccagttcaaaaccattcatcccagcgggcagacgactgtcataagttcgagctccagtgtgctccagagccatggcccaagcgataccccccagccccttctggactttgacaccgacgatctcgatcttaactctctacgcatccagcccgtgcgctctgatcccgtcagtatgcctggatcaagtcgacccgtgtccgacagacggggcgttagcacagtcattgatgccgcgtccggaacctttgaccgttcggtcacactattagaagtttgtggaagctggcccgaaggattcggcctccgacacatgtcttctatggagcatactgaggaaggactgcgggagcgcctggccgacgccatggcggagtctccatccagagatgtggtgggctccgggaccgacactgccttagatgtggccgtgaaaacattcccgcctgagagacacgttgcagtcaagtgctttgaactgcagagggaagggtcgatcgagacactttctaatagcagcgggtcaacatccggcagcatcccccgtaacttcgacggctacagaagtcctctgcccacaaatgaatctcagccactgtcattatttccgaccggcttcccttag

SEQ ID NO: 25230 - DNA, 615 bp, synthetic construct
  source 1..615: mol_type = other DNA; note = Synthetic coding sequence
atggaggccgccggcagccccgccgccaccgagaccggcaagtacatcgcctctacacagcgccccgatgggacttggcgcaaacagcgcagagtcaaggagggatacgttcctcaagaggaagttcctgtttacgagaacaagtatgtgaaattcttcaagtccaaaccggagttacctccaggcctctctccggaggcgacagcccctgttaccccctccaggccagaagggggagagcctgggctgtcaaaaaccgccaaaagaaacctgaaacgtaaagagaagaggcgccagcagcaagagaaaggcgaggccgaggccttgtcccgcaccttagataaggtgtcccttgaagagacagcccaactgcccagcgccccgcagggctctagagcggcacccacagctgcctccgatcagcccgattccgcggctaccaccgagaaagctaagaaaatcaagaacttaaagaagaaacttcgtcaggtggaagagctgcagcagcggatccaagcaggagaagtctcacagccctcaaaagaacagttggagaagttagcacgccggagggctctggaggaggaacttgaagatttggagttgggactgtag

SEQ ID NO: 25231 - DNA, 663 bp, synthetic construct
  source 1..663: mol_type = other DNA; note = Synthetic coding sequence
atgagcagcggcaactaccagcagagcgaggccctgagcaagcccactttttcagaagagcaggccagtgccttggtcgaatctgtgtttggcctgaaagtcagcaaggtccgtcctttaccatcttacgatgaccaaaacttccacgtctacgtgagtaagactaaggacggtccaacagagtacgtccttaaaattagcaacactaaagccagcaaaaatccggacctcatcgaggttcagaatcacatcataatgttcctcaaggccgctggctttccgacagcctcagtctgccacacgaagggcgataatacagcctcgcttgtgagcgtagattcaggatcagagattaaatcttatctggtgcgtctgttgacatatctgccgggacgacctatcgcagagcttcctgtgtcccctcagctcctgtacgaaattgggaaattggctgccaaactggataaaactctgcagagattccaccatcccaagttaagcagtttgcaccgcgaaaacttcatatggaatcttaagaatgtccccttgctggagaaatacctctacgctctgggacaaaatcgcaatcgcgaaattgtcgagcacgtgattcacctctttaaggaagaggtcatgaccaagctgagccactttcgggagtag

SEQ ID NO: 25232 - DNA, 603 bp, synthetic construct
  source 1..603: mol_type = other DNA; note = Synthetic coding sequence
atgagcagcgacagcatggaccagccccggaacccctgcgagaacgaacctctcactcccggctaccacgggttccctgctagagacagtcaggggaaccaggaacctaccactacgccagacgcaatggtgcagcctttcacaaccatccccttcccaccaccacctcagaacggaattcctactgaatacggcgtcccccatacccaggactacgccggacagacaggagagcacaacctgacgctctatggcagcacgcaggcacatggggagcagtcctcaaactccccctcgactcaaaatggtagtctcacacaaactgaggggggagctcagacagacgggcagcagagccaaacacagtcttcggagaacagcgagtctaagtcgaccccaaagcgcctgcatgtgtccaacatccccttcaggtttcgggatccagatctgagacagatgttcgggcagtttggaaaaattctggacgtggagattatttttaacgagaggggctctaaagggttcggcttcgtgacttttgagaactcagcggacgccgatcgggccagagagaaacttcacggtacagtggtggagggctag

SEQ ID NO: 25233 - DNA, 387 bp, synthetic construct
  source 1..387: mol_type = other DNA; note = Synthetic coding sequence
atggcccccgccaagaagggcggcgagaagaagaagggccggagcgccattaacgaggtggtcacacgggagtacaccattaacatacacaagcggatccacggggtcgggttcaagaagcgcgcgcctagggccctcaaggagataagaaagttcgcgatgaaagaaatgggcactcccgatgtgagaatcgataccaggctcaacaaggccgtgtgggctaagggcatccgtaacgtgccatacagaattcgagtgcgattgagtcggaaacgaaatgaagacgaagattcacctaacaaattatatacgctcgttacatacgtgccagtgacaacattcaagataagcgttctgaactcagttaccgtggcaaagtctccctag

SEQ ID NO: 25234 - DNA, 393 bp, synthetic construct
  source 1..393: mol_type = other DNA; note = Synthetic coding sequence
atggcccccgccaagaagggcggcgagaagaagaagggccggagcgcaattaatgaggtggtgacccgcgaatatacaattaacattcataagcgaattcacggcgtcgggttcaaaaaacgggctccaagagcccttaaagaaattcggaagtttgctatgaaggaaatgggaacgccggacgtgcgcattgatacacgcctgaacaaagctgtttgggctaaaggcataaggaatgtaccttaccggatccgggttagacttagtcgcaaacggaatgaagacgaagatagcccaaataagctttatactcttgtgacttacgtgcccgttacaacatttaaaagcctccagaacgacgatctgttcaagaccgattgccatcatcagtag

SEQ ID NO: 25235 - DNA, 1524 bp, synthetic construct
  source 1..1524: mol_type = other DNA; note = Synthetic coding sequence
atgtggctgaccagctaccccagccccaacttccccgtgagcgtgctgcagaacggcgtgaaaatgaccaacgaagcccctaagggtcttcgcgcaaatatcattcgatcttacctgatggatcccatctcagatccagagttcttcggtagctgtaaaaaaccagaagaattcaagaaattgctatacggcctctgtttctttcatgcactggtacaggagcgtaggaagttcgggcctctcggctggaacatcccatacgaatttaatgaaacagatttgcgtattagtgtccagcaacttcatatgttcctgaatcagtacgaggaactgccctacgaggccttaaggtacatgaccggtgagtgcaattacggtggtcgcgtcactgacgattgggacaggcggacattaaggtcgatcctgaacaaatttttcaatccagagctcgtcgagaactctgactataaatttgacagcagcggaatatatttcgttccgccttctggtgaccacaaaagctacatcgagtatacaaaaacgctgccgcttactccagctccggaaattttcggcatgaacgctaacgccgacatcaccaaagatcagtcagaaacacagctcctctttgacaatattctgttgacacagagcagaagtgccggggccggggccaagagcagtgatgaggtggtgaacgaggtcgcctccgacattctcggaaaactgccgaataattttgacatcgaggccgcaatgcggaggtacccaaccacctacacccagtccatgaacacagtcctggtccaagagatgggccggtttaacaagctgttaaaaacaatcagagattcctgcgtgaacatacaaaaagctattaaagggctcgctgtgatgtcaacagaccttgaagaggtcgtcagttccattcttaacgtgaagatacctgaaatgtggatgggcaagagctatcccagtcttaagccactgggctcctatgtgaacgattttctggcacgcctcaaattcctgcagcagtggtacgaggtgggcccccccccggtgttttggctgtccggcttcttctttacacaggcatttctgacgggtgcccaacagaactacgctcgcaagtacactatcccaatcgatctccttggattcgattatgaggtaatggaggacaaagagtataaacatccacctgaggacggtgtgttcatacacgggcttttcctggatggagcctcgtggaaccgtaagatcaagaaactcgccgagtcccatccaaagatcctgtatgacacagtgcctgttatgtggctcaagccctgtaagagagcagatatccccaagcgaccgagctatgtcgctcctctgtacaagacaagtgagagacgaggggtgttatccaccactggccatagcaccaacttcgttatcgccatgactttgccatcggatcagcctaaagagcactggatcggtcgcggagtggccctgctctgtcagttaaactcctag

SEQ ID NO: 25236 - DNA, 1683 bp, synthetic construct
  source 1..1683: mol_type = other DNA; note = Synthetic coding sequence
atggccgccagcgccaagcggaagcaggaggagaagcacctgaagatgttaagggatatgaccggcctccctcacaaccggaagtgttttgattgtgatcagaggggaccaacatatgtcaacatgaccgtgggatcattcgtttgcacctcctgtagtggatctttaagaggccttaatccccctcacagagttaagagcatctcaatgactacattcactcagcaggagatcgaattcctgcagaagcatggcaatgaagtatgcaagcaaatctggcttggacttttcgatgaccggagttccgcgataccagacttcagagacccccaaaaggtcaaagagtttcttcaggagaagtatgagaagaaacgctggtacgtgccacctgagcaggcgaaggtggtggcaagcgtgcacgcctccatctctgggtctagcgcgtcttccacatccagcactccagaggtcaaacctctgaagagtctgctgggggactccgcgcccacccttcatctgaataagggcaccccaagtcagtcaccggtggtcggcaggagtcaaggccaacagcaggagaagaagcagtttgacctgttgtctgatctgggttctgacatttttgccgcgccagcaccacaaagcacagcaaccgctaattttgccaattttgcccacttcaattcccacgcagcacagaactccgcaaacgctgatttcgctaactttgatgcttttggccagtccagtggctcgtccaacttcggaggtttcccaaccgctagccattctcccttccagcctcaaacaacaggagggtctgccgcttctgtgaacgcgaatttcgctcacttcgacaacttccccaagtcatcctctgctgatttcggaacattcaacaccagccagtctcaccagactgcaagcgccgtgtccaaggtcagtacaaataaggcgggactgcagacagcagacaagtatgcggcattagccaatctggataacatctttagcgctggtcaaggaggtgatcagggtagtgggttcggcacgacaggaaaagcacctgttggctcagtggtgtctgtgcctagccagagtagcgccagcagcgacaaatacgccgccttagctgagctggacagcgttttcagctccgccgccacctcctctaacgcctatacaagcacctcaaacgcttcatccaacgtgttcgggacggtgccagtagtggcctcagctcagacgcagcctgcctcctccagcgtacccgcaccctttggggctacccccagtactaacccatttgtggcggctgctggtcccagcgtggcatccagcaccaatccattccagacaaatgccaggggagccaccgcagccaccttcgggacggccagcatgagcatgcctactgggtttggtactccggccccttattccctgccaacttcgttcagtggtagcttccaacaaccagcattcccggctcaagctgcattccctcagcagactgcctttagccagcaacccaacggcttcgctgctttcggacagacaaagcctgttgtcactcctttcggacaggtagctgccgcgggcgtgtcttcaaacccattcatgacaggggcccctactggccaatttccaactgggtcctcctcgactaacccatttctctag

SEQ ID NO: 25237 - DNA, 2403 bp, synthetic construct
  source 1..2403: mol_type = other DNA; note = Synthetic coding sequence
atgagcagcctgggcgccagcttcgtgcagatcaagttcgacgacctgcagtttttcgaaaattgcggagggggatccttcggttcagtatatcgggccaaatggatctctcaggacaaggaagtcgctgttaaaaaattgcttaagattgagaaggaagccgaaattctgtccgtgctttcgcatcggaacattatacagttttatggagtaatattggagcctccaaattacggcatcgtgacagagtatgctagcctaggaagcttgtacgattatatcaacagtaacagaagtgaagaaatggatatggatcacattatgacctgggccacagatgtggccaagggcatgcactaccttcacatggaggctcctgttaaagtgatccatcgggacctgaagtcacggaatgtcgtcatcgctgctgacggtgtgctcaagatttgcgattttggagccagtaggttccacaatcacaccacccacatgagcctggtaggcacttttccctggatggcaccggaggtgattcagagtctgcctgttagcgagacttgtgacacctattcctatggcgtcgtgctgtgggagatgctaactcgggaagtgccttttaaaggccttgaaggcctacaggttgcctggttagttgtcgagaaaaacgagcgtctcactattccaagctcttgccccagaagcttcgccgagttgctccatcagtgctgggaggccgacgccaagaaacgcccctcctttaagcagatcatttcgatcttggagagtatgagtaacgataccagcctaccagacaaatgcaattcgttcctccacaacaaggccgaatggcgatgtgaaattgaagccaccctcgagcggctgaagaaactagagagggatctgtccttcaaagagcaggagttaaaggagcgagagcgccgcctcaagatgtgggagcagaagttgaccgaacaaagtaatacacctctgctccccagtttcgaaatcggagcatggaccgaagatgacgtgtactgctgggtgcagcagctcgtcaggaaaggagattcctccgcagagatgagcgtgtatgctagcttgttcaaagaaaacaatatcacaggaaaacgactgttgctgctggaggaggaagatctgaaggacatgggcatcgtttctaagggccacataattcacttcaagagtgccatcgagaagctgacgcatgattatatcaacctgttccattttcccccgctcattaaggactccggtggagaacccgaagagaatgaagaaaaaatcgtcaacttggaacttgtattcggattccatctgaagcccggtacagggccacaagactgcaagtggaaaatgtatatggaaatggacggcgatgagatcgcaattacctacatcaaagacgtgacatttaacactaacctgccggacgcagagatccttaaaatgactaaacctcctttcgtgatggaaaaatggatcgtgggaatcgcaaaaagtcagacagtagagtgtacagttacttatgaatcggatgtgcggactcctaaaagcaccaaacacgtgcactcaatacaatggtctagaacaaagcctcaagatgaagtcaaggccgtgcagttggctatccagaccctgttcacaaacagtgatgggaaccccggcagcagaagtgatagcagtgcagattgccagtggttggacacccttaggatgcggcaaatagcttctaatacctcattgcagagatcacagtccaacccaattctggggagtccattcttctcacatttcgatggccaggactcatatgcggcagctgtaagaaggccacaagtgccaatcaagtaccagcagatcacgccggtcaaccagtccaggtctagctcccctacgcaatatggtctgactaaaaacttttctagtctgcatctcaattcgagagattcaggattcagtagtggaaacacggacacctccagcgagagaggccgctattccgaccgaagccgaaataagtacgggagggggtctatttccctcaactcttcgccccgcggaaggtattctgggaagtcccaacacagcacaccgtcccggggtcgttatcctggaaaattctaccgcgtttctcagtcagccctgaaccctcatcagtcccctgactttaagaggagcccccgggatctccatcaaccaaacactatccccggcatgccgctgcatccggaaactgacagtagggcaagcgaagaagattctaaagtgtccgaaggcggctggacaaaggtggagtatcgcaagaagccccatcggccgagcccagcgaaaaccaataaagaaagggctaggggggatcaccggggctggaggaacttctag

SEQ ID NO: 25238 - DNA, 144 bp, synthetic construct
  source 1..144: mol_type = other DNA; note = Synthetic coding sequence
atggacgaccagcaggccctgaacagcatcatgcaggacctggccgtactccacaaggcttcccgccccgccctgagcctccaggaaacaaggaaagccaagtccagctctccaaagaaacagaatgacgtgagggtaaagtag

SEQ ID NO: 25239 - DNA, 1272 bp, synthetic construct
  source 1..1272: mol_type = other DNA; note = Synthetic coding sequence
atggtgagcttcatgaacaaccagaagcagcagaagcccaccctgtccggccagagattcaagacacgtaaacgtgatgaaaaggagaggtttgatcctacacaattccaggattgcatcatccaaggtttgaccgagacaggcacggatcttgaggcagtagccaaattccttgacgcctctggcgcgaaacttgattaccgcagatatgccgagactttatttgacatactggtcgccggtggcatgttggcccccggcggcacactggccgatgatatgatgcgcactgatgtctgcgttttcgcggcccaggaggaccttgaaacgatgcaagctttcgcccaggtgtttaacaaattaataaggcgctacaagtacctggaaaagggctttgaggacgaagttaagaagctcttgctctttctcaaaggatttagcgaaagtgaaagaaataaactggccatgcttacaggtgttctgctggctaatgggaccctgaacgcctcaatactgaattccctgtataatgaaaatctcgtgaaggaaggtgtttctgctgcttttgccgtgaaactgtttaagtcctggatcaatgaaaaagacattaacgccgttgccgctagcctgcgaaaggtatccatggacaaccggctgatggagctgttccccgctaataagcagtcggtcgaacacttcaccaagtactttactgaggcgggattaaaagaactgtccgagtatgtgcgaaatcaacagaccatcggagctagaaaagagctccagaaagagttacaggaacagatgagccggggcgatccatttaaggatattattttatatgtgaaagaagaaatgaagaagaacaatatacccgaacccgtggtgattggtattgtatggtctagcgtcatgtctacggtcgaatggaataaaaaggaggagctcgtggccgagcaggctatcaaacacctgaaacagtactcacccctgctggcggcttttaccactcagggccaatctgaacttacactccttcttaagatccaggagtattgctacgacaatatccacttcatgaaagctttccagaagattgtggtcttgttttataaagcagaagttctgtcagaggaaccaatcctgaagtggtacaaggacgctcacgtcgccaagggcaaatccgtatttttggagcagatgaaaaagttcgtcgaatggttgaagaacgctgaggaagagtcggagtcggaagcggaagaaggagactag

SEQ ID NO: 25240 - DNA, 1119 bp, synthetic construct
  source 1..1119: mol_type = other DNA; note = Synthetic coding sequence
atgagccggcggcggttcgactgccggagcatcagcggcctgctgactaccacacctcagataccgataaaaatggagaatttcaacaatttttacatcctgactagcaaagagctggggcgcgggaaatttgccgtcgttagacaatgtattagcaaaagcactggacaagaatatgcagctaaattcttgaaaaaaaggagaagaggacaggactgtagggcagaaatcctccacgaaatcgctgtcctggagctggccaagagctgtcccagagtcattaacctgcacgaggtttacgaaaacactagcgagatcattttgattttggagtatgcagcaggtggtgaaatattttcactgtgccttccagagctcgcagagatggtgagtgagaacgatgtgataagactcattaagcagatcctcgagggagtgtattatctgcaccagaacaacattgtacacctggatctcaagccccagaacatactactttcgagcatctatcccctcggcgacataaaaatcgtggattttggaatgtccagaaaaatcggccatgcctgcgaactgagagaaatcatgggaacacctgagtatttggcaccagaaattcttaactacgacccgatcacaaccgcaaccgacatgtggaatatcggcattattgcttatatgctgctaacccacacatcaccatttgtgggagaggataaccaagaaacctacttaaatatctcacaggtcaacgttgattatagcgaagaaaccttttcctccgtgtcccaactggcaacagactttatccagtccctcctggtgaaaaatcccgagaagcgccctaccgccgagatttgcttgagccacagctggctgcaacagtgggactttgagaatctctttcaccccgaggagacatcctcaagttcccagacacaggaccacagcgtgcgatcctctgaggataagacctccaaaagttcatgcaacgggacgtgcggcgatagggaagacaaagaaaacatccctgaggactctagcatggtgagcaagaggttccggtttgacgacagcctgccaaaccctcacgaactggtgtctgacctgctctgttag

SEQ ID NO: 25241 - DNA, 912 bp, synthetic construct
  source 1..912: mol_type = other DNA; note = Synthetic coding sequence
atgatggacgtgagcggcgtgggcttccccagcaaggtgccctggaaaaaaatgagcgccgaagaactcgagaatcagtattgcccttcccgctgggtggttcgcctcggggccgaggaggctctgaggacctattcacagattggcatcgaggcaaccacgagagctcgagccacccggaagtctctgctccacgttccatacggagacggcgagggggagaaagttgatatatattttcctgacgaatcctccgaggctctgccctttttcctgttttttcacggtggctactggcagtcgggctcaaaggacgagtctgctttcatggtccatcctttaacagcccaaggagtggctgttgtaatcgttgcgtacgggattgcccccaaaggcactctggaccatatggtcgatcaagtgactcgatccgtggccttcgtccagaagagatatccaagcaacaagggaatttacctgtgtggacactctgctggagcccatctcgctgccatgatgttgctcgccgattggacaaagcatggagtgacaccaaatctgcggggcttctttctggtgtccggtgtctttgatctggaaccaatcgtctacactagtcagaacgtcgctctgcagctgacactcgaagacgcccaacgcaactcgccccaactgaaagtagcccaagcccagccagttgacccaacatgccgcgtcctagtggtggtgggccagtttgactcacccgagttccaccgccagagctgggagttctaccaaaccctctgccagggtgaatggaaggcatctttcgaggaactccacgatgtcgaccattttgaaatcgtcgaaaacctgacacagaaggataacgtcctaacccagattatcctgaagacaattttccaatag

SEQ ID NO: 25242 - DNA, 684 bp, synthetic construct
  source 1..684: mol_type = other DNA; note = Synthetic coding sequence
atggccctgcacgacatggaggacttcaccttcgacggcaccaagaggcttagtgtgaattacgtgaaggggatccttcagcctaccgacacctgcgatatctgggataaaatctggaattttcaggcaaaacccgatgacctgctgatctcaacataccctaaggccgggacgacatggacacaggagatcgttgaacttatccagaacgagggggacgtggaaaagtctaagagggcccccacacatcagaggtttccttttctagagatgaagatcccttcccttggcagcgtttgctgggggtcctggcacgagcacgtgaaaggatggtgggaggccaaggacaagcatagaattctgtacctgttttacgaggatatgaagaaaaatccaaagcatgagatccagaaactggccgagttcatcggtaaaaagctggacgacaaggtgttagataagatcgttcattatacatctttcgatgtgatgaagcagaatcctatggctaactatagctctatacccgccgaaatcatggaccatagcatttcccctttcatgcgaaagggcgctgtaggcgattggaagaaacacttcacggtagcacagaacgagcgcttcgacgaagactataagaagaaaatgaccgatacaaggttgaccttccatttccagttctag

SEQ ID NO: 25243 - DNA, 366 bp, synthetic construct
  source 1..366: mol_type = other DNA; note = Synthetic coding sequence
atggcccccgccaagaagggcggcgagaagaagaagggccggagcgcgattaacgaagttgtaacacgcgagtataccatcaatatccataaaaggatccacggtgtgggatttaagaaacgcgctccacgcgcgctgaaggagatacggaagtttgccatgaaagaaatgggaacccccgacgtgaggattgacactcgactcaataaagccgtgtgggcgaagggaatcaggaacgtcccttataggatacgagtgagactgtcgaggaagaggaacgaagacgaagactctcctaacaagctctacaccttggtcacctacgtccccgtgactacctttaagagcaagttttccataccctag

SEQ ID NO: 25244 - DNA, 267 bp, synthetic construct
  source 1..267: mol_type = other DNA; note = Synthetic coding sequence
ctgagcttccgggccgacagcgcccacgccagcatggtgaacgtgcctaaaactcggcgaaccttctgtaaaaaatgcgggaagcaccaaccgcataaggtaacgcagtacaaaaagggtaaggattctctgtacgctcaagggaagcggaggtacgataggaaacagtctggatatgggggacagacgaagcccattttcagaaagaagcttcaccagaactgtattgaaccaaatctgcctcccagagcccagcaaagtccttag

SEQ ID NO: 25245 - DNA, 582 bp, synthetic construct
  source 1..582: mol_type = other DNA; note = Synthetic coding sequence
atggacagcaccctggccgtgcagcagtacatccagcagaacatccgcgcagactgtagcaatattgacaagatactggaacccccggaaggccaggatgagggagtgtggaagtacgagcacttgcggcagttttgtcttgagctgaacggcttggctgtaaaactgcagtcagaatgtcatccagacacctgcacccaaatgacagccactgagcagtggatttttttgtgcgcagcacacaagactcccaaggaatgtcccgcaatcgattatacacggcataccctggacggggccgcatgcctgctgaactctaacaagtattttccatcccgcgtgtctattaaggagtctagcgttgccaaattggggagcgtctgcaggcggatttacaggattttctcccacgcctattttcaccataggcaaatatttgatgagtatgagaacgagacttttctgtgtcaccggttcacaaagtttgttatgaagtataacttgatgagcaaagacaaccttatcgtacccatcctcgaagaggaagtccaaaacagtgtctcaggtgagtctgaagcatag

SEQ ID NO: 25246 - DNA, 4137 bp, synthetic construct
  source 1..4137: mol_type = other DNA; note = Synthetic coding sequence
atgagcctggagcgggagctgcggcagctgagcaaggccaaggccaaggcgcaacgcgcagggcaaaggagagaggaagctgcactgtgccaccagcttggggagctacttgctggccatggacgttacgcagaagctctcgagcaacactggcaggagctgcagctgcgggaacgggctgatgaccctctgggctgtgccgtggcacacagaaagatcggggaacgcctggcggagatggaagattatcccgctgctcttcagcaccagcatcagtacctcgagcttgcccactccctgcgtaaccataccgaactacagcgggcatgggccaccatcggcaggactcacctggacatttatgatcactgccaatccagggacgcgcttctgcaggcccaagccgctttcgagaaatcattggcgatcgtggatgaagagctggagggcacactggcacaaggggagttgaacgaaatgaggactaggctgtatctcaacctgggcctgacctttgaatcacttcagcagacagccttatgcaacgattacttccgcaagagcatatttttggctgaacagaaccatctgtacgaagacttgttcagggccagatacaatttaggaactatccactggcgcgctggacagcatagtcaggccatgaggtgtttggagggcgctcgcgagtgtgcccacaccatgaggaagagattcatggagtcagaatgttgtgtagtgattgctcaggtgttgcaggatctgggtgactttctggccgcaaagcgagctctgaaaaaggcctaccgcctggggtcacaaaagcctgtgcagcgcgccgccatatgtcagaacctgcaacacgtcctggccgtggtgcggctccagcagcaactagaagaggcagaaggaagggatccccagggggccatggtaatttgcgagcagctgggcgatctgttctcaaaagccggcgacttccctcgcgctgcggaggcctaccagaaacagcttcggttcgctgagctgttggaccgccccggagctgaaagggccatcattcatgtctctctagcgaccacgctgggcgacatgaaggatcaccacggggccgtcagacattacgaagaagagctgaggttacgctcaggcaatgtgctcgaagaggcaaaaacctggttaaacatcgccctctccagggaggaggcaggtgacgcatacgagctactcgccccctgtttccagaaggccctctcttgcgcacagcaagcccagcggcctcagttgcagcggcaggtcctgcagcatctgcacaccgttcagctgagacttcaacctcaggaggctcccgaaacagaaacgagactgcgtgaactgtcagtggccgaggacgaggacgaagaggaggaggctgaggaggctgccgcaacggctgagtccgaggccctcgaagctggcgaagttgagctttctgagggcgaggacgacacagacggactcacaccgcaactggaggaggacgaagaattgcagggtcatttaggccgacgcaaggggtccaagtggaaccgcaggaatgacatgggtgaaaccctgcttcaccgagcctgtattgagggacagttgaggcgggtgcaggatcttgtgaggcagggtcacccactcaatcctagggattactgcggctggacaccattacacgaagcctgcaattatggccacctggagattgtgagattccttttggaccacggcgcggctgttgacgaccctggaggccaggggtgcgaggggattacaccactgcacgacgctctgaattgcgggcacttcgaagtggctgaactgctgctggaacgtggagctagcgtgacgcttagaacacggaaaggtctgtctcctttggaaacgctacagcaatgggtaaagctctatagacgcgatctcgatttagaaacaagacagaaagctcgggctatggaaatgctcctccaagcggcggcttccgggcaggatccccactcgtcgcaagccttccacactccttcctctctgctgttcgatcccgaaaccagcccaccactgagtccctgccctgagccccccagcaattcgaccaggctaccagaggcgtcacaggcccacgttcgcgtgagtccaggccaggccgcaccagccatggccaggccacgtcgatctaggcacgggccagccagctccagcagctcttcggaaggagaggactcggccgggcccgcccggccatctcagaagagaccaaggtgctcagccaccgcacagagagttgccgcctggaccccaggcccagcctctaaccgggaggccgccacagcctctacgagtagggccgcataccaggcagccatcaggggagtggggtccgcccaatcccggcttggtcccggacctccaagaggtcactctaaggccttggccccccaggccgccctcatacctgaggaggagtgcctcgctggtgactggctagaactcgacatgccactgacacgcagcaggcgaccccgcccgcgcggcacgggcgacaacagaaggccctcgtctacctccggaagcgattctgaagaatctagacccagggcccgggccaagcaggttcgtttgacttgtatgcagagttgcagcgcccctgtgaatgccggtcctagcagcctggcaagcgaacccccaggatccccatctaccccaagagttagcgaacccagcggagacagtagcgccgctggccagcccctgggccctgcaccacccccccccattcgggttcgcgtccaggttcaagatcatctttttctcatcccagtgccccactcgagtgatacacactccgtggcctggctggctgagcaggccgcgcaaaggtattaccagacatgtggactgttaccccgtctgaccctgcgcaaagagggcgctctgctagctcctcaggacctgatcccagacgtgcttcaaagcaatgatgaggtgctggccgaggttacatcatgggacttgcctccccttacagaccgataccgtagggcctgtcaatcgttggggcagggagagcaccagcaggtcttacaagcggttgagttacaaggactaggtctgagtttctcagcatgcagcttggctttggaccaggcacagctcaccccattattgagagcactcaaactacacacagctctccgcgagctcaggctggccggaaatcgcctcggggataagtgcgtggcagaattagtggctgctcttggcaccatgccaagccttgcgttgctcgatctgtcatccaatcatctgggaccggagggtctaaggcagttggccatgggactgcccggccaggccacgctccagtccctcgaagagctggatctaagtatgaatcctctcggagacggatgtggacagtctctggccagcttgctccacgcttgccctctcctctcaaccttgcgcctgcaggcctgcggtttcgggccgtcattcttcttgagtcaccagactgcccttggatccgccttccaggacgcggagcatctgaagacactctccctatcatataacgccctcggtgctccggcgcttgctcgcaccctccaaagtcttcctgccggaacgctgctccacctggaactctcgtcggtcgctgctggaaaaggcgattccgacctgatggagcccgtatttagatatctggcaaaagaaggttgtgctctcgcccacctcacactctccgcaaatcatctgggtgataaagcggtgagagatctgtgccgctgcctgagtttatgcccctcactgatatccttagacctgtctgctaaccctgagattagctgcgcttcccttgaggagctcttaagcacccttcagaagcgacctcagggtctttcattcctcgggttgtccggctgcgccgtccaaggtccactcgggctcgggctttgggataagatagcagcccagctgagggaactgcagctgtgttctcggcgcctgtgcgccgaagaccgggacgccctgcgacagcttcagcctagcaggccggggcccggggaatgcacactcgatcacggttctaagctcttttttcgtcgcctctag

SEQ ID NO: 25247 - DNA, 1218 bp, synthetic construct
  source 1..1218: mol_type = other DNA; note = Synthetic coding sequence
atgaactaccagcagcagctggccaacagcgccgccatccgggccgaaatacagagattcgagagcgtgcaccccaacatctatagcatctatgaattgctggagcgggtcgaagaacctgttcttcaaaaccagattcgggaacatgtaatcgccattgaggacgcctttgtgaactcccaggaatggactctttcgcgcagtgtgcccgaactcaaggtcgggatcgtcgggaatcttgcatctggtaagtctgccctggtacacaggtatctaactgggacgtatgtgcaggaagagagtcctgaggggggtcggtttaagaaagagatagtagttgacggtcagtcctatcttttattgattagggacgaaggcggtccgcccgaagctcaattcgcgatgtgggtagatgccgtgatctttgtattttcattggaggacgagatttcatttcaaacagtttatcattattattctaggatggccaactaccgcaatacttcagaaattccactggtgttggtaggcacacaggacgctatttcaagtgcgaatccacgcgtgatcgatgatgctagggctcggaagttgagtaacgacctcaaaaggtgtacttattacgaaacttgcgctacatatggcttaaacgtagaacgcgttttccaggacgtagcccagaagattgtcgcaacacgtaaaaagcagcagctgtccattggcccctgcaaatctctgcccaactccccctcacactcctccgtatgttcagcacaagtgagcgcagtccatatatcacagaccagtaacggaggcggatccctctcggattatagctccagcgtgccttccaccccctcaacaagccaaaaagaactccggatcgatgtcccacccacagccaacacacccacccccgttagaaagcagagcaaacgacgtagtaatctgtttactagcaggaaagggagtgaccctgacaaggaaaagaaggggctagagtcccgagctgactctatcgggtcaggcagggcaattcctattaaacagggcctgccgttcttcgtgctcgcgctgaccgcatccacttacctgcgccccgcaggagcgagggcccgacaatctagcccttggccaggcccgagaggcggccagacttccccccactgcgctgaaggtcctcagtccgctcagctgtcaggggccatgatgaactag

SEQ ID NO: 25248 - DNA, 1245 bp, synthetic construct
  source 1..1245: mol_type = other DNA; note = Synthetic coding sequence
atggccgccgccccccccagctactgcttcgtggccttcccccccagggccaaagacggccttgtggtctttgggaagaattctgcaaggccaagggacgaggttcaggaagtagtgtacttctcggccgctgatcatgaacctgaatctaaggtggaatgcacgtatattagcatcgaccaggtgccccgaacctatgccatcatgatctcccggccggcatggctgtggggggccgagatgggggccaacgagcatggcgtttgcatcgcgaatgaggccattaatactcgggagccagcagcagagatagaggccttgctgggtatggacctagtgaggctcgggttagagcgtggagagacagctaaagaggcgctagacgtgattgtttcactgctagaagaacatggacaggggggaaattacttcgaagacgccaactcttgccattcttttcagtctgcgtacctcatagtggacagggacgaggcctgggttctcgaaactatcgggaagtattgggccgcagaaaaggtgaccgagggtgtaaggtgcatatgtagtcaactctccctgactacaaaaatggatgcggaacacccagagcttcggtcatacgcacagtctcaaggatggtggactggagagggggagttcaatttcagcgaggtgttttctcccgttgaggatcacctagattgcggtgctggcaaggacagtctggaaaagcaagaggaaagcataactgtgcagaccatgatgaatacgttgagagataaggcgagcggcgtctgcatcgactctgaattctttctgaccacagcttccggagtgtctgtcctgccgcagaatcgaagcagcccttgcatccactactttaccggcacccctgacccatcccggagcatatttaagcccttcatttttgttgatgatgttaagttggtgcctaagacacagtctccctgctttggtgacgacgacccggcaaaaaaagaacctcggttccaggaaaaaccggatcggcgtcacgagctatacaaagcgcacgaatgggccagggctatcattgagtccgatcaggaacaggggcgaaaactcagatccacaatgttggaactggagaagcaagggctcgaggccatggaggagatcctaacttcaagcgagccactggatcccgctgaagttggtgatttgttctacgattgtgtggacacggaaatcaagttcttcaagtag

SEQ ID NO: 25249 - DNA, 645 bp, synthetic construct
  source 1..645: mol_type = other DNA; note = Synthetic coding sequence
atgggccccctgccccggaccgtggagctgttctacgacgtgctgtcgccgtattcgtggctcggcttcgaaatcctgtgccgttatcagaacatctggaatattaacctccagcttagaccaagcctgattactggtataatgaaagactctgggaataagccaccaggcctgctcccacgcaagggactgtacatggcaaatgacctaaagcttctccgccatcatctccaaatacccattcattttccgaaggatttcctttcagtgatgctggagaaaggctccttgtcagctatgcgctttctgactgccgtgaacctggagcaccccgaaatgctggaaaaggcctctagagaactgtggatgagggtgtggtcaagggctgccgagaaagctgggatgtcagcagaacaggcgcagggattgttggagaaaatcgctacaccaaaggtgaaaaaccagttgaaggagaccacagaggccgcctgtaggtacggcgcttttgggcttccaataacagttgctcacgttgatggtcagactcatatgctgttcggctcagatcgcatggaactattggcacatctattgggcgaaaaatggatgggtcctatccctcctgccgtgaacgccaggctttag

SEQ ID NO: 25250 - DNA, 4206 bp, synthetic construct
  source 1..4206: mol_type = other DNA; note = Synthetic coding sequence
atggccgacaccgacctgttcatggagtgcgaggaggaggagctggagccgtggcagaaaatatccgacgtgattgaagatagcgtggtcgaggattataacagcgttgacaagaccactaccgtctcagtatctcaacagccggtcagcgctcctgtgcccatcgctgcccacgctagcgtcgccgggcatcttagcacttctaccacagtaagcagctcaggcgctcagaacagcgattcaaccaagaagactttggtgacacttatcgctaataataacgccggaaaccccctggttcagcaagggggccagccactcatcctgactcagaatccagcccccggcttgggaacaatggtcacccagcctgtgctccggcctgtgcaggtgatgcaaaacgctaaccatgttacatcctcacccgtggcttcccagcctatattcatcactacccaaggctttcctgtgcggaatgtaaggccggtgcaaaatgcaatgaatcaggtcggtatagttttgaacgtccagcagggtcaaacagttagacccataaccctcgttccagctcccgggacccaattcgtcaagcctacagtaggcgtaccacaggtgttctcccagatgactccagtgcggcccggaagtaccatgcccgtccggccaacgactaatacctttaccacagtgatacctgcaacactaactatcagatcgacagtccctcagagtcagtcccagcaaacgaaatcaaccccgtccacatcaacaacccccactgcgactcagcctacgtctctcgggcaattagccgttcagtcgcctggtcagagtaatcaaaccacaaatcccaagctggtttcaatcgcttcatttgtcacggtcaaacggccgggggtgaccggtgaaaactcaaatgaagtagcaaagctggtgaatactctgaacaccataccatcattagggcagtctccaggtcctgtggttgtgtctaataactcttccgctcacggttcccaacggacttccggccccgaatcaagtatgaaggtaacctcaagcatccctgtcttcgatttgcaggacgggggtcgcaaaatctgcccgcgatgtaacgcgcagtttagagttaccgaggccctccgaggccatatgtgctactgttgccccgagatggtggaatatcagaagaagggaaagtctttggattctgaaccatctgtgcccagtgccgcaaaacctccaagcccagagaaaactgctcccgtggcttccaccccatccagcacccccattcctgccctgtctccccccactaaagtccctgagccaaacgaaaacgtcggagacgctgtgcaaaccaagctgattatgctggtcgacgatttctattatgggagggatggcggaaaagtagcccaactaacgaatttcccaaaggtggccacatctttccgatgcccacactgtacaaaaagactgaagaataacatacgtttcatgaaccatatgaagcaccatgtggagttggaccagcagaacggcgaggtggatggtcatactatttgccaacactgttaccggcagtttagcacacctttccagctgcagtgccacttggagaacgtgcactcaccttacgaatctacaaccaagtgtaagatctgcgaatgggccttcgagagtgaacctctgtttctccaacacatgaaggacacccacaagccaggggaaatgccttatgtatgccaggtctgtcagtaccggtcttccttgtactcggaagtggatgttcacttcaggatgatccatgaagacacacgccatctactatgcccgtattgcctcaaagtttttaaaaacggaaacgcctttcagcagcactatatgagacaccagaagaggaatgtgtaccactgtaataagtgccgcttgcagttcttgtttgctaaagacaagattgagcataaactccagcatcataaaaccttcaggaaacccaaacagcttgagggacttaaacctggaacgaaggtgaccatacgggccagtcgaggtcagcctagaacagtgcctgtatcatccaacgacactccgcctagcgcccttcaggaggccgcccccctcacgagtagcatggacccacttccagtcttcctgtaccctcctgtccaacgctcaatccagaagagagcggtgagaaagatgtccgtgatggggcgacaaacttgtctagagtgttccttcgagatccccgatttccctaatcacttccccacgtacgtgcactgttctctatgtaggtatagcacctgctgtagtagggcttacgcaaaccatatgatcaacaaccacgtgccacgtaagtctccaaagtacctggccctatttaaaaatagcgtttctggaattaagcttgcctgcacctcctgtacatttgtgacctctgtgggggacgccatggcaaaacatctggtgttcaaccctagtcaccgcagttcttctatcctgcctcgcgggttgacatggatagctcactcacgacacgggcagacgagagaccgggtccacgataggaatgttaagaatatgtatcccccacctagtttccctacgaacaaggccgctaccgtaaaatctgccggcgccactcccgcagaacccgaggaattactaaccccgctggcccctgccttgccgtccccagctagcacagccactccccctcctacgccgacccaccctcaggctctagctctgcctcccctggccaccgagggcgcagagtgcctgaatgtcgacgatcaggatgaggggtcgccagtgacccaagaacctgaactagcaagcggcggaggagggagcggcggggtgggtaaaaaggagcaactgtccgtgaagaaacttcgtgtcgtgctttttgctctgtgctgtaatacagagcaggcagccgaacatttccgcaatccccagaggcgaattcggcggtggctgaggcggttccaggcatcccagggcgaaaacctggagggaaaatacctatccttcgaagctgaggaaaagctcgccgagtgggtactaacccagcgcgaacagcagctccctgtcaatgaggagactctgttccagaaggcaactaagattggtcggagcctcgaggggggatttaagatatcctatgaatgggccgtgcgatttatgctgaggcatcacctcacacctcacgcgcgccgtgctgtcgctcataccctgcctaaggatgtcgctgagaatgctgggctctttatagatttcgtgcagaggcagatccataatcaggatctcccattgtccatgatcgtggccatagacgaaatttcattgttcctggacaccgaggtcttgagttctgatgacagaaaggagaacgccttacagactgtcggtactggggagccgtggtgcgacgtggtcctggccattttagccgatggtacggtgctccctacacttgtcttctacagagggcagatggatcaacccgccaatatgcccgattccattctcttggaagcgaaagaaagtggctatagcgatgacgaaattatggaactttggtctacgcgggtttggcagaaacatacagcttgtcagaggagcaagggtatgctggtgatggattgtcatagaacccacctgtccgaggaagtgctcgccatgctgtccgcttcgtctactttacccgccgtagtgcctgccggctgcagtagtaagattcagcctttagacgtgtgtatcaaacgtactgtgaaaaatttcctgcacaaaaagtggaaggagcaggcccgcgagatggccgatactgcctgtgactcagacgtgttgctccagcttgtgcttgtctggcttggtgaggtattgggtgtgatcggggactgcccagagcttgtgcaaaggagctttctagtcgctagcgtgttgcccggacccgacggaaacattaactcgcctacacgcaatgcagacatgcaggaggagcttatcgcaagccttgaagaacaactgaagctctctggtgaacactctgagtcatcaacaccccgccctcgatcctcccctgaggaaactatcgagcccgaatctctgcaccagctgttcgagggcgaatcagagaccgagtccttctatggctttgaagaggccgatctcgacctgatggagatctag

SEQ ID NO: 25251 - DNA, 1398 bp, synthetic construct
  source 1..1398: mol_type = other DNA; note = Synthetic coding sequence
atggagcccagcagcctggagctgcccgccgacaccgtgcagcggatagcggccgagctgaaatgtcaccccacagatgagagggttgccttgcatctggacgaagaggacaaacttcgccactttcgagaatgtttttatatcccaaaaatacaggatctgccacctgttgacctatcgctggtgaataaagatgagaatgccatttatttccttggcaactcgctggggctgcagcctaagatggtaaagacctatctcgaggaggagcttgataagtgggccaagatcgctgcttacggccatgaggtcgggaagcggccctggatcaccggtgatgagagcatcgtgggtctgatgaaggatatagtgggcgctaacgagaaggaaatcgccctgatgaatgcactgacagtgaacctgcacctactcatgctgagcttctttaaaccaacccccaaacgctacaagatcttgctggaagcgaaagcatttccaagcgatcactacgcaatcgagagtcagcttcagctccatggactcaatatcgaagagtcaatgagaatgataaagccgcgggagggggaggaaacactccgtatcgaagatattctagaagtgatcgagaaggaaggggacagtatagcggtcattctctttagtggcgtccatttttacacaggacaacacttcaatatcccggctatcacaaaagccggtcaggcaaagggctgttacgttggttttgatttagctcacgcggtgggcaatgttgagttatacctgcacgattggggggtagatttcgcttgttggtgctcctacaagtacctcaacgcaggtgctggtggaattgccggggcctttatccatgagaagcacgcccacacaattaaacctgccttagtggggtggttcgggcatgaactcagtacaagattcaagatggacaataaactccaactgattcctggggtctgtggcttccgtatttctaatccccctatccttcttgtatgttccctacacgcatctcttgagattttcaagcaggctaccatgaaagccctacggaagaagtcagtcctgctgactggctacctggagtatctgatcaagcacaattatggcaaagataaggcagcaaccaaaaaacccgttgtgaacattatcaccccatctcatgtcgaagaaaggggctgccaattgaccatcacattcagtgtccccaacaaggatgtgttccaggagttggagaaaagaggcgtggtgtgtgataaacggaacccaaatgggatccgggtggcccccgttcccctgtacaactccttccacgatgtatataagttcacgaacctcttgacctcaatcctggattccgccgaaacaaagaattag

SEQ ID NO: 25252 - DNA, 3210 bp, synthetic construct
  source 1..3210: mol_type = other DNA; note = Synthetic coding sequence
atgtacctgctggacggcagcggcgagcccgccagcccccccgccgacgctatgccccggggcacacctccccgcaaaaccgtgtacagaataagtgtgactatggtgcggaaggagcagctcgccgctccgggatccggcggccccgatccccggccagttcgccggcctcggccggctcggtcccctgatgcccccggacgcctggaagaagaggcggaagaggctgaaggtgcagaggagcctgaaggtccccggcccagagcttgggacttccgtaccttcagaacacgttcgacgggccaattggaactgggacgactgcgcccctgtgctcgaggtctcgaaccagccgatctggcaggcagtgcgcccgccgaggaggaggggcggggatcacctgcttccggcagccctgacgttgaaggcgccagggcagcaccactgaggcggtccctgtctttcaggcattggagcggcccagaagccccacagggcaggacattagggggcggaaggaggcactcaagctcggggagcctagcctgggctccttgcgatgaggcggccgctgggactacattggagccagctaccgcaacccagcccgccagtgagaagcggaacacactggacgtgggagaggtgctcagtaaaaacgacgccctgtctgatctggagcggtgggagaggagtaagtccaagaatagaacgttggataactccgacctccaacgtctggaacgcgccagggccgcagcgggggccggggccgcctccgagcaccgtttgctgaggttcttctccgggattttcgcccggagagatggaggcccaggcggaggacccagcccccggagcggggcctcccgacctcggggctacttctctctgcgcagggcccctgccgaggcgcacagctcctccgcggagtctatcgacggaagccctaggcgcgatgccttcgtgaactcacaagaatggacactgagccgatccgtcccggagctcaaagtgggaattgtggggaacttggcctcagggaagtcggctcttgtccaccggtacctgaccggcacctatgtacaggaggaatcacctgagggtgggcgctttaaaaaagagattgtcgtggatgggcagtcctacttattgctgataagagacgagggtggccctccggaagcacagttcgccatgtgggtcgacgcagtgatttttgttttctctcttgaggacgaaatcagttttcagacagtctaccattattatagtcgaatggccaattatcggaatacgtcagaaataccacttgtgttggtggggacacaagacgcaatttcgtcggctaatccccgggtgattgacgacgcacgggcccgcaagctgagcaacgatctaaagaggtgcacctactacgagacatgcgcaacctacggactgaatgtcgagagagtttttcaggacgtagcccaaaaaatagtagccacccggaagaagcagcagctgagtatcggaccctgtaaatccttgcctaacagcccctcccattcaagcgtttgttctgctcaggtgagtgcagtgcatatctcccagacatccaacggcggtggatctctttccgactactcaagtagcgtgccctcaacaccatccacttcccagaaggagctgcgtatcgacgtaccaccgaccgcaaacaccccaactccagtccgaaaacagtccaaaaggagatcaaatctttttacaagccggaaagggagtgaccctgacaaggaaaagaagggtctggaatctcgggctgattctatcgggtctggccgcgccatcccaattaaacagggcatgctgctgaagcggtcaggcaaaagcctcaacaaggagtggaaaaaaaaatatgtgaccctgtgcgataatggagtgctcacataccacccgtcactccacgattatatgcagaacgttcatggcaaggagattgatctgctgcggacgaccgtgaaagtacccggtaaaagacctccccgcgccacctcagcttgtgcccccatcagctctccaaagactaatggcttatccaaggatatgtcatcgctccatatctctcctaatagtgatacaggactgggggacagcgtttgctccagcccatctatcagcagcacaacctcccccaaacttgatcctccacccagccctcatgcaaaccgaaaaaaacataggagaaagaaatccaccagcaattttaaagctgatggcctctccggtacggccgaagagcaggaagagaacttcgagtttattatcgtctccctgacaggacaaacttggcacttcgaagcaactacatatgaagagcgagatgcctgggtgcaagccattgaaagccagattttagcatcgctgcagagctgtgagtcctcaaagaacaaaagtaggctgacctcccagtccgaggccatggctctccaaagtatccgcaatatgcgggggaatagtcactgtgttgattgtgaaacacaaaatcctaattgggcttctctcaatcttggagccctgatgtgcattgagtgcagcggaatccaccgaaatttaggcacccacctgagtcgggttcgatcgctggacttagatgactggcccgtggaattgattaaagtgatgagttccattggcaatgagttggctaatagcgtgtgggaagagagttctcaaggccggactaagccttcagttgattcgactcgggaggagaaagagcgttggatacgtgctaagtacgaacagaagctgtttcttgcgcctctgccgtgcaccgaattaagcctggggcaacatctcctgcgtgcaactgccgacgaggatctaaggacggctattttgctcctcgcacacggatcaagagatgaagttaatgaaacctgtggggagggagatgggcgcacggcccttcaccttgcctgcaggaagggcaatgtggttctcgctcaactcctcatctggtacggggtggacgtgaccgctcgggatgcgcacgggaacaccgctctggcctacgcaaggcaggcctccagccaagagtgtatcgatgtgcttctccagtatgggtgcccagatgagcgcttcgtgctgatggcaaccccgaacctctctcgtcggaacaataacagaaacaatagctcgggacgggtaccaactattatctag

SEQ ID NO: 25253 - DNA, 1260 bp, synthetic construct
  source 1..1260: mol_type = other DNA; note = Synthetic coding sequence
atgaacaaccagaagcagcagaagcccaccctgagcggccagcggtttaagactcggaagcgagatgagaaggaaaggttcgatcccactcaatttcaggattgcatcatccagggcttaacagagaccggaactgatttggaagcagtcgccaagtttttagacgctagcggagctaagctggactatcgcagatatgcagaaaccttatttgacatactcgttgcaggcggcatgctggcccctggaggaacccttgcggacgatatgatgaggaccgacgtgtgcgtatttgccgcacaggaggatctggaaaccatgcaggcttttgcacaggtgttcaataaactgatacgccgctacaaatatcttgagaagggatttgaggatgaggtgaagaaattgctgttgttcctaaagggatttagtgaatccgagaggaataagctggcaatgctgactggtgtgctcctggctaacggcacgctgaacgcctctattttgaatagcctgtataacgagaatctggtcaaggagggtgtctcagccgcttttgcagttaagctattcaaaagctggataaacgagaaagatatcaacgcagtcgcggctagccttcggaaggtatctatggataaccgcctcatggaattgtttccagcgaacaagcaatctgtggagcactttaccaagtactttactgaggctgggctcaaagaactgagtgaatacgttcggaaccaacaaaccattggcgctcggaaggagctccagaaagaactgcaggagcagatgagcaggggcgatcccttcaaggacattattctgtatgtcaaagaagagatgaagaaaaacaacataccagagccggtggtgatcggcattgtgtggtctagtgtcatgagtacagttgagtggaacaagaaagaagagctggtcgctgagcaggccattaaacaccttaagcagtattcccccttgctggccgcctttacaacacagggccagtctgagttaaccttattgctcaaaatacaggagtattgttatgataacatccattttatgaaggcctttcagaaaatcgtggtcctcttctataaggcagaggtgctgtccgaggagcccatcctgaaatggtataaagatgctcatgttgccaaaggaaagtctgtgttcttggaacaaatgaagaaattcgtcgagtggctgaagaatgccgaagaggagtccgaaagcgaagccgaagagggggattag

SEQ ID NO: 25254 - DNA, 2769 bp, synthetic construct
  source 1..2769: mol_type = other DNA; note = Synthetic coding sequence
atgatcaccagcgccgccggcatcatcagcctgctggacgaggacgagccccagctaaaagagtttgctctgcataagctgaatgcggtggtaaacgacttttgggccgagatcagtgagtctgtggacaaaattgaagtgttatatgaagacgaaggattccgtagcagacagtttgcagcactcgtcgctagcaaggtgttctaccacctgggagcctttgaggaaagtctaaactacgctctgggggccggcgacttgttcaacgtaaacgataactctgagtatgtggagaccatcatcgccaagtgtattgaccactacactaagcagtgtgttgaaaatgcggacctgcccgaaggcgagaagaaacccatcgaccaaagacttgaaggaattgtgaataaaatgtttcaaagatgtctggacgaccacaagtacaaacaggcaatcgggatcgccctggaaacgcgacgcttggacgtgttcgaaaagaccattctggagtctaatgacgtccccggtatgcttgcgtatagtttaaaactgtgcatgtctctcatgcagaacaaacagtttcgcaataaggttctgcgagtgctcgtgaagatttacatgaatctggaaaagccggattttattaatgtctgtcagtgtcttattttcttagacgacccacaagcggtttctgatattttggaaaagttagtgaaagaggataatctgctgatggcctaccagatctgttttgacctgtacgagtcagcctcacagcagttcctttcgagtgtcatccagaatctcagaactgttggaacacctatagcaagtgtacctgggtccacaaacaccggaaccgtgccaggcagtgagaaagattcagatagtatggagaccgaagagaagacctcctctgcctttgtaggaaaaactccagaggcctcccccgaacctaaagaccagaccctgaaaatgatcaaaatcctgagcggcgaaatggcgattgagttgcacctccagttcctgatcaggaataataataccgacctgatgattcttaaaaatactaaggatgccgtgaggaacagcgtatgccataccgccacggtgattgccaattcatttatgcactgcggcactacgtccgatcagtttcttagagataacctcgagtggctggcaagagctacaaattgggctaagttcaccgctacagcttcgctcggcgtgatccacaagggacacgagaaagaggcgctgcagcttatggctacctatctgcccaaggacacatcacccggatcagcttaccaggaaggtggggggctatacgctctcggacttatacatgcgaaccacgggggcgacatcatcgattacctgctaaaccagctgaagaatgcatccaatgacatcgtccggcatggagggtctctcgggctcggccttgccgccatgggcaccgccagacaggatgtgtacgacctgctgaagactaacctgtatcaggacgacgccgtaaccggggaagcagctggactggctctaggtttggtgatgctgggcagcaagaacgcccaggccatcgaggacatggttggttatgcccaggaaactcagcacgagaagattctacgcggattggcggtgggaattgcgctggtgatgtacggcagaatggaagaagcagatgctttgatcgaatctctgtgtagagacaaagatccaatcctgcgcagatcaggtatgtacaccgtcgccatggcttactgcgggtccgggaacaataaggcaatcagaaggctgctccacgtggcagtatctgacgtgaacgacgacgtcagaagggccgctgtggaaagcttaggttttatactctttcgcacacccgagcaatgcccaagcgttgtctctctcctgagcgaatcctacaatcctcacgtacggtatggcgcagctatggctttgggtatctgttgcgccggcactggtaataaagaggctataaacctgctcgagccaatgaccaacgacccagtcaattacgttaggcagggagccctgatcgcatctgcgctgatcatgatccaacaaacggaaattacctgccccaaggtgaaccagttcaggcagctttattccaaagttatcaatgacaagcatgacgatgtaatggcaaaattcggcgctatcctcgcccagggaattctcgacgctggcggtcacaatgtcacaatcagtttgcagagcagaaccggccacacccacatgccgagcgtggtcggggttctggtctttacccaattctggttttggtttcctcttagccacttcctgagtctagcctatactccgacctgtgtcatcggactgaataaggatttgaaggtgagcacggctgtactgtctatcactgcaaaggctaaaaagaaggagaaagagaaggaaaagaaggaggaggagaagatggaggtagacgaagcagagaagaaggaagagaaggagaaaaagaaagaaccagaaccgaatttccagttgcttgacaaccctgccagagtaatgcccgcccagctcaaagtcctgactatgccagaaacttgtcgttaccaaccatttaaaccgctctcaataggcggcattattatcctgaaagacaccagcgaggatatagaggagctggttgaacccgtggcggcccacggccctaagatcgaagaggaggaacaggaaccggagccacccgaaccatttgagtacatcgatgattag

SEQ ID NO: 25255 - DNA, 363 bp, synthetic construct
  source 1..363: mol_type = other DNA; note = Synthetic coding sequence
atggcccccgccaagaagggcggcgagaagaagaagggccggagcgctattaacgaggtggtgactcgtgagtacacaataaacatacacaagcgaattcatggggtgggcttcaaaaagagggctccccgcgcactgaaggaaattcgaaagttcgcaatgaaggagatggggaccccagacgttaggattgacacacgactaaacaaagctgtttgggccaagggcataaggaacgttccttaccggattagagtaagattgagtagaaagagaaacgaggatgaggactccccaaacaagctgtacacactggtaacatacgtccccgtcacaactttcaaaaactgtcaccaccagtag

SEQ ID NO: 25256 - DNA, 378 bp, synthetic construct
  source 1..378: mol_type = other DNA; note = Synthetic coding sequence
atgagcagcaccctgggcaagctgagcaaccaggtggaggagaccctcccgttactgaagaaggtccccgccaattactttcacatctgctctgccatcctcatggggttctcgctgtccaagtctgcgacacaagtgagtgcaatccacatggatagcaaggtggacgatcaccttatccggggcaccgagaaaagtagactcgaaccagcgacccagcttttccagaacacgaagaagatccgattggaggatacaaatcaggaaaatttcacgagaattgaggggactggtacaggatcgctgagcggaaaagcgcttggatcagtcgtgtatgtcaaggagtcagacggcctggaaatgacggacgtagaatag

SEQ ID NO: 25257 - DNA, 1500 bp, synthetic construct
  source 1..1500: mol_type = other DNA; note = Synthetic coding sequence
atgagcacccccagcggcatcagcacctggctgagcctgcccgtgagtaccccagcttctataacttctattcgggtcacccaaaaatcgtcagggccgtgggccttttcttcttgtacatatgtgtcgggccctggagtgtgcatctcttcactctcctgttcgcgggtgggctcctcatctttccgggggggcctcgggggcggttacgggggcgcgtccgggatgggcggcataatcgccataatggtgaaccagtccctcctgagcccactgaacctcgaggtggaccccaatatccaagctgtgtgtacacaggaaaaggagcagatcaaaactcttaataataagttcgcatctttcattgataaggtgtggtttcttgagcaacaaaacaaggtgctggagactaaatggagtcttcttcaacagcaaaagatggccagaagcaacatggacaacatgctggagagctacatcaacaatctgcgcaggcagctcgagaccctcggccaagagaagctgaaacttgaggcggaattaggtaacatgcaaggacttggggaagactttaagaacaagtatgaggacgagatcaacaagcatactgaggtggaaaacgagtttgtccttatcaagaaggacgttgatgaggcctacatgaacaaagcagagctagagtctctcctcgagggactcacagacgagatcaattttctgagacagctgtatgaagaggagatcagggagctacagagccaaatcagcgacatgagcatggttctgtctatggattattcatgtagtagggacatggattccattatccccgaagtgaaggtgcaatatgaagagatcgcaaattgctctcgggcagaggccgaatctatgtaccagatcaagtatgaggagttgcagacgctggcggggaagtatggtgacgatttgagcaggactaaaaccgagattagtgaaatgaaccgaaatattagctggttacaggccgagacagagggactgaagggccaacgcgcttccctggaagccgcaatcaccgacgccgagcagagaggagaactagctgttaaagacgcgaatgcgaaactttctgaattggaggcagccttgcagagagccaagcaagatatgatgggccagctgagggaataccaagagcttatgaacgtcggtctcacacttgatatcgaaattgccacgtatcgaaagctgttggagggggaagagagcagactggaatcagggatgcaaaatgtatccattcataccaaaaccacaagctcgtatgcaggcggcctgtcatcagcctacggcggattgacgagtccaggcattatatatcgtctcggttcttccttcggatctgccgccggttcatcatctttcagcaggactagtagcaccagggcggttgtagtacgcaagatcgagacccacgatggcaaattggagagcgaatcttcagatgtactcagcaaatag

SEQ ID NO: 25258 - DNA, 504 bp, synthetic construct
  source 1..504: mol_type = other DNA; note = Synthetic coding sequence
atgtacatgggcatgatgtgcaccgccaagaagtgcggcatccggtttcagccgcccgcaataatacttatttacgaatcagaaattaaagggaagatccgccagcgcatcatgcccgtgaggaacttcagtaaattttccgattgtacccgggccgccgagcagttgaaaaataatcctcggcacaagtcgtatctggaacaggtgagcctgagacagttggagaagttattttcatttctccggggatacctgtccggccaatctctggcagagacaatggagcagattcagagggaaacaactatcgatccagaggaggacctgaataaactggacgacaaagaacttgcaaagcgtaagtccattatggacgagctcttcgagaagaatcaaaagaagaaggatgacccaaacttcgtgtacgatatagaagtggaatttcctcaagatgaccaactccagagttgtggctgggatacagaaagcgcagatgaattttag

SEQ ID NO: 25259 - DNA, 378 bp, synthetic construct
  source 1..378: mol_type = other DNA; note = Synthetic coding sequence
atggcccccgccaagaagggcggcgagaagaagaagggccggagcgccataaatgaggtcgtgacgagagagtatactatcaacatccataaaagaatccacggtgtaggctttaaaaaacgggcccctcgagccctgaaggaaattcggaaattcgccatgaaagaaatgggcacccctgatgtgagaatcgatacccgccttaataaagccgtgtgggccaaaggcatcaggaatgtcccttaccgaatccgcgtcagactgtccagaaaacgtaatgaggacgaggactcaccaaataagctctatactctggtgacatatgtacccgtcaccacgtttaagaatcttcagactgtgaatgtggacgaaaactag

SEQ ID NO: 25260 - DNA, 1005 bp, synthetic construct
  source 1..1005: mol_type = other DNA; note = Synthetic coding sequence
atgacccggagcctgttcaagggcaacttctggagcgccgacatcctctccacaattggatatgacaacataattcagcatttgaacaacggcaggaagaattgcaaggagttcgaggacttcctgaaggagcgcgccgctatcgaggagcgttacgggaaggatcttctaaacttgtctcggaaaaaaccctgcgggcagagtgaaatcaatacactgaagcgggccctggaggtattcaagcagcaggtcgacaatgtggcccagtgtcatatccaactggcccagagtcttagagaagaagcgcgtaagatggaggaattccgtgagaagcagaagctgcagcgaaaaaaaactgagttaattatggatgctatccataaacagaagtctttgcagttcaaaaaaacaatggatgccaaaaagaattacgaacaaaagtgccgagataaggacgaggcagagcaggctgtgtcccgcagtgcaaacttggttaaccctaaacagcaggagaaactgttcgtcaaactggccaccagcaaaacagccgtggaggactctgataaagcttatatgctgcacatcgggacgctggataaggtaagggaggagtggcagtcggaacatattaaggcctgcgaggctttcgaggcgcaggagtgcgagcgaatcaattttttccgaaacgcactgtggctgcacgtcaatcagctctcacaacaatgtgtgaccagtgacgaaatgtacgagcaggtccggaagtccctcgaaatgtgtagtatccagagagatattgagtactttgtgaatcagcgcaagacgggccagatcccacccgcgccaattatgtatgagaacttttactccagccaaaagaacgccgtgccggcaggaaaagccactggacctaacctggcacgccgtggtccactgccaattccaaaaagttcaccagatgaccccaactattctttggtcgatgattattctcttctctatcagtag

SEQ ID NO: 25261 - DNA, 597 bp, synthetic construct
  source 1..597: mol_type = other DNA; note = Synthetic coding sequence
atgaagaaggtgcggctgaaggagctggagagccggctgcagcaggtcgacggctttgaaaagccaaagctgcttctggagcagtatcccacccggccgcacatagctgcctgtatgttatacaccatacataatacatatgacgacattgaaaataaggtagtcgctgacttaggctgtggctgtggggtcctgtccatcggaacggctatgcttggggctggcctgtgcgttggtttcgatattgacgaggatgcactggaaatctttaaccggaatgcagaggaatttgagctgacaaacatagacatggtccagtgtgatgtgtgcctgctgtctaatcggatgtctaaaagttttgataccgtcattatgaatccaccctttgggaccaaaaacaacaaggggacagatatggccttcctgaaaacagcactggaaatggcccgaactgcagtttacagtctacacaagtctagtacccgagaacacgtacagaaaaaggctgcagaatggaaaataaaaatcgacattatcgcagaactgcgctacgacctgccagcctcgtataaattccataaaaaaaagagcgtgtag

SEQ ID NO: 25262 - DNA, 1125 bp, synthetic construct
  source 1..1125: mol_type = other DNA; note = Synthetic coding sequence
atgctggcccccggctgcgagctggaccccgaccaggaggtggtgcgtactcgtcccgaggatgttccagcctccccatcaacctccacaatgatcgtgtctgtgctccgcccccctagtcacgcctcttgtactgcctgtgggaccgtgacattccacattgtggagaggatggcctcagtgatccctgctagcaaccgcagtatgagatctgaccgcaatacttacgtgggtaagaggtttgttcatgtgaagaatccatacctggacctcatggacgaggacatcttgtaccatctagatctgggtactaaaactcacaacctccctgcgatgttcggggatgttaaatttgtctgtgtgggaggatcccccaacaggatgaaagcatttgcactgtttatgcacaaggagcttggatttgaagaggccgaagaggacattaaggatatttgtgctggaaccgataggtactgcatgtacaaaactggtccagtactcgccatcagtcacgggatgggtatcccttctataagtatcatgctccacgaactgataaagcttttgcaccacgcccgatgttgtgacgtcacaatcatccggattggcacgtccggtggtatcggaatcgctcccggtactgtcgtcattactgatattgccgtggactcattcttcaagccgcggtttgagcaggtgattctggataatatcgtcactcggagcacggaactagacaaggagctgtcagaggaactgtttaattgtagcaaagaaatccccaacttcccaactctagtcggccacacaatgtgtacctatgacttttacgagggacaaggcaggctggacggcgccctctgtagcttcagtcgcgaaaaaaagctggactacctcaagagagcatttaaagccggagtgaggaacattgaaatggagtcaaccgtgttcgccgccatgtgtggtctgtgtggcctgaaagccgcagtggtgtgtgttaccctgctcgatcggctggattgtgatcaaatcaatctgccccatgacgtgttggtcgaataccagcagcgcccacaattattgatctcgaactttatcaggcgcaggctaggactatgcgattag

SEQ ID NO: 25263 - DNA, 4149 bp, synthetic construct
  source 1..4149: mol_type = other DNA; note = Synthetic coding sequence
atgctgcggaagctgaccatcgagcagatcaacgactggttcaccattggcaagaccgtgacaaacgtggagctcctcggggctcccccagcttttcccgccggcgcagcccgtgaggaagtgcagaggcaagacgtcgcccccggggctggacctgcagcccaagctccagcactggcgcaggccccagcccggccagcagcagccttcgagcgttccttgagtcaaagaagcagcgaagtagaatacatcaacaaatataggcagctcgaggctcaggagcttgacgtgtgcagatccgtccagccaaccagcggccctgggccccgtccctccctggccaagctttcgagtgtcacctgcatcccaggcaccacctacaaataccctgatctccctatcagccgctacaaagaagaggtggtgagcctgatcgaaagcaactctgtggtcatcatccatggtgcaaccggctcaggaaagagtacccagctgccccagtacattttggatcactacgtgcagagaagcgcttactgctccatcgttgtcacacaaccccgcaaaataggggcatcgagcatcgccagatggatttccaaggaaagggcttggactctgggcggggtggttggataccaggtgggtctggaaaaaatagcaaccgaagatacacggcttatttacatgacaacgggggtactcctacagaaaatcgtctccgccaagtcattaatggagtttacccatattatcattgacgaggtgcacgagcggaccgaggaaatggacttcctactcttggtggtgaggaaactgctgaggaccaatagccgctttgtgaaagtggttttgatgtcagccacaatcagttgtaaagagttcgccgactatttcgctgtccccgtgcaaaataagatgaatcctgcttatattttcgaggtggagggaaaacctcactcggttgaagaatattatctgaatgacctagaacatatacaccacagtaaactgagtcctcatctgctcgaggagcctgtgattactaaagatatctatgaagtggcggtgtcactaattcaaatgttcgacgatttagacatgaaggagagcgggaacaaggcatggtccggagcccaatttgtgcttgagcggtcgagtgtgctggtatttctgcccgggctcggggaaatcaactatatgcatgagctcctcacaagcctggtgcataagcggctgcaagtataccccctccacagctcagtcgcacttgaggagcagaacaatgtatttctgagtcctgtgccagggtatcgaaaaataattttatctacgaacatagccgaatcatccgtcactgtgcccgatgtaaaatacgtgatagatttctgcttgacacgcaccttggtgtgcgatgaggacaccaactatcagtctctcaggctgtcctgggcctctaaaacctcatgcaaccagcgaaaaggcagggccggacgggtctcgagagggtattgctacagactagtgcacaaggacttttgggataatagtatcccagatcacgttgtacctgaaatgttgcggtgccctttaggctcaactatcttgaaggtaaagttactggatatgggggagcccagagccctgctggccacagccctgtctcctcccgggctgagcgatatcgagagaactatcttgctgctgaaggaggtaggagccctggccgttagtggccagcgagaggacgaaaaccctcacgatggggagctaaccttccttggccgggttctggcccaactgcccgtgaaccagcagttggggaaacttatcgtattagggcatgtgtttggctgcttggacgagtgtctgataatcgccgcagcgctttctctgaaaaattttttcgccatgccatttcggcagcatcttgacggctataggaataaagtgaacttctctggatcctccaagagcgactgcattgccctggttgaagccttcaaaacctggaaggcctgccggcaaacgggtgagctgcgctacccaaaggatgagctcaattggggacgccttaattatatccaaatcaaaagaattcgcgaggtggccgaattatacgaagaacttaaaaccaggatctcacagttcaacatgcatgtggatagccggcgccctgtcatggaccaagaatacatttacaagcagcgattcattttacaggtcgttttagcaggggccttttatcctaactactttacttttggccagcccgacgaagagatggcggtaagagaactggcaggaaaggatcctaaaacaaccgtggtgctgaagcacatacccccctacggcttcttgtactataagcagctccagtccttatttcggcagtgtggacaggtgaagagtatagtgtttgacggcgctaaagcttttgtggagttcagcaggaacccaacggagcgttttaaaacattacccgccgtctatatggccattaagatgagccagctcaaggtcagcctcgaattatccgttcattctgcggaggaaatagaagggaaagtacaaggcatgaacgtatctaagctcagaaacacacgggtcaacgtagactttcagaaacaaactgtggatcctatgcaggtatccttcaatacatccgatcgatcgcagaccgttaccgacctgttactcacgatcgatgtcaccgaagttgtggaagtaggtcacttttggggctaccggatcgatgagaataatagcgagattttgaagaagctgactgctgaaatcaatcagctgactcttgtaccccttcctactcaccctcatccagatttggtttgtctcgccccttttgccgactttgacaagcaaaggtattttcgggctcaggtgttatacgtctcggggaactcagccgaagtatttttcgtggactacggaaataaatcccacgtggacctccatctacttatggagatcccgtgccagttcctggagctcccattccaggcgctggaatttaaaatttgtaaaatgagaccttcagctaagagtttagtgtgtgggaaacactggagcgatggggcgtcacaatggttcgcttccctggtctccggttgcactctgttagtgaaggtgttcagcgtagtccacagtgtcctacatgtggatgtgtaccagtacagcggtgtgcaggatgccatcaatattagggatgttctcatacagcaggggtacgcggaactaaccgaggaaagctacgagagtaaacagtctcacgaggtactgaagggcctcttttcaaagtctgtcgaaaatatgaccgatggctccgtccctttccctatgaaagacgacgagaagtacttgatccgcatcctactggagtccttctcgaccaacaagctgggaaccccgaactgcaaggctgagttgcacggccctttcaatccatacgagcttaagtgtcattctctgacacgtatctctaagttcaggtgcgtttggattgagaaggagtctatcaattcggtgatcatcagtgatgctccagaggatcttcaccagagaatgctcgttgcggcttcactcagcattaatgccacagggagtactatgctgttgcgggagacaagccttatgcctcacataccagggctccccgcattgttaagtatgctgttcgccccagtcatagagcttcggattgaccagaacgggaaatattacacaggagttctgtgtggcctgggatggaatccggctaccggtgcgtctatactgcctgagcacgacatggagctggccttcgatgtgcagttctccgttgaggacgtagtggaggtcaacatcctgcgcgctgccatcaacaaattggtgtgtgatggacccaacggatgcaaatgcctgggccctgaacgagttgcccagttgcaggatatcgctcggcagaagctcctgggactgttctgtcaaagtaagcccagggagaagattgtacccaaatggcatgaaaaaccgtatgaatggaatcaagtggatcctaaacttgtgatggagcaggccgatcgcgagtcttctaggggtaagaacacttttctttaccagttacacaagcttgtggtcttggggacatag

SEQ ID NO: 25264 - DNA, 357 bp, synthetic construct
  source 1..357: mol_type = other DNA; note = Synthetic coding sequence
atggacgtgttcctgatgatccggcggcacaagaccaccatcttcacagatgctaaggaatcatctaccgtgtttgagcttaaacgtatcgtggagggaatactcaaacgccctccagatgagcagaggctatataaggacgaccaacttctcgatgacggcaagaccctaggggagtgtggttttactagtcagacagcccggccccaggccccagcgacagtaggactggccttcagagccgatgacacatttgaggctctctgcatcgagcccttctctagtccacccgagctgccagatgtgatgaagccccaggactctggctccagcgcaaacgagcaggcagtccagtag

SEQ ID NO: 25265 - DNA, 3228 bp, synthetic construct
  source 1..3228: mol_type = other DNA; note = Synthetic coding sequence
atggtggtggaggtggacagcatgcccgccgccagcagcgtgaagaagccgtttggactgaggagcaagatgggaaagtggtgttgtcggtgctttccctgctgccgcgaatccgggaaatccaacgtcgggacctctggggaccatgacgatagcgctatgaaaacccttcgcagtaaaatggggaaatggtgtcggcactgctttccttgttgtcgcggttcaggcaaaagcaatgtcggggcctccggggaccacgacgactccgccatgaaaacactccgaaacaagatgggaaaatggtgctgtcactgctttccttgctgcaggggctctagtaaatccaaggtcggtgcatggggagactacgatgatagtgcctttatggaaccacgctatcatgtgcgtggcgaggacctggacaagctgcacagagccgcatggtgggggaaggtcccgcgcaaggatttgattgtgatgctccgtgatacagatgtgaataaacaggataagcaaaaacggaccgccttacacctggcctccgcaaatggcaactcagaggttgtcaagttactcctggaccggcggtgtcagcttaacgtgttggacaataaaaaaaggactgctttgattaaagccgtgcaatgccaggaggatgaatgtgccctaatgttgctggaacacggcaccgaccccaacattccagatgaatacggtaacactaccctgcattacgcaatctataatgaggataagcttatggcaaaagccctgcttctgtacggtgccgacattgaaagcaagaataaacatgggctgacccccctcctgctaggggtccacgaacagaaacagcaggttgtgaagtttctaattaaaaagaaagctaatctcaatgcactcgaccggtatggcagaacggccttaatcctggctgtttgctgcggctcggcttcaattgtttccctgcttctggagcagaacatagatgtatcgtcacaggacctgtccggccaaacggcacgggaatatgctgttagtagtcatcatcacgtgatttgccagcttctgagcgactacaaagaaaagcagatgttgaagataagcagcgagaactcaaaccccgagcaagatcttaagcttacctccgaagaggaaagccagcgttttaagggaagcgaaaattcccagcctgaaaagatgagtcaggagccagaaattaacaaagacggcgacagggaagtagaggaggagatgaagaaacatgaatcaaataacgtgggcctgctagaaaacctgactaatggagtgaccgcggggaacggtgacaacgggttgattccacagcgaaagagcagaacacccgaaaatcaacaattccctgataatgagtccgaggagtatcaccggatttgtgaactgctgagtgactacaaggaaaaacagatgcccaaatattcttcggagaattcgaacccagagcaggacctaaagctgacctcggaagaggagtctcaaaggcttaaagggtctgaaaacggccagcctgagaagcgcagccaggagcctgaaattaataaagatggagaccgcgagctcgagaacttcatggcgattgaggaaatgaagaaacaccgctccacccacgtgggctttcctgagaatctcacaaatggcgcaaccgctggcaatggcgacgatgggctcataccaccaaggaagtctcgcacccctgaatcccagcagttccctgatacagagaacgaagagtaccattcagatgaacaaaatgacacacagaagcagttctgtgaggagcagaacaccgggattctgcatgacgagatcctaatccacgaagagaaacagatcgaggtcgtggagaagatgaattctgagttaagcctctcttgcaagaaggagaaagatattttgcacgaaaattctacgctgcgggaggagatagccatgctgcgactggagttggacactatgaaacatcaatcccagctaagagagaagaaatacctggaagatatcgaaagtgtcaaaaaacggaatgacaacctccttaaggcactccaactcaacgagctgacaatggatgacgatacagccgtgctcgtcatcgacaatgggagtggaatgtgcaaggccggcttcgccggggacgacgcccccagagcagtgtttccatcaatcgtgggaagacctcggcagcaggggatgatgggcggtatgcaccagaaagaatcatacgtaggtaaagaagcacagtcaaagaggggaatcctcacccttaagtaccccatggaacacggaatcataactaactgggacgacatggagaagatctggcaccacacattttacaatgaactacgcgtagcccctgaagagcacccagtgctgcttaccgaggcaacacttaacccgaaagccaaccgagagaagatgactcaaataatgtttgaaacattcaatactcctgccatgtacgtggccatccaggcggtcctctctttgtatacgtcgggacgtactacggggatagtgatggattccggtgatggtgtgacacacactgtccctatctacgagggtaacgccctcccgcacgcaaccctccgtctagacctggcaggcagggaactgcctgactacctgatgaagattctgacggaacatgggtataggtttaccacaatggccgagcgtgaaattgttagagacattaaggagaagctgtgttacgtggctcttgacttcgagcaggagatggccacagtcgcttcttcatcgtctcttgaaaaaagctacgagttaccagacggacaggtgatcacaatcggcaacgagcgtttccgctgtccagaagcactgttccagccctgtttcttgggaatggagtcctgtggcatacacgagacgacttttaactctattatgaaatctgacgtcgacatcaggaaagatctgtacactaatacagttctgagcggcggtactaccatgtatcccgggatggcccataggatgcagaaagaaatcgctgcattggcaccttccatgatgaaaatccgtatcattgcccccccgaagaggaaatactcagtgtgggtggggggcagtatactggcatccctgtctactttccaacagatgtggataagtaaacaagaatacgacgagtccggaccctccatcgtgcatcggaagtgtctgtag

SEQ ID NO: 25266 - DNA, 381 bp, synthetic construct
  source 1..381: mol_type = other DNA; note = Synthetic coding sequence
atgaccgccaccgagcagtggatcttcctgtgcgccgcccacaagacccccaaggagtgccccgccatcgattatactcggcatactctggacggtgctgcctgcctgcttaattctaataagtatttcccctcacgagtgagcatcaaagaatcaagtgtggcaaagttagggtccgtctgcaggcgcatttatagaatcttctcccacgcatactttcatcacagacaaatcttcgatgagtatgagaacgagacttttctatgtcatcgtttcaccaaatttgtaatgaagtataacctgatgagcaaggacaatttaatcgtgcctatcctggaagaagaggtgcagaattccgtctctggtgagtccgaggcctag

SEQ ID NO: 25267 - DNA, 2811 bp, synthetic construct
  source 1..2811: mol_type = other DNA; note = Synthetic coding sequence
atggagcccgacatcatccggatgtacagcagcagccccccccccctggacaatggagctgaagacgatgacgacgacgaattcggcgagttcggtgggtttagcgaggtgagtccctccggagtggggttcgtggacttcgacaccccagactatacccgccccaaggaagaattcgtcccgtctaaccactttatgccaattcatgaatttagcgaaaacgtggattcactcaccagctttaaatctattaaaaacgggaatgataaagatattactgcggaactgagcgctccagtgaaagggcaaagcgatgtgctcctctcaaccaccagcaaagaaatcatatctagtgaaatgctggccacctccatcgacggtatggagcgacccggcaatcttaacaaagtggttgaacagagacaaaacgtaggaaccctggagtcattcagtcctggggatttcaggactaacatgaacgttgtgcaccagaacaaacaacttgaatcttgcaatggcgagaagcctccctgccttgagatactaacgaatgggtttgcagttctggagacggtcaacccacaggggaccgatgatctagacaacgtggctgattccaaagggcgaaaaccactgtccacacattccactgagtataacctggattctgtgccctccccagccgaggagttcgctgattttgccactttttcgaaaaaggaacggatccaactggaagagatcgagtgtgctgtgctgaacgatagagaagccctcacaattagggaaaataacaagatcaaccgcgtgaatgaactaaactcagtcaaggaggtggccctgggccgcagcctagataacaaaggggacacagatggagaggaccaggtgtgcgtgtccgagatctcgatagttacaaatagaggcttctccgtggaaaagcaaggactgcctaccctgcagcaggacgagtttctacagtcaggtgtgcaatctaaggcatggtccctcgtggattccgctgacaactccgaagctatccggcgagagcagtgcaagacagaggagaagctcgatctgctgactagcaaatgcgcccacttatgtatggattcagtaaagacctctgatgatgaagtcggctcgcccaaagaggaatcaagaaaattcactaactttcaatcacccaatattgaccccaccgaagagaacgacctggacgattccctgtccgtcaaaaacggcgacagttcgaacgactttgtaacatgtaatgatataaacgaggatgattttggtgatttcggggatttcggcagcgcatctggatcaactccaccattcgtgactgggactcaagatagcatgtccgatgccaccttcgaggaaagctcagaacatttcccccacttttctgagccaggggacgactttggagagttcggggacattaacgccgtgagttgccaggaagagactatcctaaccaaatctgatctgaaacagacttctgataacctaagcgaagaatgccagctggcacggaagagctcgggtaccggaacagaacccgtcgcaaagctgaaaaatggacaggagggggagattggacatttcgactccgtacccaacattcaggacgattgcaatggatttcaggatagtgatgatttcgccgatttttccagtgccggtcccagccaggtagtcgactggaacgcctttgaagatgaacagaaagatagttgctcttgggctgcgtttggagaccagcaggctacagaatctcaccatcgcaaagaggcctggcagtcccataggaccgacgaaaatatcgacacacccggaaccccaaagacccattctgttccttccgctacatccaaaggcgctgttgcctcaggtcacttacaagaatctgccacctctgtgcagacagctttgctcaacagactggaaagaatcttcgaggcttgctttccaagcatattggttccagatgccgaggaagaggtgacctccctcaagcacctacttgaaacctccacccttcctatcaaaactagggaggcgctgcctgagagtggcgagctgctggacgtctggactgagctacaagacattcacgacgctcacggccttcgctatcagtggggcgggtcccatagtaataaaaagctgctatcttccctcggaattgacacccgcaacatcctttttacaggtaacaaaaagcagcctgttatcgtgccaatgtacgccgccggtctcggcatgttagagcccacgaaagaacccttgaagcctttgtcagccgccgaaaagatagcatcaattggacagactgcaacaatgtccccggacatgaacacatgcacatctgatcagttccaggagtcgctgccccctgtccagttcgactggagctcgtccggactgactaatcccttggatgcatccggaggctccacgctcctgaatctggacttttttggaccagtagatgactcgagctcgtctagcagcactaccatccccggtgtagatccagaactgtatgagctcactacctctaaactagaaatctcaacttcatcattgaaagttacggacgcctttgcacgattgatgagtactgtagaaaagacttctaccagcacccggaagccaaagcgcgaagaacacctctccgaagaggcaattaaggtgatcgcaggtcttccggatctcacctttatgcatgccaaggttctgatgtttccggctactctgacaccatccacttcatctcaggaaaaagctgatggatag

SEQ ID NO: 25268 - DNA, 1860 bp, synthetic construct
  source 1..1860: mol_type = other DNA; note = Synthetic coding sequence
atggacgaccagcaggccctgaacagcatcatgcaggacctggccgttctgcataaagcatcaaggccagccctgagcttgcaagagacaaggaaggccaagtcatccagtcccaagaagcagaatgacgtgcgcgtcaaatttgagcaccggggagagaagagaatcttacaatttccacggcccgtgaagcttgaggacctgcgctcaaaagcaaagatcgcattcggccaaagcatggatctgcactatacaaataacgagctcgtgattccgctcactacacaggatgacctggataaagccgtcgagcttttggaccgatccattcatatgaaaagcctgaagattctacttgtgatcaacggctctactcaagctactaacctcgaacctctaccgtcacttgaggacctagacaatactgtgttcggcgccgaaagaaagaagaggttgtctattattggccccacgtcccgggacaggagttcgcctccaccaggctacataccagatgaactgcatcaggttgctcggaacgggtcattcaccagcattaactcagaaggagaatttatcccagaatccatggatcagatgttggatccactaagcctttcctcaccagaaaatagtgggagtggtagttgtccctccctcgacagcccgttagatggtgaatcctaccctaaatccagaatgccccgggcccaatcatatcctgacaaccatcaagagttctctgactacgacaaccctatatttgagaagttcggaaagggaggtacttacccaaggagatatcacgtgtcctaccaccaccaagagtacaatgatggaagaaagacattccctcgtgcccgacggacacagggcacctctctcagaagcccagtcagcttttccccaacagatcactctcttagcaccagctctggctcctcaatttttacccccgaatacgacgactcccgcatcaggagacgcggctctgacatagataatcccactctgaccgtaatggacatatctcccccctcccggtccccgcgggcaccaactaattggagattagggaaactgctggggcaaggtgccttcggtagagtgtatttgtgctacgacgtggatactggaagggaattagctgtgaagcaagtacagttcgacccagatagccccgaaacgtcgaaggaagtcaacgccctcgagtgtgaaatccaactcctgaaaaacctactccatgagcgtattgttcagtattatggctgcctgagggacccacaagagaaaacactgtctatctttatggaatacatgccggggggctccataaaggaccagctaaaagcgtacggcgcactgactgagaacgtcactagaaagtacactcgacagatcctggagggtgtccactatttgcactctaacatgatcgttcaccgcgacataaagggagccaacattttgagggactcgaccggaaatgtaaaactcggcgacttcggagcctcaaaaaggctgcagacaatctgcctaagcggaactgggatgaagtctgtgacaggaaccccctattggatgtcccctgaggtcataagcggtgaggggtacggcaggaaggccgacatatggtctgttgcttgtacagtggttgagatgctaacggagaagccaccctgggctgaatttgaggccatggcagcaatattcaaaattgcaacccagcccaccaatccaaagctccccccccacgtgtccgactacaccagagactttttgaaacggatctttgttgaggccaagctgaggccgagtgcagatgagctgttgcggcacatgttcgtacattaccactag

SEQ ID NO: 25269 - DNA, 513 bp, synthetic construct
  source 1..513: mol_type = other DNA; note = Synthetic coding sequence
atgacccggggcaaccagcgggagctggcccggcagaagaacatgaagaagcagagcgacagtgtgaaaggtaagaggcgcgacgatggtctatctgcggctgcaagaaagcagcgagtcggcgtccaacagcctaacgctgagctcagccccattcacttccacttgatcctatgcgccttgcacccgcctgcctcatgccctttctgccctttagtccctccctctgctccttcatccctgccccccgggacccgcaggtcctgttctcggtctcggaagcggcagacccggcgtagaagaaatccctcatctttcgtggcttcctgtcctacactgctgccttttgcatgcgtcccgggagcgtccccgaccaccctggcctttccccctgtagtgctaaccggtccatccactgacggaatccccttcgccttgagccttcagcgcgtgccatttgtgctgccttcaccccaggtggcgagcctgcctcttgggcactcgcggggctag

SEQ ID NO: 25270 - DNA, 630 bp, synthetic construct
  source 1..630: mol_type = other DNA; note = Synthetic coding sequence
atgaagaaggtgcggctgaaggagctggagagccggctgcagcaggtggacggttttgagaaaccgaaactgctcctggaacagtaccccaccagaccccatatcgcagcatgtatgttgtacacgattcacaatacatacgatgatatcgaaaataaggtcgtggcagatctcgggtgcggctgtggggtgctgtctatcgggaccgccatgctgggcgctggcctctgcgtcgggttcgacatcgacgaagacgccctagagatctttaacaggaatgctgaagagttcgagttaacaaatattgacatggtacagtgcgacgtgtgtctgctctcaaacaggatgagcaagagtttcgacacagttatcatgaacccgccatttggaaccaagaacaataaggggacagatatggctttccttaagaccgctcttgagatggctcggacagccgtgtattccctgcataagagctcaacacgtgaacacgtccagaagaaagcggcggagtggaaaataaagatcgacataatcgccgagctgaggtacgacctccccgcaagttacaagtttcataagaaaaagtccgtagacattgaggtagacctcatcaggttcagcttttag

SEQ ID NO: 25271 - DNA, 1755 bp, synthetic construct
  source 1..1755: mol_type = other DNA; note = Synthetic coding sequence
atggccgccagcgccaagcggaagcaggaggagaagcacctgaagatgctccgggacatgaccgggcttccacataaccggaagtgtttcgattgcgatcagcgtgggcccacttacgtgaatatgacagtgggctcatttgtctgtactagctgttcaggtagcctgcgaggtctgaatccgccccaccgagtgaaaagtatatcaatgacgacctttacacagcaggagatcgagtttttacaaaaacacggtaacgaagtttgtaaacagatctggctgggtctgttcgatgatcgttcaagtgccatacccgatttccgggatccgcagaaggtcaaggagtttttgcaagaaaagtatgagaaaaagagatggtatgtgcccccggagcaggccaaagtcgtggcctcagtccacgcaagcatttcaggcagtagtgcctcaagcacctcctcaactccagaagttaagcctcttaagagccttctgggggatagcgcgcctacccttcatttgaacaagggcactccttcacagtcaccagtagtaggccggtcacaaggccaacagcaggagaagaagcaatttgatcttctgtcagacctgggctccgacatttttgcagctccagccccacagtctaccgccactgcgaacttcgccaactttgcccacttcaacagccatgctgcacagaattccgcaaacgcggattttgcaaatttcgatgctttcggacagagcagcggttcaagcaactttggggggtttccaaccgcatcacatagccccttccagccccagaccaccgccttcagaatgcttagcagttcttgcagcttcggtgagttcactagcgcctttcctctacaggccacacactcaggttctgctgcatctgtcaacgccaattttgcccatttcgataactttcccaagagtagttcagccgatttcggcacattcaataccagccagagccatcagaccgctagcgctgtaagcaaagtgagcactaataaagcagggctgcagacggccgacaagtatgccgcactagctaacctcgataatatatttagcgcaggacaaggtggggaccaggggagcggcttcggaaccaccgggaaggcccccgtcgggagcgtggtgagcgtcccctctcagtccagtgcttcctctgataagtacgccgccctggcagaactggatagcgtgttcagcagcgcagcaaccagtagcaatgcctacactagcaccagtaacgccagcagcaatgtctttggtaccgtgcccgtggtggccagtgcacagacgcagcccgcctcctcctccgtgccagcaccattcggcgcaaccccatcaactaaccccttcgtggcagccgccggtccctctgtggcgagctcaactaatccttttcagaccaacgccagaggcgccactgctgccacttttggaacagcctccatgtctatgccaacaggtttcggaacccctgcaccttactctttacctacatccttctcaggctcattccagcagcccgccttcccggctcaagcagctttcccacagcaaacggctttctcacagcagcctaatgggtttgctgccttcgggcagacgaagcctgtcgttacaccctttggccaggtggcagcagctggtgtgagcagcaatccgttcatgaccggtgcaccgacagggcaattcccaaccggaagttccagcacaaatccatttctttag

SEQ ID NO: 25272 - DNA, 795 bp, synthetic construct
  source 1..795: mol_type = other DNA; note = Synthetic coding sequence
atggccggcgagcagaagcccagcagcaacctgctggagcagttcatcttgttagcaaagggtaccagcgggtcagcactcaccgcgctgatctcccaggttcttgaggcaccgggggtgtacgtgtttggggaactgctggagttggcaaacgttcaggaacttgccgaaggggctaacgctgcttatctccagctcctcaatctgtttgcatatgggacgtacccagactatatcgccaataaggagtcgcttccggaattgtccaccgctcagcaaaacaaactgaagcatttaactatcgtgtcactggcttcaagaatgaaatgtatcccttactctgtcctgttaaaggatctagaaatgcggaatcttcgggagctcgaagacttgattatcgaagcagtgtatacagacataatccagggcaaactggaccagaggaatcagctgttagaggtggatttctgcattggccgtgacatcagaaaaaaggatatcaataatattgtgaaaactcttcacgaatggtgcgacggctgtgaagcggtcttgctgggaattgaacagcaggtcttacgggccaatcagtataaagaaaaccacaaccgaactcagcagcaggtggaggccgaagtgactaatattaagaaaactttgaaagcaacagcatcctccagcgcccaggagatggagcagcagcttgcagagcgcgagtgccccccccatgccgagcaacgacaacccacgaaaaagatgtctaaagtgaaggggcttgtgtccagtaggcactag

SEQ ID NO: 25273 - DNA, 1506 bp, synthetic construct
  source 1..1506: mol_type = other DNA; note = Synthetic coding sequence
atgagcagcgagcaggacaagagcgccagcaaggagaagagcaagaaaccagtgcggttcctgcctcaactgagcatggagaaactcgcctccaaggagaagttcaaggctccagcacgtgcactccctcagctgtccatggtgtccacgaagcctcattggcagcaagcagcaccatcattccacctaagcgtgaaacaggacgacgagtcaccggagcctttttctgtgaagaacgaacagtcccatgccgagtatatggagcggtttggaaagaagggcaagctccctcatcaggtggatgacagttacgtaggaccgagcacttcaaagagtaaagggaaatccccccacaaagaacgggagaactttcgttccaccctggtcaatgtgattatgcagcaggatgctgacctggatagcgccgtaccagacggatctactattcccaagcccacagcttctgcaatcgagaaagacattcttcgttactactactatatccaccatggcatcgacaccgaccacgttgccccaatggaggattcatggttagagcatgtgctggatttggtgcctcagcatctgaaggttttcacggatagcattgtgactctgagcgacgaaatgagagaagattacttactgagcgtccgaaagtcaattgtcgactttgtgctcaaggatccaagggagaagggtgatgacaagaaaacagacgagctcccagcacatcgcgctgagatggaaatcctgcctaaaccctggagaaagtccttcctggccgcatcttcatatatccgagaccacctcaacgctatgaatccgactatgcttgcggttttggatctttggcacactaactttaagaagctccggctggtagacatcaaggaatttcataattgtcaggacgcacttgagctgtcctcttttcagaatattataatgagacatatggactcagccaaggagacactgcttaaaatgtggtttcctgaggtgcagaacatctattaccagggtaataaaaaaaagcagctgcccacaggggactcttctgccaaactggaaagtttctttaactgtgccgctgcactgatgaccctgcaattgcaagaccttactctcgttagcatgcaagacttcaccgacctgatcgctcagcctcctgattccgtccgagcattcgagcatccaggctttatcatgcgcttgatcctggataacgatactatcaaattcgaaccagaactgagcgattacatcgacatcttcctgaatgtgtacgatgtgatgataaaggccgtgtccttcgtgccgcgggttgagacaaagctatattctaagtggcggaacaaggctaaacctggccacttttattttagccacatacagcgaagcgtgacgttccagcattccgaagtgagctctccccaaaactcgcacttcaagattgtgtccccctttagcgtactaggatttacatggcggtgtcagctgtag

SEQ ID NO: 25274 - DNA, 855 bp, synthetic construct
  source 1..855: mol_type = other DNA; note = Synthetic coding sequence
atgaccgacgtgcccgccaccttcacccaggccgagtgcaacggcgataagccaccagaaaacgggcagcagaccatcacaaagatctccgaggagctgactgatgtggatagcccactaccacattatcgcgtggagccttctctggagggtgccctcacaaagggaagtcaggaggagcgacgcaagcttcagggcaacatgctgcttaatagctctatggaagacaaaatgctgaaggagaatcctgaggaaaagttgtttatagtccataaagccataaccgacttgagcctccaggaaacctctgcagatgagatgactttcagagagggccaccagtgggaaaagattcccctgtctggctccaatcaggaaattagacgccagaaggaacgcatcaccgagcagcctcttaaagaggaggaggatgaggacaggaagaataagggccaccaagctgccgagatcgaatggttgggtttccgtaaaccatcgcaggccgacatgctccatagtaagcacgacgaggagcagaaggtttgggacgaggaaattgatgacgatgatgatgataactgtaataacgacgaggacgaagtccgagtgatagagttcaagaagaagcacgaagaggtctcccagttcaaagaggaaggcgacgcttccgaggacagccccctcagttccgcatcttctcaggcagtaactcctgatgagcagccaacactggggaagaagtctgacattagcagaaatgcctattcgcgttataataccatcagctaccgcaagattcgtaaagggaacaccaagcagcgcatcgatgagtttgagtcaatgatgcacctttag

SEQ ID NO: 25275 - DNA, 735 bp, synthetic construct
  source 1..735: mol_type = other DNA; note = Synthetic coding sequence
atgaagaaggtgcggctgaaggagctggagagccggctgcagcaggtggacggcttcgagaagccaaagctgctgctagaacagtatcccacacgaccccatatcgcagcatgtatgctgtacaccatccacaacacctatgacgatatcgaaaacaaagtcgttgctgaccttggctgtggatgcggcgtcctgtctattggtacagcaatgttgggcgccgggctctgcgtaggttttgacatagatgaggatgccctggaaatttttaacagaaacgcagaggagttcgagttgactaacattgacatggtccaatgtgatgtttgcctgctgtccaaccgtatgagtaaatcctttgacactgtgattatgaacccgccttttggcaccaaaaataacaagggcactgatatggcattcttaaagacagcactcgagatggcacgaacagcagtgtactccctgcacaagtccagtacacgcgagcacgttcagaagaaggccgcagaatggaaaataaaaatcgacattatcgccgagttaagatacgacctccctgcctcttacaaatttcacaagaagaagtcagtgtcactgctgattctcgccggccttcattcggtcttgaagagcttcctcggcagaatgtggtggttcatgccagttatccctgctactcgcgaggccgaagccagggagtcactcgagctgcgccggcagcggttacaatag

SEQ ID NO: 25276 - DNA, 885 bp, synthetic construct
  source 1..885: mol_type = other DNA; note = Synthetic coding sequence
atgaacaaccagaagcagcagaagcccaccctgagcggccagcggttcaagacccgcaaacgggacgagaaggagcgattcgacccgacacagttccaggactgcatcattcagggccttaccgagactggcaccgacttggaggcggtggcaaagtttctggacgcctctggtgcaaagctggattacaggagatatgctgagacactcttcgacattcttgtggccggggggatgttagcccccggcgggacattagcagatgacatgatgagaacagacgtatgcgtgtttgccgctcaggaggacctggaaaccatgcaggcattcgcccaggtgttcaataagctaattaggagatataaatatctggagaaaggttttgaggatgaagtgaagaagctcctgctttttctgaagggctttagcgagtcagaaagaaacaagctggctatgctcactggagttctcttggctaacggaaccctgaatgcgtctatcctgaattcactctataatgagaatctagtgaaggaaggagtatctgccgcattcgccgtaaagctgtttaagtcctggatcaacgaaaaagacatcaatgcagtggcggcttccctgcggaaggtgagcatggataatcgcctcatggaacttttccccgccaacaaacagagcgtggagcatttcacgaagtactttacagaagccgggctcaaggaactgagcgagtacgtgaggaaccagcagacaattggagctcggaaggagcttcagaaggagctacaggagcaaatgtctagaggggacccgtttaaggacatcattctttacgtgaaggaagagatgaagaaaaacaatattcccgagcctgttgtcatcggctag

SEQ ID NO: 25277 - DNA, 1374 bp, synthetic construct
  source 1..1374: mol_type = other DNA; note = Synthetic coding sequence
atgaaccagccctgcaacagcatggagccccgggtgatggacgacgatatgctgaagctggccgtcggggatcaggggccgcaggaagaagccggccagctcgcgaagcaggagggcatcctcttcaaggatgtgctatccctccagttagattttcgcaatatactccggatcgataatctctggcagtttgaaaacttgcggaagttacagttagataacaacatcattgagaagatcgagggcctcgaaaacctcgcacacctggtttggcttgacctgtcatttaacaacatcgaaacaattgagggtctggatacactggttaacctggaagacttatcgttgtttaataacagaatcagcaagattgattcccttgacgccctggtgaaactacaggtcctgtcccttgggaacaaccgcatcgataacatgatgaatatcatatatctgaggagatttaagtgcctgcgcaccttgtcactctctcgcaacccaatttccgaggctgaggactataaaatgttcatatgtgcttatttgcccgacctgatgtatctggattaccgcaggatagacgatcacaccaaaaaactagccgaagcgaagcatcagtactctatcgacgaattaaaacatcaggaaaacctgatgcaggctcagcttgaagacgagcaggcccagagagaagaactggagaaacataaaacagcgttcgtggagcatttgaacgggagtttcctgttcgactctatgtacgctgaggatagcgagggaaataacctcagttacctcccaggcgttggcgagctcttagagacctataaggataaattcgtgataatttgcgtgaacattttcgaatacggactgaagcagcaagagaaacggaagacggaactcgacacattttctgaatgcgtgcgagaggctatccaagagaaccaagagcagggtaagcgtaagattgccaagtttgaagaaaagcacctgtcatcactgtccgctataagggaagaactggagctgccgaatattgaaaaaatgattctggagtgcagcgcagacatctccgagctgtttgacgcacttatgacattggaaatgcaattggttgagcagttggaggagactatcaacatgttcgagcgcaacatcgttgatatggtggggctgtttatagaaaacgttcagagtttgatggcacagtgtcgcgatttggaaaatcatcatcatgaaaagcttttggagatcagcatatccacgctggaaaagatagtggaaggcgatcttgatgaggatctgcccaacgatttacgggcaggtcggtttcagaagttcaactacgtggaagccagcggtactttttag

SEQ ID NO: 25278 - DNA, 1638 bp, synthetic construct
  source 1..1638: mol_type = other DNA; note = Synthetic coding sequence
atgagcagcagcggctacccccccaaccagggcgccttcagcaccgaacagtcccggtatcccccccactccgtgcagtacactttccctaatacccgccatcagcaagagtttgccgtgcccgattataggagcagccatttggaagtgagccaggcgagccagctactgcagcagcagcaacagcagcagctccgccggagaccttccctccttagcgagtttcaccctggctcagatcgtccccaagaaagaaggacctcttatgagccgttccaccccggcccatcaccggtggaccacgactcactcgagtcgaaacgcccccggctggaacaagtatctgattcccacttccagcgagtgtcggccgctgtattgccactcgttcaccctctgccggaaggactgagagcctctgcagatgctaagaaggacccggcattcgggggcaaacatgaagccccctccagccccatttccggccagccctgcggggatgaccagaacgctagtccgtcaaaactgagcaaagaggaacttattcagtcgatggacagggtcgatcgcgagattgccaaagtggagcagcaaatcctgaaattaaaaaaaaagcaacagcaactggaggaggaggccgcaaagccaccagagcctgagaaaccagtttctcccccaccagttgagcagaagcatcgttcaatcgtccagattatttacgacgagaacaggaaaaaggcagaggaagcccataagatcttcgagggtttgggcccgaaagtggaactcccactgtacaatcagcccagcgacacaaaagtgtaccatgaaaatattaagacgaaccaggtaatgaggaagaaactgattctttttttcaaaaggcgcaatcatgccagaaagcagcgggaacagaagatctgtcaacgttatgaccagctgatggaggcctgggaaaagaaggtggataggattgaaaataatccacgtcgaaaggcaaaagaaagcaagactagggaatattacgaaaagcaattccctgagatccgtaagcagcgcgaacagcaggagaggttccagcgcgtgggccaaaggggcgccggactcagcgctaccatagcccgctcagagcacgagatctctgagatcatagacgggcttagtgaacaggaaaacaacgagaaacagatgcggcagctctcagttattcctcccatgatgttcgacgcagagcaaagaagggtgaaattcatcaatatgaatggcttgatggaggatcccatgaaggtatataaagatcgccagttcatgaatgtctggaccgaccatgagaaagagattttcaaagacaagtttatccaacaccccaagaacttcggactgatcgcatcttacctggaaagaaaaagcgtgcccgactgtgtactgtactactatctcacaaaaaagaacgaaaactataaagccctggtgagacggaactatggcaaaaggcgagggcgcaaccaacagcaaatcgctagaccatctcaggaggaaaaagtagaagagaaggaagaagataaagccgagaagacagagaagaaagaggaggaaaagaaagatgaagaggaaaaagacgaaaaagaggatagttag

SEQ ID NO: 25279 - DNA, 480 bp, synthetic construct
  source 1..480: mol_type = other DNA; note = Synthetic coding sequence
atgacccactgctgcagcccctgctgccagcccacctgctgccggaccacctgctggcagcctaccacagtcacaacttgctccagcactccttgctgccagccttcctgttgcgtatctagctgctgccagccctgctgtcaccccacgtgctgtcagaacacctgctgtagaacgacatgctgccagcccatctgtgtgacgtcctgttgccagccatcctgttgttccaccccatgttgccagccaacttgctgtggaagctcatgcggccagagctcgagctgcgcccccgtctattgccgccggacctgctatcaccccacatcggtatgcctccctggatgcctgaaccaatcctgtgggtcaaactgctgccagccttgctgtaggcccgcctgctgcgagaccacctgctgcagaactacatgcttccagccgacctgtgtgtacagctgttgccagccaagctgctgttag

SEQ ID NO: 25280 - DNA, 1071 bp, synthetic construct
  source 1..1071: mol_type = other DNA; note = Synthetic coding sequence
atggagggccacgaccccaaggagcccgagcagctgcggaagctgtttatcggtggactcagcttcgaaactaccgacgacagcctccgggagcattttgaaaagtgggggacactgaccgattgtgtggtgatgcgggacccacagaccaagaggtctcgaggctttggatttgtgacctattcctgtgtggaggaggtggatgcggccatgtgtgctaggccccataaggtggacgggcgcgtggtcgaacccaagagagccgtaagcagagaggattcagtcaaaccaggtgcccatctgacagtaaagaaaatcttcgtgggcggcatcaaggaggatacagaagagtacaacctcagagactattttgaaaagtacggaaagattgaaactatcgaagtgatggaggaccggcaatccggcaagaaacgtggctttgcttttgtaaccttcgatgatcacgataccgtagacaaaatagtggtgcaaaaataccacaccattaacggccataactgtgaggtcaagaaagccctcagtaagcaggagatgcagtccgcaggatctcagcggggcagaggcggtgggagtggaaatttcatgggacgtggaggtaactttgggggagggggcggaaacttcggacgtggagggaactttggtggaaggggcggttatgggggagggggggggggatctcgagggagctatggcggaggcgacggcggatataatgggtttgggggggacggcggtaactatggcggtggtccaggatacagttcccgaggggggtatggcggaggagggccaggatacgggaaccagggcgggggatatggcgggggcggcggttacgatggctacaatgagggcgggaactttgggggggggaactacggcggcggaggaaattacaatgattttggtaattacagtggccaacagcagagcaattacggccctatgaaaggcggctcatttgggggccggagctccggatctccctacgggggcggctacggctctggaggagggtccggtggatacggaagcaggaggttctag

SEQ ID NO: 25281 - DNA, 186 bp, synthetic construct
  source 1..186: mol_type = other DNA; note = Synthetic coding sequence
atgcccttcttcggcaacaccttcagccccaagaagaccccccccaggaagtccgcatctctgtcgaatctccacagcctggaccggtcaacgagggaggtcgaactcgggctggagtacggatccccaaccatgaatttagcaggccagtccctgaagttcgaaaacgggcagtggatcgcttag

SEQ ID NO: 25282 - DNA, 981 bp, synthetic construct
  source 1..981: mol_type = other DNA; note = Synthetic coding sequence
atgccccacctgcccctggccagcttccggccccccttctggggcctgagacactccagggggctgccccgatttcatagtgtctccacccagagcgagccacatggaagccccatctcacggcgcaatcgagaagcaaagcagaagaggttgagggagaagcaagctaccctggaggccgagatcgcaggtgagtccaagtctccggctgagtccatcaaagcgtggaggcccaaggaacttgtcctctatgagattcctaccaaacctggtgaaaagaaggatgttagcgggccgctgccacccgcatattcccctcgttacgtggaagccgcttggtacccatggtgggtcagggagggcttctttaagcccgagtatcaggcccgccttcctcaagccactggcgaaaccttttctatgtgcatcccaccccccaatgtgaccgggtctttacatatagggcatgcactgacagtagccatccaggatgcactggtccgttggcatagaatgagaggggaccaggtcctttgggtgccggggtcagaccatgcaggcatagccactcaggcggtggtggaaaaacagctatggaaagaaaggggagtaagacgccatgagttatcccgggaggcgtttctgcgggaagtgtggcagtggaaggaggctaaaggaggcgagatttgtgagcagcttcgggctctcggagcatcactggattgggacagggagtgttttacaatggatgttgggtctagcgtggctgtgacagaagctttcgttcggctgtacaaagcaggcctactttaccgcaaccatcagcttgtgaattggtcgtgcgctctgcgtagcgcaattagcgatatagaggtcgagaaccgccccctccccggacacacacagttgcgcctgcccggctgcccaacacccgtgtcctttggtttgctcttctccgtggcgttcccagtggacggatag

SEQ ID NO: 25283 - DNA, 2031 bp, synthetic construct
  source 1..2031: mol_type = other DNA; note = Synthetic coding sequence
atgatccccccccaggaggccagcgcccggcggcgggagatcgaggacaaactcaagcaggaggaggagaccctctcctttatcagagacagcctcgaaaagagcgatcagttaacaaagaatatggtgagcatattatcatccttcgaatcaagacttatgaagcttgaaaattcaattatccccgtgcataagcagacagagaatctacaacgcttgcaagagaacgtcgaaaagacgctcagttgccttgaccacgtaatttcgtattatcacgtagccagtgatactgagaaaataattagagaaggtcctacgggcaggcttgaggagtacctggggagtatggctaaaattcagaaagctgtggaatactttcaagacaactctcctgacagtcctgaattgaacaaggtcaagttgctcttcgagcgcggaaaggaagccctggagagcgaattcagatccctgatgacccggcacagtaaagtggtctcacccgtgctaattctcgatctgatctcgggagatgatgatttggaggcgcaggaggatgttactctcgaacacttgccagagagcgttctccaggatgtgatccgcatttccagatggcttgtggagtatgggcgaaaccaagattttatgaatgtgtattaccagatcagaagttcccagctggaccgcagcataaaaggattaaaggagcactttcataaatccagcagctctagcggagtgccctactcgccagcaatacctaataaacgaaaggatacccctacaaaaaaacccgtgaagcgcccaggtcatgagcatgactttcgcgtcaagcacttgtcagaggccctgaacgacaaacacggccctctagccgggagggacgacatgctcgatgtggagaccgacgcttatattcattgtgtcagtgcatttgtgaaactggcgcaaagcgaatatcagcttttagccgacataatcccagagcatcaccaaaagaaaacttttgacagcctgatccaagacgccctggacggcctaatgctggaaggtgagaacattgttagcgcagctaggaaggctatcgtacgccatgatttctcgactgtgcttacagtattcccaatcctacgacacctgaagcagactaaacccgagttcgaccaggtcttgcaggggaccgccgcctccacgaaaaacaaactccccggactaatcacatcgatggagacaatcggagcaaaagcccttgaggacttcgccgacaacataaagaatgacccagataaggagtataatatgccaaaagatggaactgtccacgaactcacatctaatgcgatcctgtttctgcagcagctgctcgactttcaagaaacggccggcgccatgctagcatctcaggaaacaagttctagcgccacatcttactcttccgaattcagcaaacgactgctgtcgacctacatctgtaaagtactggggaatcttcagctgaacttgttgagcaagagtaaggtttacgaggatcccgcgttatcagccatattcctccataataattacaattatattcttaaatccttagagaagtctgagctaatccagctggttgccgtgacgcaaaagaccgccgaacggtcctatcgcgaacacattgagcagcagatccagacataccaaaggagttggctaaaggtcacggactacatcgctgagaaaaacctaccggtatttcagcctggcgtgaaactcagagataaggaacgacagatcatcaaagagcggtttaaaggattcaatgatggactcgaagaactatgcaaaattcaaaaagcgtgggccatacccgacacggaacagcgcgaccggataaggcaagcgcagaagaccatcgtgaaagagacttacggagctttcctccagaaatttggatctgtgcccttcaccaaaaacccagaaaagtacataaaatatggagtggaacaggtaggcgacatgatagatcgtttgttcgacacctctgcttag

SEQ ID NO: 25284 - DNA, 459 bp, synthetic construct
  source 1..459: mol_type = other DNA; note = Synthetic coding sequence
atgaccgacgtgcccgccaccttcacccaggccgagtgcaacggcgacaagccaccagaaaatggtcaacagacaattaccaaaatctcagaagaattaacagatgtggactcacctcttccacactaccgcgtggagccaagcctcgaaggggctctgactaaaggaagccaggaagaaagaaggaaacttcaggggaacatgctcttgaattcatcgatggaggacaaaatgctgaaggaaaaccccgaggagaagctattcatcgtccataaggctattactgacctcagcctccaagaaactagcgctgacgaaatgacgttccgcgaaggccatcagtgggaaaagatccctctgtccggcagcaaccaagagatacgtcgccagaaggaacgcatcaccgaacaacccctgaaagaggaagaggacgaagaccgcaagaataaggggcattag

SEQ ID NO: 25285 - DNA, 768 bp, synthetic construct
  source 1..768: mol_type = other DNA; note = Synthetic coding sequence
atgtggcccttccccagccggagcctgttccccccccccacccaggcctggctgcagacagtctcttccgatcctgaggcgcaaggatggggggcttggaacgaaaccaaagagatcctaggcccggaaggaggtgagggaaaagaagaaaaagaagaggaagaagatgcagaagaggatcaggatggcgacgcaggattcctcctgtcccttttagagcaagagaatctcgcggaatgccctcttcctgaccaagaactggaagcaataaagatgaaggtttgcgctatggagcaagctgaaggaaccccacgcccgccaggcgtgcagcagcaggcggaggaggaagagggaacagctgcaggccaactgctcagccccgagacagtgggctgccccctgagtggcacgcccgaagaaaaggttgaggccgatcacaggagcgtgtacgttgggaacgtggattacggagggtccgctgaagagcttgaagctcatttctctcggtgcggcgaggtccacagagtcacaattttgtgcgacaagttctcaggtcacccaaaagggtgctgccgtaaggaacccacatccttaggcagcgcaccccagacagcaggcgccttcgaagatacacaggctcccggagggcatccctcgccaaccgccgcctccagagcagggcccggtagcgatcacaagggccgtactggccctgttgaaaacagccatcacggcttccatcgaataaagggtaagactagattctag

SEQ ID NO: 25286 - DNA, 3561 bp, synthetic construct
  source 1..3561: mol_type = other DNA; note = Synthetic coding sequence
atggagaaggccaccgtgcccgtggccgccgccaccgccgccgagggggaaggctctccacctgcagtggcagctgtagcaggccctcctgctgccgccgaagtcggggggggtgtgggaggaagttctagggcccgttcagcctctagccccaggggcatggtgcgagtctgcgacttactgcttaaaaaaaaaccccctcagcagcagcaccataaggccaagagaaacaggacttgtcgacctccctctagtagcgagagctcttctgactcagataattctggcggaggaggcggtggaggcggggggggaggaggcgggggggggacaagcagtaacaactctgaggaagaggaagacgacgatgatgaagaagaagaagtgtctgaggtggagtccttcatcttggaccaagacgatctcgagaatccgatgttggaaactgcatctaagctactgctttctggcacagccgatggggcagaccttcgtactgtggatcctgagactcaggctcgcttagaagctctgttggaagcagccggaatcggaaaactgtcaactgctgacgggaaagcctttgcggatcccgaggtcctgagacgcctaacttcttccgtgagttgtgccctggacgaggcagctgctgctctaacacggatgagggccgagtctacagccaacgcgggccagtcggataaccgttccttggctgaggcctgttcggagggggatgtaaatgccgtcagaaagttactgattgaagggaggtccgtcaatgagcacactgaggagggtgagtcactgctgtgcctggcgtgtagtgccgggtactacgaactggcacaggtactgctggccatgcacgctaacgtggaagatcggggcattaagggagatatcacacctttaatggccgcagccaatggcggccatgtaaagattgtcaagctgctgcttgcacacaaggcagacgtgaacgcccagagctctacaggaaacacagccctaacctacgcctgtgccggtggctacgtggatgtggtgaaggttctcctggagagtggagccagcatagaggatcacaatgagaacggacacacacccctcatggaagccggctcagctggccatgtcgaagtcgctaggctgctactggaaaatggggccgggataaacacccacagtaacgagtttaaagaatctgccctgactcttgcatgctacaagggacatctcgagatggtgagattcttgctggaggccggagcggatcaggagcataagacagacgaaatgcataccgctctgatggaggcctgtatggacggccacgtggaagtggcccgcttactactcgactcgggagctcaagtgaatatgcctgccgattcatttgagtcaccacttactctggcagcatgtggcggccacgtcgagctcgcggcactgctgatcgagcgcggggcatctctggaggaggtgaacgacgagggctacacccccctgatggaagccgccagagagggtcacgaagagatggtggcgctgctactcggccagggagccaacatcaacgcacagaccgaagagacacaagagactgctttgaccctggcatgctgtggggggttcctggaggtggcagatttccttatcaaagcaggcgcagacatcgagctgggttgtagcacacctcttatggaggccgcccaggaagggcatctggaactggtcaaatacctccttgcagctggggctaacgtacacgctacaacggccaccggggatacggctttgacttacgcttgtgagaacggccatacggatgttgctgatgtgttactgcaggcgggcgctgacttagaacatgagtcggaaggggggaggactcccctcatgaaggctgcgagggctggtcatgtgtgcacggtgcagtttctgatttccaaaggcgcaaacgtcaatcgaacaaccgcaaataacgatcatacggtgctatctctggcatgcgcaggcggccacctcgctgtggtggaactgctgctcgcgcacggtgctgatccaactcatagactgaaagacggcagcacaatgctcatcgaggctgctaagggtgggcacactagcgtcgtgtgttatctcctggactatccgaacaatcttctgtcagccccgccaccagatgttacacagctcactcctcccagtcatgatcttaacagggccccaagagtgcctgtgcaggcactgcccatggtggtgcccccacaagaaccagataagccgcctgccaacgtggcaacaacacttccgatccggaacaaagcggctagcaagcaaaagagctcatcacacctgccggctaacagtcaggatgtgcagggatacattactaaccagagccccgagtctatcgtggaggaggctcagggtaaactcacggaattggagcagaggattaaggaagcgatagaaaaaaacgcccagctccagtctttggagcttgcccatgcggaccagctgaccaaggaaaagatcgaggaattgaacaaaacgagagaagagcaaatacagaagaagcagaaaatcctcgaagagttgcagaaagtcgagagagagctgcagctcaaaactcagcaacagcttaaaaagcagtatcttgaggtgaaggcacagaggatccagctgcaacaacagcagcaacaatcatgccaacacctcggcctgctcacccccgtgggagtaggtgaacaactatccgagggggactacgcacggttgcaacaggtcgatcccgtgttgctcaaagatgagccacaacagaccgccgctcagatggggttcgccccgatccagccgcttgccatgccccaggctcttcctctcgccgctggaccccttccaccagggtctattgcgaacctcactgaattgcagggagtgattgtgggccagcccgtgctcggccaggctcaacttgccggcctcgggcagggcattttgacggagacgcagcagggcctgatggtagcaagtcccgcacagaccctgaatgatacactggatgatataatggccgcggtgtctggccgagccagcgccatgtccaacacgcctacccactcaatcgcagcttcaatctcacagccacagacaccgactcccagtcccattatttcacccagcgccatgctaccaatttacccagcaattgacatcgatgcccagactgaatcaaatcacgacaccgctctgacactggcctgcgctggcggtcatgaagagttagtccagactttgcttgaaagaggcgcctccattgagcatagggacaagaagggctttacccccctgattttggccgctaccgcgggacacgtgggggtggtagagatcctgctggataatggcgccgacatcgaagctcagagtgaaagaaccaaggatacacccctttccttggcctgtagcggcggcaggcaggaggtcgtggagctgctcctcgcgcggggtgccaacaaaagtacaggcatgtttctgattactcacttatag

SEQ ID NO: 25287 - DNA, 2682 bp, synthetic construct
  source 1..2682: mol_type = other DNA; note = Synthetic coding sequence
atggccgccaccgtggagggccccgagctggaggccgccgccgccgcaggagacgccagcgaagacagcgacgccgggtcccgcgctctgcctttcttgggcggaaaccgcttgtcactggacctatatcctggcggatgtcagcagctgcttcatctgtgcgtgcaacagcctctgcagctccttcaggtagagttccttcgcctctcaacccatgaggaccctcagcttctggaagcaacactagctcagctgccacagtcacttagctgtttaagaagcttggttcttaagggggggcaaagaagggacactctgggggcctgtttacgaggggccctgacaaacctgcctgccggtcttagcggactcgctcatctcgcacacctggacctgtccttcaactccctggagaccctcccggcctgtgtgcttcagatgaggggcctgggcgccttactcctttcccacaattgtctgagtgagctgcccgaggcactgggtgctctgccggccctgaccttcctcaccgtcacacacaatagactgcaaaccctaccaccagctttgggagccttgtccactctgcagagactggatttgagtcaaaacctcttggacaccttaccccccgaaatcggcggtctcgggagtctgctggagctcaatttggcgtccaacaggttgcagtcactgcctgcttctctcgctggactgcgatctctcagactgcttgtacttcattctaacctgcttgcatctgtgcctgcagatttggctcgactcccactcctgacacgactggacttgcgcgacaaccagctgcgggacttgcctcctgagcttctggatgcacctttcgtgaggctgcagggaaacccgcttggcgaggcctcccctgatgctccctcatctcccgtcgcggcgcttatcccggagatgccaagattattcctgacaagcgatctggattcttttcccgtgaccccgcagggatgctcagtgactttggcctgcggggttcgactccaatttcctgccggcgcaaccgctacaccaataactatccggtacagacttttgctgcccgagcccggcctagtccccctggggccacacgacgcgctattgtcgcacgtgcttgaattgcagccacacggtgtcgcttttcagcaggacgtgggtctgtggttacttttcacgcctcctcaagcacggagatgtcgggaggtggtggtgaggacgcgcaatgataattcatggggcgacctggagacctacctcgaggaggaagcccctcagcggctctgggcgcactgtcaggtgccccacttctcctggttccttgtcgtatctcggccagttagtaacgcctgtcttgtccctcccgagggaacactcttatgctcatcgggacaccctggcgtcaaggtgatctttcccccaggggccacagaggaaccgcggagggtgagtatgcaagtcgttagaatggcggggagggaattacaggcacttctcggggagcccgaagccgccgtgagccctctgctgtgcctgagtcaaagcgggccaccttctttcctacagccagtcacagtgcaactgcccctcccatctggaatcactggtctgtctctggatcgatcccgcctccacctcctgtattgggcccctccagctgccacctgggatgatattacagctcaggtagtacttgagcttacacacctttacgcgcgattccaagtcacacatttcagttggtactggctctggtacacaacaaaaaactgtgttggtgggcttgcccggaaagcatgggagaggttacggctccatagggtgaacttgatcgcactccagcggcgtcgtgacccagagcaggtccttctgcagtgcctcccgcggaacaaggtggacgcgacgctgagacgccttctcgagaggtatcgtggcccagagccctccgatacagtggaaatgttcgaaggcgaggagttttttgctgcttttgagcgggggattgatgtcgacgctgaccgtcccgactgcgtcgaaggcagaatctgcttcgtgttttacagccacctgaaaaacgttaaggaggtgtcattttaccgcggtgcagtcccggtcagagttcccgaggaggctgaggcagcacggcagagaaagggagcagatgcactctggatggccacgctaccaatcaagcttccgcggctcaggggttccgagggccctcgcaggggagctggcctgtctctagcacccttgaacctgggggacgctgaaactggctttctaacacagtccaatttactcagcgtcgcagggcggctaggccttgattggcctgcagttgcactgcatctcggagttagctacagggaagtgcagcggatcagacacgaatttcgggatgacttagatgagcagatcaggcacatgttgttctcttgggcagagcggcaggcggggcaaccaggtgctgtgggcctgctcgtccaagcactcgaacagagtgatcggcaggatgtagctgaggaggtgcgcgccgtcctggaacttggtcggcgcaagtaccaggactcaatacgccgcatgggactcgcgcccaaggacccagcactgcctgggtcgagcgcgccccagccgccggaaccagcacaggcttag

SEQ ID NO: 25288 - DNA, 1482 bp, synthetic construct
  source 1..1482: mol_type = other DNA; note = Synthetic coding sequence
atggacttcctgctgggcaaccccttcagcagccccgtgggccagaggattgaaaaggcgaccgatggatcattacagtctgaggactgggccctcaacatggagatttgtgatatcatcaacgagaccgaggagggccctaaggacgcgctgagggcagtgaagaagagaatcgtgggtaataagaacttccacgaggtgatgttagccctcacagtcctggagacttgtgtaaagaattgtggacacagattccacgtgttagttgcatcacaagactttgtggagtccgtgctcgttcggacaattctgccgaagaataatcctcctaccatagtccacgacaaggttctaaatctaatacagtcctgggcggatgcatttcgttcaagccccgatctgacaggagtcgtgaccatttacgaagacctccgcaggaagggcctggagtttccaatgaccgatctcgatatgctgagccctatccacaccccccagcggacggttttcaactccgaaactcagtcaggtcaggactctgtgggaaccgactcttcgcagcaggaggactccggacaacacgcagcaccactccctgccccacctatactgtctggagatactccgatcgctcccacccctgaacagattgggaagcttcgctcagaactggagatggtcagtggcaatgtgagggtgatgtccgagatgctgacggagctagttcccactcaggctgagcctgcagacctagaattactccaggaattgaacagaacctgtcgagctatgcagcaaagagtcttagagctgatacctcagatagcaaatgaacaactgactgaagagctgttgatagtgaacgataatctgaataacgtattcttgagacatgagcggtttgaaaggtttagaacaggacagacaactaaagctccatccgaggcagaaccagctgcagacctcatcgacatgggacccgatccggcagccactggaaatctctccagtcagctggcgggaatgaacctcggctcgagctccgtgcgggccggcctgcagtctctcgaggcgagcggaagactggaggacgagtttgacatgttcgcgcttacccgcggctcatccctcgcggaccagcgcaaggaagtcaagtacgaagcccctcaggccacagatggccttgcgggggccctagacgcccgccaacaatcaactggcgcaatcccagttacccaggcttgccttatggaagatatcgagcagtggctgtctaccgacgtagggaacgacgccgaagagcctaaaggggtgaccagtgaggggaaattcgataagttcctcgaggagcgggcaaaggccgcagataggctccccaacctatccagcccctctgccgagggtcctcctggaccacccagcggccctgcccctcggaagaagacacaggagaaagatgatgacatgcttttcgccctgtag

SEQ ID NO: 25289 - DNA, 663 bp, synthetic construct
  source 1..663: mol_type = other DNA; note = Synthetic coding sequence
atgaacagccagccccagacccggagcccccccagccggaccgtgcccattcactgcaccgacaattggaagcgaagaaaagtgctggagcagactcctgtgtatcggtcgctagccggtaggggttggatcaaatactgcattttttttcaacggccccagattcagcctcctagggccacaatcccaaactcttccccctctataagacccggtgctcaaaccccaaccgctgtgtaccaggctaaccaacatataatgatggttaaccatctgcccatgccataccctgtgcctcaaggaccacagtattgtataccccaatacagacactctggtccgccgtacgtgggacctcctcagcagtatcctgtccagcctccaggcccagggccgttttatcccggacccggccccggggatttccctaacgcttacgggacccctttttatcccagccagcccgtgtaccagtctgcgcccatcattgtgcccactcagcagcagccgccaccagcaaagcgggaaaagaagacaattcgaatacgcgatcctaatcaaggcggaaaggatatcaccgaggagatcatgtccggtggaggttctcgcaaccctacaccgcccatcggacgtcccacatccacaccaacgcctccacagtag

SEQ ID NO: 25290 - DNA, 414 bp, synthetic construct
  source 1..414: mol_type = other DNA; note = Synthetic coding sequence
atgagcctgttcggcaccaccagcggcttcggcaccagcggcacctcaatgttcggtagcgctacgaccgataaccataaccctatgaaggacatcgaggtaacttcttcacccgatgatagtatcggttgccttagcttcagccccccgacgctccccggcaactttctcatagccggcagctgggctaacgacgttaggtgttgggaggtccaagactctggacagaccatacctaaggctcagcagatgcacactgggcctgtattggatgtgtgttggtctgacgatggcagcaaggtcttcaccgccagctgtgataaaactgctaagatgtgggacttatcctcaaatcaggccatacagatagctcagcatgatgcccccgtgaaaacaatccattggataaagtag

SEQ ID NO: 25291 - DNA, 7809 bp, synthetic construct
  source 1..7809: mol_type = other DNA; note = Synthetic coding sequence
atgaagcggaaggtggtgaacacccacaagctgcggctgagccccaatgaggaggcattcattctcaaggaagactatgaacggagacggaagctgcggttgctccaagttcgtgagcaagagcgggatatcgcgttgcagatcagagaagatattaagcaacggagaaatcagcagttcacccggctcgcagaggaactcagagccgagtgggaagagtcacaaactcaaaagatccaaaacttggaaaaactctatttagcttccctgcgctctatgggggagggtcaccgccaagcaaaggagaacgaaccggatctggacgcattggcccaacgcgctgccgagaggaagcggaaggcggatctgcggcacaaggaggccctgaaggtgcagaagaatcaaaaagagatcctgctgaagcagaaaacatggcatattaaagcacggaaagaagccctgttggtggaaaaggaaagatctgccaaaattacttcactcccaccccccccacctacactgtttgagaacatcgaagttaaaaggatctctgccgtcaagacaaactcctcaacctaccaccacctccacaccttcgtcaacagggaaaccgacacgaagaggccagatgcaaggctggcggcagaggaagaggccaagcggttagaagagttgcagaaacaggccgcccaagagcgcatggagcgttttgagaaagcacatgtgagaggcttccaggccatgaaaaaaatccacctggcccagaaccaggaaaagcttatgaaagaactcaaacagcttcagcaggaggacctggcgcgcaggcggcagactgtcgcacagatgccaccgcagcttgtcgaacttccttataaacggagtgaaatgaaggaggactggcagagggagctcgagtttgcgttcgaagacatgtacaatgccgatcgaaaggtgaaaggtaatctcattctccacctggagcccgagcccctgccgacggtgaccaaccagatccaggacgaagagctggacctgtccatggagcaggagaacttgggggccgctgaagatcttccagtgactgaagccgagatttgtagctctgagacagacgtgcctctggttatgaagacgcagcagattcctagcaaagtgctgttcaagaaactcctgaataagatcaggagtcagaagagtctgtggacaataaagtcaatgagcgaggacgagagtgagatgataactactgtttcagaaattgagtcaaaagctcctactgtggaaagcggcactatcgcatccaaagaaagaaccctctctagcggccaggaacaagtagtggagtctgatacactgactatcgaaagcggccccctggcctccgaggacaaacccttgtcttgcgggaccaactctggaaaagaacaggaaatcaacgaaacgctgccaatcacaacagtggcccagagctcggtgttacttcatcctcaggaggcagcagccagaatcagaatgtcagcaaggcaaaagcagatcatggagatcgaagaacagaagcagaaacagctcgagttgctggagcaaatcgaacagcagaaacttagactggagacagattgcttccgtgcgcagttggaagaagagaaacggaagaagacacagccaacaggggtgggaattgcccccgccagctgcccagtcatatctgacgaagattctcacaggcagatgatcaggaactaccagcatcagctgcttcagcagaaccggctgcacagacagtccgtggaaactgcccgaaagcagcttctggagtaccaaaccatgctgaaagggcgctgccctagcgtgtccgccccctctctgataaccgatagcgtgatttcggtgcctagctggaaaagcgagcgcccgacagcgataagtgagcattgggatcagggccagaggcttaagctttcacccaacaagtaccagcctatccaaccaattcaaacctcaaaactcgagcaggaccattttcaggtggccagacaaaatcacttcccccaacggcaggtcgagacaaccgagacgcttcgagcatccgacatcctgaccaaccaggctctcgagagccaggaacatctgcgtcaatttagtcagactgagacacagcagcgagattacaagctggttcctaaggatagcgagaccctgagtagagctctgagccacgaccgacagctgatctcacaagatgccagaaagattagcgagacctttggggcaaccacatttcagtctctggagtcccagcagctgttttctgagaactcagagaacatctcctatcacctgactgaaccttcaagctttgttccattggttcctcaacattcgttctcatcattacctgtgaaggtcgaaagcggaaaaattcaggagccatttagtgcgatgagcaagagcaccgtttccacctctcatagtatcatctcccagatgcatgaccggccgctactccctagtgagaatatcactgcacagcagggaaacatgaaggccctgcaagagcagctggacttgcagaagaaggtgctgcaagccacccaggaagcgcaggagcagcttctgctgtgtaaacaaaaagaagtggagcagcagacaggtctctctgtgttccttccgctcgtcactccagatagctccgctctgctgccctctgcaaaggctgacctcggacgaattcaggagtcgtctccaactaagaataatattgcagtcagcagcgatcatcacgttatttctcagttgcaggacaaacgactatccctgagtcagcctatcctgagccaacagaacaactttaagtttttacaggaacaactgaatatccagaaagattcattgcaggccagacgtgaagcacaagaggttctctacgtacacaagcagagcgagctcgaccgcagagtttgctctgaacaggctgaaccgtctttcccttttcaggtagcccagcacacattcacgagtctaccttcggcggataccaagtctggcaaaattcaagaacagcatagttctaaatcggaaaaaggcctggtgtcatgccagtccgatattcctatttctcaggacggatctctttccttcttacagcagtttcttcctttgcatgattcactgaaattgctccaggaacaattgaccaagcagagagacacactacaagctagacatgaggcccaggtcgagctgcttctgcaccgccaacgcgatctgggcgattccaaaagcgggctggtctcatcttcttcgagtcctgttgtggtccagcactccgttgcctctcaggctagcgccaaggctgagcccaggcgaatccaagagctctacttaagcgaaaaggagaacgtgggaccttcctgtcacctgataattcccacctttcaggacaaatcactgagcttcccccagcacagtctggcacagcaggagaatctgaccatattgcaggaacagtctcagatacaaagagtcattctgggggcaaaggaaggtacacaggagtttgtgcacacagagtctgaattggagaagcggatcagctcggagcagaccggcacttccagcagtttgtcccaggtggatgagtctgaacggtttcaagaatgcatttctataaaaagcgattctactataccgctgtcccatccaaaaatccctcgctgccaagagcgcctgctgcgagtaagccaacatatgctcccactccaggataatctagaggaacaccaggcttggctggatactgagaaagaagcatttcatttctctcagaagacacaggagaatacaagtagcgaacagactggctcctcatccttcattcctcagctagtacaactgtcctttacatctctggctagtgcagagtccggaaccatccttgagcccctctttactgagagtgagagcaaaatcttttccagtcaccttcagatcccacagttacaggaccgtcttttgagaatttctcagttgatccagccacagcaggacaacctcaaggcattgcaggaacagctcgcaacgcagcgagaggccattatccttgcgcgacaggaggcccgggaagagctgttgttgcaccagtcggaatgggaggggcgcatctcacctgagcaggtcgacacttcctccctgcctctggtgccccagcacagcttcgcttccctgcctctcaacgagagcgaaagaaatcaggaaccttgctctataaacagtgataatatcgtctcctctggccattccgaaattccaactctgcctgacgggctgctgggcctttcccacctcgttctgccacagcaggataatcttatcgcactggaggagcacctgcatgctcaaaccgatttcctcccttccatcgaaaagacccagaaggaactcgttctgtcaaaaccctgcaagtttgaagaaaaggtgagctcagaacattttattcaatcccaccacggcgatctccaagctctacagcagcagctagatactcaaaagaaggccattcgcagtatccaggaggtccaagaggaattgttgctacagcggttgagcgagcttgaaaagagagtgtccagcgagcaggtgtgttccagttctttcgtcagtcaggtccctgtcgccgacagcgaacggactcagaagagttttcctacaaaaagcaatgacacactgccatcatcccaccgagagataccccggctacaagatcgcctactgtcccttagcaagcctatcctccctcagcaggacaatatgacagcacagcttgacgcccaaagggaggtgatgtactcctatgaaaaacctcaggaggagcttagcctgaacaaacagcgcaagctcaacaaaagcgaaagtgcagagcacactattccaagcctcttcttaccgaaagagaccgaacactcctttattcccttgccgtttgcggaagccaagcccaaaagtacttgcgaattgtattcaagccagaatgaacacgcagctccaccatccaacccagtgattccaggattccaagacaggttgctgtccttttcccagtcagtcctgacgcagcaggacaatttgggcctgcaaaaacaattggatctgcagagagaggtattgcactactcccagaaggcacaggaaaagcttttagtgcagagacagaccgcattgcaacagcagatacaaaagcacgaagaaacactgaaggacttctttaaggacagccaaatatcaaagcccaccgtggaaaatgatctaaagacccagaagatgggccagctgagagattggtttcccaatacacaagatctggctggtaacgatcaggaaaatattcgtcatgccgacaggaacaatagtgatgacaaccatctggctagcgaagacacctcagcgaaacaatccggcgagcaccttgagaaggatttggggagacggtcctccaaacccccggtcgcgaaagtgaagtgcgggcttgatttgaatcaacacgagctttccgcaattcaggaagtcgaaagtccagccattgggcgaacctctatccttggcaaacccgggatatacgaggaccgagacccattacgggtttcaatctccagagaacagtctttctttgggtctcccctcgcccacgatccgttctcttgccttcagctggtgggtcaggagaacgtgtgcggcgacgactacgacgaggccgttaagctgaaggaatcggtcgtggaaaatcatgcagtcctgagctatgccgtggaggaggaacacgcctacttgggccctactgtgaaaccggatgacaaagctaaaacactatcttacgagccactgtcctctgcaaccgtgtcaacaggcagcttgctgtcctacgagaacactgatctgtccctcacagatccagagtccttctctgaacacatggatgacagcaagcaggaatccaccacatcaaaagaggaggagaccaacataatttctagtatcgtgccatccacccaggacatctatcagaggcagaacagttccgatgtgcacaagtcactgctgcctgccgttgacgagacaacttgtggccacactcacttccagcagatgatcgataagtatatcaacgaggctaacttgattccagaaaagacagacctgcaggagctagaacacatttttcccaacctacatcatcagctcttcaaaccactagaaccgcaccctgactttgatctctctagctccagctcaggtatatcccctgacaatcgcgacttctaccagaggagtgattcttcatctgagagtcactgtgctaccggcctgtcaaagagcacagtttattttactgctcttagaagaacctctatgcacagcagcctcaatacttcccctaaccaacaacctgatacgaatctggcacatgtcggagctcatagttttgccactgaaaacatcataggagggtccgaacagtgttttgagcagctgcagccggaatattctagccaagaagaaagtcagcatgccgatctacccagtatcttctctattgaggcccgggacagctctcagggcatgaaaaatcagaactaccctagcgaagagcatacggaaatccttcagaataagaagaaaattgtgcattttcaactgagcattggcaatctttcaagcgtgtactccagcagcgacgaggccaacgtgttcgatcagctgaacgtgcagcactctactccatgtggttctaacagctctgagtgtagcacaaagcatcaactggaatctaggaaagagtcaatgggtttcgaggagttgtcgaaaaggggggtggtaacgatgctccagagccagggccttatcgaggacaacaagaatgaaacctgcagggtgctggacataaatcctcaggttgaggaaaccgatagtagactctgtgttcggactgtcgagatgggcacatcaatccaagccccttattctcttactacgcagaacgagaagtattttgagaactccgctgagaccgatatccctaaaataacgaaaaaattgagtcagttgggcgaatctgagctttttgcttccagtggcagcttctcgctgcagtcctccatccctgtgtgggaaactgagacagggcatggtatcatggaagaacccgaactgacattgatttcgacaacagacacttcgattgctgagatggacttcgctaacctgacattggaagagaagtcggagaatgaggctaagtgcttcttccaggtgtcagaatttctaccactggtgtcagcaacagaagcatctgactatcctgcggtctccgagctgtccatcgaaaaacccagaacagctagcacagctgaaacccctcggcgacttaccccagtgccagggtccttacaagaggcatttataaagagaaagaagtcctttatggagcggagtcatcagcgacagaaggaaataagaaataaaatccacgtgtcagaaaatagccagatcaagacggtgaaagaaaaacccagtattagcagcagtgtgagcaggctcaagggggtgaacaaggtgcgcgccagttttcccgaggatagaaagactacacaggcactgcggcaccagaggggcctgagactgtacaaccagctggccgaagtaaagcagcaaaaagaggagaagaccaaacaggaagcctatgcccagaatagggctagggccaaagagttccacaagaaaacactggagaaactcagagccaaaaatacttgctag

SEQ ID NO: 25292 - DNA, 1602 bp, synthetic construct
  source 1..1602: mol_type = other DNA; note = Synthetic coding sequence
agcgcccccagcgtgggcaacgacatgggcaacgacgacgccatcggcgggaacgtgagcaaatacatcgtattgcccacaggctactgtgggcagcccaaaaaaggacacctaatttttgacgcctgttttgagtctggcaatctgggacgcgtcgatcaagtctctgagttcgaatacgatctgtttatccgaccggatacctgtaaccctaggttccgtgtctggtttaattttacagttgaaaacgtaaaggagtctcagcgcgtgatatttaacattgtcaatttctccaaaaccaaaagtctctatcgggatggtatggcacccatggtgaagagcacttcgcgccctaagtggcagaggctcccccctaaaaacgtttattactacaggtgccctgaccacaggaagaattatgtcatgtccttcgcattttgctttgatcgggaggaggacatttatcaattcgcctactgctatccgtacacatacacccggttccagcactacctggattccctccagaagaggaatatggactatttttttcgcgagcagcttggtcagagtgtacagcagcggaaacttgatcttctaacgatcacgtccccggacaatttacgggagggggcagagcagaaggtggtttttatcacggggcgggtgcaccctggcgagactccaagctctttcgtgtgtcagggtatcattgattttctagtgagccaacatcctatcgcgtgcgttctgagagagtacctggtgtttaaaatcgccccaatgttaaacccagacggcgtctaccttgggaactataggtgtagcctcatgggcttcgatctgaacagacactggctagatccgtcaccttgggtacaccctacccttcatggtgtgaagcagctgatcgtgcagatgtacaatgacccaaagacatcgctggaattctatatagacatccacgctcattcaaccatgatgaatgggtttatgtatggtaatatcttcgaggacgaagagagattccagcgacaggccatatttccgaaactcctatgccagaacgcggaagatttttcttattcttcaacctcttttaaccgggacgccgtgaaagcaggaaccggccggaggttccttggcggcctgctggatcacacttcatactgctacacgctggaggtgagcttctactcctatatcatctctgggacaacagccgctgtaccttacacggaggaggcatacatgaaactggggcggaacgttgcgcggacttttctcgattactaccggctgaacccggtagtggaaaaggttgctattcctatgcctcgtctgagaaataaagaaattgaagttcagcggcgcaaggaaaaatcgcctccgtacaaacacccactgctgcggggacccgcttccaactatccaaatagtaagggcgataagaaatcttctgtaaaccacaaagatccctcaacaccatttaaaactcgaagtccaggccgcagctacggcgaccggagtatgcacttcctgttaggcaacgaaatcaatcacagtagtctggctagcaaggatctctggatcaacgcctag

SEQ ID NO: 25293 - DNA, 1509 bp, synthetic construct
  source 1..1509: mol_type = other DNA; note = Synthetic coding sequence
atgcccgagatccgggtgacccccctgggcgcctgccccgtgctgtcgtggaatctagttctgccacccgggcgaggcagcagggccccatcctccaccgacacgcgtactggttttcacgtgttgccgcatggcgtggatgacgaacttgagatcaaggcctactacgcagggcatgtcctgggtgctgccatgttccagattaaggtgggttcagaatccgtggtgtacaccggtgattacaatatgacacccgacaggcacctgggcgcggcatggatagacaaatgccgtcctaacctgttaataacagaatccacatacgctactaccataagggactcaaagaggtgccgagagagggactttctaaaaaaggtacatgagaccgtggagcgtggtggaaaggttcttattcctgtttttgcactgggacgcgctcaggaactgtgcatcctcctggagacattctgggagaggatgaacctcaaagtgccgatctacttctccactggactaactgagaaagctaatcactactataagctgttcattccctggaccaatcagaagattcggaagacgtttgtgcaacgcaatatgtttgaattcaaacatatcaaggcttttgaccgtgcttttgccgacaacccaggcccgatggtggtgtttgctacccctggcatgcttcatgccggacagagtctccaaatcttccggaaatgggctggaaatgaaaagaacatggtgatcatgcccgggtattgtgtgcagggaaccgtgggccacaagatcctgtcaggacagaggaagctggagatggagggacgccaagtgttggaagtaaaaatgcaggtggagtatatgagcttcagtgctcacgccgacgcaaaagggatcatgcagcttgtgggtcaggctgaacctgaaagcgtactcttggtgcacggtgaggcaaagaagatggagtttctaaaacagaaaatcgagcaggagctccgtgtgaattgctacatgcccgctaacggagagacagttacactgcccacgagcccctcaatacccgtaggcatctctctgggcttattgaagcgagagatggcccagggccttctgccagaggcaaagaaacctcggttattgcacggaacactgatcatgaaggactctaacttccgactcgtcagtagcgagcaggccctcaaagagctggggctggcggagcatcagttgcggtttacttgccgcgttcatctgcacgacacccgcaaggagcaggagacagcactcagggtttactcacatctaaaatcagttctaaaagatcattgcgtgcaacacctgccagacggctcagtgacggtggagtctgtactgctgcaagccgcagccccttccgaggaccccggcacgaaggtactgttggtttcctggacataccaagatgaagagctgggttcatttctgactagcctgctgaagaaaggcctgccacaggcaccaagttag

SEQ ID NO: 25294 - DNA, 1371 bp, synthetic construct
  source 1..1371: mol_type = other DNA; note = Synthetic coding sequence
atggccgacagcctggagagcacccccctgcccagccccgaggaccggctggccaagttgcatccatccaaggaattgttggagtactaccaaaagaagatggctgaatgcgaggccgaaaatgaggatttactcaaaaaactggagctgtacaaggaagcctgcgaaggacagcacaaattagagtgtgacctccagcagcgcgaggaggagattgccgaactccaaaaggccctgtctgacatgcaagtctgcttattccaggagcgggagcatgtgttacggctctatagcgaaaacgatcgcttacggataagagagctggaggataagaagaagattcagaacttattggcactagtcggcaccgatgcaggagaggttacctatttttgcaaggagccgcctcacaaagtcacaattctgcaaaaaacaattcaggccgtgggggagtgtgaacagtcagagtcaagcgcgttcaaagcggatcctaagatctccaagcgtcgccctagccgagaacgtaaagaatcaagtgagcactaccaacgcgatatccagacgctgattctgcaagtggaggcacttcaggcccagctcggcgagcaaaccaagcttagtagagaacagatcgaaggcttgattgaagacaggcgtatccatctggaggagatccaggttcaacatcaacgcaatcagaataaaatcaaggagctgaccaaaaacctgcatcacacccaggaactgctgtacgagtccaccaaggactttctccagctgagatcagaaaatcagaacaaagaaaaatcatggatgctggaaaaagacaacttgatgtctaagattaagcagtatcgcgtgcagtgcaaaaaaaaagaggacaaaatcggcaaagtgctaccagtgatgcatgaatcccatcacgctcagagtgaatacatcaaatcactgaaagataaacttgttcaggagaagaaactcagcaacatgtaccaggaacagtgcattagtctggaagaggaactcgcacgcattcgcgaagaggagggaatgaggcgcgagatcttcaaggacaggactaacaagatgggaaaaaggctgcagatcatgactaagcgctacgaggccctcgagcgcaggagaatcctagaggtcgagggattcaagaccgacatcaaagtgctccgccaaaaactcaaggacttggaacagatgctctacaaggccactgtgaacgctagggccaatcaagatctggccctgctgtgcgaagtcagggattctaaccgacgcgcccacaagatccaaggggagttgaaaaacctgaaatccaaagttttcggtctggaaaatgagttacgcttgtgttag

SEQ ID NO: 25295 - DNA, 270 bp, synthetic construct
  source 1..270: mol_type = other DNA; note = Synthetic coding sequence
atgagcgagcagggcgacctgaaccaggccatcgccgaggagggcggaacagaacaagaaaccgctacacccgaaaatgggattgttaaatctgagtctttagacgaagaggagaagctcgagctccagagacggctggaagctcagaaccaggagcggcgaaagagtaagtctggagccggtaaagggaagttaacgagatctctcgccgtatgcgaggaatcctcagcccgaccgggcggggagagcctgcaggaccagaccctatag

SEQ ID NO: 25296 - DNA, 453 bp, synthetic construct
  source 1..453: mol_type = other DNA; note = Synthetic coding sequence
atgcaccccgaggacagcgtggtgagcagcaaggtgctgggctgctcccatttcccagtagcatctcgacccgcgggctcccacgaccctcagcccggccatagaggtagagtccttggacccgctcgggctccaggatgggtgcgatatgcagaaagggtcctgggccggcccattacagctcatctctgtacagccaagtctccgcagcaagtgatgggatccctggtgaaggattattttgcccggcagcagaatctgagcccagaaaagatctttcatgtcattgttgcgccatgctatgataaaaaactggaggctttacaggagagcctgccgcctgcgttgcacggtagccgcggtgccgattgcgtattgacctccggagaaattgcccaaattatggaacagggcgatctatccgtgcgcgacgcagcagtggataccctgtag

SEQ ID NO: 25297 - DNA, 534 bp, synthetic construct
  source 1..534: mol_type = other DNA; note = Synthetic coding sequence
atgggctgctgcggctgcagccggggctgcggcagcggctgcggcggctgtggctcttcctgcggcggctgcggatccgggtgcggtgggtgtggaagcgggaggggcggttgcggatcaggatgcggaggatgcagttcttcctgcggggggtgcggcagtaggtgctatgtgcctgtgtgctgttgtaaacctgtttgcagttgggtgcccgcttgtagctgtacgtcttgtggctcatgcgggggctctaagggtgggtgcggctcatgtgggggatcaaagggcggctgcgggagctgcggcggcagcaaggggggctgcgggtcatgcggttgctcgcagtcctcatgttgcaaaccttgctgttgcagtagcgggtgcggcagtagttgttgtcagtcgtcatgttgtaagccttgctgctgccagtcaagctgttgtgtgccagtatgctgccagagctcttgctgcaaaccttgctgttgccaatcaaactgctgcgtcccagtgtgttgccaatgcaagatatag

SEQ ID NO: 25298 - DNA, 294 bp, synthetic construct
  source 1..294: mol_type = other DNA; note = Synthetic coding sequence
atgcccgccgagctgtggctgaccagctacggcgtgcgggaggtggaccaggtaaaacgcttgacgggacctggtctgtccgaaggacccgagcccagcatttctgtcatggtgacaggcggaccatggcctacgcgcctgagtcggacctgcctccactatctcggggagttcggcgaggatcagatctatgaagctcatcagcaaggacggggcgctctggaggctctcctgtgcggcggcccacagggcgcatgctccgaaaaagtgagtgctacaagggaggagctgtag

SEQ ID NO: 25299 - DNA, 264 bp, synthetic construct
  source 1..264: mol_type = other DNA; note = Synthetic coding sequence
atggagaaccagctggccaagagcaccgaggagcggaccttccagtaccaggactccctgccatcgcttccagtgccgtcattggaagagagccttaagaagtatcttgagagcgtaaagccattcgccaaccaagaggaatataagaagactgaggaaattgtgcagaaatttcaatccggcattggtgagaagctgcaccagaagctgctggaaagggccaaaggcaagcgcaattgggtgtttgttgtcatcattgaatag

SEQ ID NO: 25300 - DNA, 1881 bp, synthetic construct
  source 1..1881: mol_type = other DNA; note = Synthetic coding sequence
atgtgcagcaccctgaagaagtgcggcacctaccggaccgaggtggcagagtgtcatgaccacggcagtacctttcaaggccgtaagaagggcggatccagctttcgagacaatttcgacaaaagatcttgtcactatgaacacggaggttacgagagacccccctcacactgtcaggagaacgatggttcagttgaaatgcgcgatgttcataaggaccagcagctgcggcacaccccttatagtattaggtgcgaacgccggatgaagtggcacagcgaagacgagatcagaattaccacctggcgaaatcggaagcccccagagcgaaaaatgagccagaacacccaggatgggtatacgagaaactggttcaaggtgaccattccctatggaatcaaatatgataaggcttggctgatgaatagcatacagtcgcattgcagtgaccgctttactcccgtggatttccattatgtgcggaaccgcgcatgcttcttcgtgcaggatgcctcagccgcctctgctcttaaggacgtatcatacaagatttatgacgatgagaatcaaaagatctgtatcttcgtgaatcattctaccgccccctattccgttaagaacaagctcaaacctgggcagatggagatgttgaagttgacaatgaacaagcgatacaatgtcagccaacaggccttagatttgcagaacctcagattcgatccggacctgatggggcgcgacatcgacatcatacttaatagacgcaactgcatggccgccaccctcaagatcatcgagcgcaacttcccagagcttttgtccctgaacttgtgcaataacaagctgtaccagctggacggcttgtccgacatcacagagaaggctccgaaggtgaagacgctcaatttatcaaagaataaattggagagtgcatgggagctcgggaaggtgaaaggcttaaagctggaggagttgtggctggaggggaatcctttatgctctactttcagtgaccaatcggcctatgtgagtgctattcgggactgcttccctaaactcctacggctggatggaagagaactgtccgcccccgttatagtggacattgacagctctgaaacaatgaaaccttgcaaggagaactttaccggttcggaaacactaaagcatcttgttctccagtttctgcagcaatactatagtatatacgatagtggcgatagacagggcttgctaggcgcctaccatgatgaggcctgcttttccctggcaataccattcgaccccaaagacagcgctccctccagtctttgcaagtactttgaagattccagaaatatgaagacgcttaaggacccttacctaaagggtgagctcctgagaaggactaaacgggacatcgttgactccctctcagcactgccaaagacccagcatgatctgtcaagtatcttggtggacgtgtggtgccagaccgagcggatgctgtgcttctccgtaaatggcgtctttaaagaggtcgaggggcagtctcaggggtcagtactcgcgttcacaaggacattcattgccactccaggaagttcatccagtttatgtatcgtgaatgacgaactcttcgtgagagatgctagcccgcaagagacccaaagcgcattcagtatccctgtctcgaccctctcctcctcttccgagccttcactgagccaggagcagcaggaaatggtgcaagcctttagtgcccagagtggcatgaagctggaatggtctcagaagtgtctgcaggataacgaatggaattacactcgagctggacaggccttcaccatgctgcagacggaagggaagatcccagcggaggcattcaaacaaatcagttag

SEQ ID NO: 25301 - DNA, 2940 bp, synthetic construct
  source 1..2940: mol_type = other DNA; note = Synthetic coding sequence
atgctgtgctggggcaacgccagcttcggccagctgggcctgggcggtattgatgaggagatcgtgctggagccgaggaagagtgacttcttcattaataagcgcgtgcgggacgtgggatgtggcctgaggcatacggtattcgtgttggatgatggaaccgtgtatacctgtggctgcaacgacctcggacagttgggacacgaaaaatcacgaaaaaagcccgaacaggtggtggcactcgatgcgcagaatatcgtagctgtttcctgtggcgaagcccataccctggccctcaacgacaaggggcaggtgtacgcgtggggccttgattccgacggtcagctgggactcgttgggtcggaggagtgcatccgcgtgcctagaaacatcaagtccctctcagatattcagatcgtgcaggtggcttgcggatattaccacagccttgcgctgtccaaagcatcagaggtcttttgttgggggcagaacaagtacggccagctcgggctgggtacagactgtaagaagcagaccagcccacagctgctgaagtctcttctgggtattccctttatgcaagtcgctgcaggtggtgcccactctttcgtgctaacactgagtggagctatatttggatgggggagaaacaagtttggtcagctgggcctcaacgatgaaaatgacaggtatgtccctaacttgctcaagagcctgaggtctcaaaaaatcgtctacatctgctgcggggaggatcatacggccgcactgactaaggaggggggcgtgtttaccttcggggctggaggatacgggcaacttgggcataacagtactagtcatgaaattaaccccaggaaagtattcgaactcatgggttctatcgttactgagatcgcctgtggaaggcagcacaccagcgccttcgtcccttcttctggccgcatctattccttcggcctgggaggcaacggtcagctgggaacgggaagcaccagtaaccggaagagtcctttcacggttaagggcaactggtatccttacaatggccaatgtcttcctgatattgactccgaagagtacttttgcgttaagagaatcttttcggggggtgaccagagctttagccactattctagccctcagaattgtggaccacccgatgattttcgctgcccaaatccgaccaagcaaatctggacggtaaacgaggctctgatccagaaatggctgtcgtatccttcaggccgcttccccgtggagatcgctaacgagattgatgggactttttctagttcaggctgcctgaacgggtctttcctagccgtcagtaacgacgaccactacaggactggtactcgcttttcaggggttgacatgaacgcagctcgactattgttccacaagttgatccagccagatcatcctcaaatcagtcagcaggtggccgcatcactagaaaaaaatcttatccccaagctgacatcctcacttcccgacgttgaagcccttagattttatctgactttgccagagtgtcctttgatgagtgactcaaataactttacaaccatcgcaatccccttcggcaccgccctggtgaatttggagaaagccccactgaaagtcctcgaaaattggtggtccgtgctggagcccccactgttccttaagatcgtggagctctttaaggaggtggtggtgcacctgttaaagctctataagattgggataccgcccagtgagcggcgcatctttaactctttccttcataccgcattaaaagtgttggaaattctgcatagagtgaacgaaaagatgggacaaatcatccagtatgacaagttctatatacatgaggtgcaggagctgattgacatacggaacgattacattaattgggttcaacagcaggcatacggcatggatgtgaatcatggccttaccgaactagccgatattcccgttactatctgtacataccctttcgtcttcgatgcacaggccaaaactacgcttctccagaccgatgccgtgctccaaatgcagatggcaatcgatcaagcccacagacagaacgtgagcagtctatttctgcctgtgatcgagtccgtcaatccctgtctgattctcgtagttagaagagaaaacatagtcggggacgctatggaagttctgaggaagacaaagaacatcgattacaagaaacccctgaaggtgatatttgtcggcgaagacgctgttgatgctggcggtgttcgcaaggaattcttcttgctgattatgagagagctgttggacccaaaatacgggatgtttaggtattacgaggactctcgcttgatctggttctccgacaaaattaccgttgagaacttcggggcgacagaggtgaaggagctagtgctcaacggagcggatacagccgttaataagcaaaacaggcaagagtttgttgatgcctatgtggactacatcttcaacaaatcagtggcgtcactattcgacgccttccatgccggctttcataaggtttgtggaggaaaggtactactgctgtttcagccgaatgagctgcaggccatggtcattgggaataccaactacgactggaaggagttggagaagaatacagagtataagggggagtactgggctgagcatccaacaattaagatcttctgggaagtgtttcacgaactgcccctggaaaaaaaaaaacagttcctcctctttttaacagggtcagatagaattccaattctcggcatgaaatcactgaaactagtcattcaaagtactggcgggggagaggaatatcttccagtatcacatacctgcttcaatttgctggatcttcccaagtacacagaaaaggaaactctgcgcagcaagcttattcaggctatcgaccacaacgagggcttttccctcatttag

SEQ ID NO: 25302 - DNA, 1020 bp, synthetic construct
  source 1..1020: mol_type = other DNA; note = Synthetic coding sequence
atgaagatcttcgtgggcaacgtggacggcgccgacaccacccccgaggagctagctgcgctttttgctccctatggcaccgtaatgagctgcgccgttatgaagcagtttgccttcgtacacatgagggaaaatgcaggggccttgcgagccatcgaggcgctgcacggccatgaactacgccctgggagagctcttgtagtagagatgagccggcccagacctctcaatacttggaagattttcgtcgggaacgtttcagcggcttgtacaagtcaggaactgcgctctctctttgagcgcaggggtagagtgattgagtgtgatgtggttaaaggaaagcgcatgcacgttcagctctctacatcccgcttgcgaactgctcccggaatgggcgatcagtccggatgttaccgctgtgggaaggagggccattggtcaaaggaatgccccatcgatcgctcaggtcgcgtcgccgacctcaccgaacaatataatgagcaatacggcgcagtgcgcactccgtataccatgtcgtacggcgactcattgtactacaataacgcgtacggggctctcgacgcctattataaacggtgtagagccgcccggtcctatgaggccgttgccgctgccgcagcctccgtatataattacgctgagcaaacactcagccagcttccacaagtgcagaatacagcaatggcaagccacctaacttcgacgagcctcgacccctatgacagacatttgctccccacctccggagccgccgctaccgcggcagccgcagcagctgctgccgctgctgtgacggcagccagtaccagctactacggcagggaccgctctcccctgcgtagagctactgccccggtcccgacggtaggagaaggctacggctacggacacgaaagtgaactgagccaggcttcagccgcggcgagaaacagtctatacgacatggcccggtacgagcgtgagcagtacgccgatagggcgaggtacagcgccttttag

SEQ ID NO: 25303 - DNA, 390 bp, synthetic construct
  source 1..390: mol_type = other DNA; note = Synthetic coding sequence
atggccgagctgatccagaagaagctgcagggcgaggtggagaagtaccagcagctgcagaaggacctttccaagtccatgagcgggaggcagaagctagaagcccagctgaccgagaataacatcgtcaaagaggagctggccctgttagatgggtccaatgtagtgttcaaactgctggggcccgttttagtgaaacaggagctgggggaggcgcgcgccacagttggcaaacggctcgattatattacagccgaaataaaacgctacgaaagccaacttcgcgacctggagcggcagtctgagcagcagagagaaacactcgcccagctccaacaggagttccagcgcgctcaggccgcgaaagccggtgcacctggtaaggcctag

SEQ ID NO: 25304 - DNA, 1695 bp, synthetic construct
  source 1..1695: mol_type = other DNA; note = Synthetic coding sequence
atgagctaccccgccgacgactacgagagcgaggccgcctacgacccatacgcctatccgagcgattacgacatgcacactggcgacccgaaacaggacctcgcctacgaaaggcagtatgagcagcagacctaccaggtcatacctgaggttatcaaaaatttcatccaatattttcacaagacagtaagcgatctgatcgaccagaaagtttatgagctacaagcttccagagtgtcgtctgatgtcattgaccagaaggtttatgagattcaggacatctacgaaaacagctggaccaagttgacagagaggttttttaagaacactccttggcccgaggctgaagccattgccccgcaggtcggaaacgatgctgtgttcctgatactgtataaggaactgtattatcggcatatttatgcaaaagtatctggggggcctagcctggagcagcgattcgaatcgtattataattattgtaatctgtttaactatatcctcaatgccgatgggcccgctcctttagagctcccaaaccagtggctgtgggacatcattgatgaattcatttaccagttccaatcattctcgcagtacaggtgcaagacggcaaagaagtctgaggaggagatagactttctgaggagcaaccccaaaatttggaacgtgcactccgtattaaacgtgctccactcactagtagacaaatcaaacattaataggcagctggaagtgtacacatctggaggcgatcccgaatcagtggctggtgagtacggcaggcactccctctataagatgctggggtacttttccctcgttggattgctccggcttcattctctactgggcgactactatcaggccatcaaagtgctggagaacatagaattgaacaagaagtcaatgtatagcagagtacctgagtgtcaggtcacgacatactactacgttggctttgcctacctgatgatgaggcgttaccaagatgccatcagagtattcgcgaacatcttactctatatccagagaactaaaagcatgtttcagaggacaacgtataagtacgaaatgatcaacaagcagaacgaacagatgcacgccttactggccatcgccttaactatgtatcccatgcgcattgacgaatctatccacttgcaacttcgggagaaatatggcgacaagatgctgaggatgcaaaagggcgatccccaggtctacgaggaacttttttcctattcctgtcccaagtttctctcaccggtggtcccgaactatgacaacgtccaccccaactaccataaggagccctttctacagcaactgaaagttttctccgatgaggtgcagcaacaagcccagctttccaccatacgcagctttcttaaactttatacaacaatgcctgtggctaaactggccggctttctcgatcttacagagcaggaattcaggatccagctgctcgtgtttaagcataagatgaaaaatctggtgtggaccagcggcattagcgcgctggatggggagttccagagtgccagcgaggttgacttttatattgacaaggacatgatccacatcgccgataccaaggtcgctaggaggtacggcgattttttcattcggcagatccataagtttgaggaactgaatcggaccctgaagaaaatgggccaacgcccatag

SEQ ID NO: 25305 - DNA, 789 bp, synthetic construct
  source 1..789: mol_type = other DNA; note = Synthetic coding sequence
atggccctgagcctgggctggaaggcccaccggaaccactgcggcctgcttctgcaagccctgaggtctagcggtctgctacttttcccatgtggacagtgtccatggcgtggcgcaggttcattcctggaccccgaaattaaggctttcttagaggagaacaccgaggtgacctcatcaggcagcctaaccccagaaatccagctgcgactgctcactcctcggtgtaaattttggtgggaacgagcggatctttggccgcatagtgatccttactgggctatctactggccaggcggccaagctctgtcgcgttacctgctggacaaccctgatgttgtgcggggcaagagtgtactagaccttggatccggttgtggcgccaccgccatcgcagcaaagatgtcaggcgcttcaaggatattagccaatgacatcgacccaatcgctggcatggccataacgctgaactgcgagttgaatcggcttaacccattccccattttgattcagaacattctgaatctagagcaagataagtgggacctcgtggtattgggcgacatgttttacgatgaggacctggctgacagcttacaccagtggcttaagaaatgtttctggacttacaggaccagagtcctcataggagaccctgggaggcctcagttctcagggcattcgattcaacaccatctgcacaaagtcgtggaatactctcttcttgagagcacgcgacaggaaaactccgggctgaccaccagcaccgtgtggggcttccagccctag

SEQ ID NO: 25306 - DNA, 1626 bp, synthetic construct
  source 1..1626: mol_type = other DNA; note = Synthetic coding sequence
atgagcagctgcgtgagcagccagcccagcagcaaccgggccgcccctcaggacgagctgggcggacgcgggtctagtagtagtgagagccagaagccttgcgaggccctccgcggcctgtcctcgcttagtattcacttgggaatggaatcctttattgtagtgacagagtgcgaaccaggttgtgccgttgacctgggcctggctcgtgaccgcccacttgaggcagatgggcaggaggtgcccttggacacttcagggtcacaagcacggccgcacttgagtggtcgcaagctttcgttgcaggaaagatcacaagggggcctagcagctgggggaagcctcgatatgaatggcagatgcatttgtcctagtctgccttactcaccagtgagcagtcctcaaagttcacccaggctccctaggaggccgaccgtcgaatcacatcacgtttctataacaggaatgcaagattgcgtgcagctgaaccagtacacactgaaagatgaaattgggaaaggatcgtacggggtggtgaagctcgcctataatgagaatgataatacatattacgccatgaaggtgctttctaagaagaagttgattcgacaagccggattcccacgacggcccccgcctagaggcacgcggcctgcacccggtggctgcattcaaccccggggtcccatcgaacaggtataccaggagattgccatactcaaaaagctggaccatcctaatgtggtcaaactggtggaggtgctggacgatcctaacgaggaccacttgtacatggtctttgagctggtcaatcaaggccctgtcatggaagtgccgactttgaagcccttgagcgaggatcaggctcgtttctactttcaagatctcatcaagggtatagaatatcttcactatcagaagatcattcacagagacattaaacccagtaatctgctggtcggtgaggacggtcatatcaagattgccgatttcggcgtgagcaatgagtttaaggggtccgacgctctgctgagtaacacggtgggtaccccagcattcatggcccccgaatctttaagtgaaacgaggaagatcttttcagggaaggccctggatgtttgggcaatgggcgtaaccctgtactgtttcgtgttcggccagtgtccctttatggacgagcgcatcatgtgcctgcattctaagataaagtcacaagccttggagtttccagaccaacctgacatcgccgaagatctcaaggatctcataacccgaatgctggataagaatcccgagtcccgaattgtggtccccgagattaagctacacccttgggtgactaggcatggggcagagcctttgccttccgaggatgaaaactgtaccctggtggaggtcactgaggaagaagtggaaaattctgtgaagcatattccatctttagccacagtgattctggttaaaacgatgatccgcaaacgttcatttggtaatcctttcgagggatccagaagagaggaaaggagtctgtcagcacccggaaaccttctaaccaaacaaggatctgaggataatctacaagggacggacccacctcccgtaggcgaggaagaagtcttgttgtag

SEQ ID NO: 25307 - DNA, 303 bp, synthetic construct
  source 1..303: mol_type = other DNA; note = Synthetic coding sequence
atgagcaccatcggcagcttcgagggcttccaggccgtgagcctgaagcaggagggcgacgaccagcctagtgagacagatcacttgagcatggaagaggaagatcccatgcctcgacaaatctctcgtcaatcctcagtaacggagagcacgctctaccccaatccttaccatcagccatacatttcccgcaaatattttgcgacaagacctggggcaattgaaactgcaatggaggatttgaagggacatgtcgccgaaacaagcggagaaaccattcaagggttttggttgctcacatag

SEQ ID NO: 25308 - DNA, 1425 bp, synthetic construct
  source 1..1425: mol_type = other DNA; note = Synthetic coding sequence
atggagcggagcggccagcgggtgaccacctgggactgcgaccagggcaaacattcagattcagattacagagaagatggaatggacctgggaagtgacgccggaagttccagtagttcttcccgtgctagcagccaatccaattctacaaaggtaacaccctgctcggagtgcaagagtagttcctcccccggcggtagtttagacctggttagcgctctggaggattacgaggagccatttcctgtgtaccagaagaaagtgattgacgagtgggcacctgaggaggatggcgaggaggaggaagaggaagatgagcgggatcagcggggctaccgcgatgaccgcagccccgccagagaaccgggtgacgtgtcagccagaacccggtcaggcggcggaggcggccgttcggctacaaccgccatgcccccaccagtgccaaacggaaacctgcaccagcatgatcctcaggatttaaggcacaacggcaacgtggtcgtggctgggcgcccctcatgtagtaggggcccaaggcgtgctatacaaaagccccagccagctggcggccgccgctctgggcgtggtccagccgccggcggcctgtgcttacagccacctgatggcgggacttgcgtgcccgaggagccgcccgtccctcccatggactgggaggccctggaaaagcacttggctgggctccaatttagggaacaggaagctcagaagaacgagagagagagtattagacagaagcttgccctgggctctttttttgacgacgggcccgggatatatacttcttgctctaaatcggggaagccctctctgagctccagattgcagtccggcatgaaccttcagatatgtttcgtgaacgatagcggctctgataaagatagcgatgccgatgactcaaagacggagacatcgctcgacaccccactgtctccaatgtccaaacagagttccagctattcagaccgggacaccacggaagaggagtctgaaagtcttgacgatatggactttctgaccaggcagaaaaagctgcaggcggaggctaaaatggccctcgcaatggccaaacctatggccaagatgcaagttgaggtggaaaagcaaaataggaaaaaaagccccgttgcggatcttctgccccacatgccgcatattagtgaatgtctgatgaagaggagtctaaagcccaccgacctaagagacatgactatcgggcagctgcaggtgatagtaaacgacctgcattcacagatcgagtctttgaatgaagagcttgttcagctcctgctgattcgcgacgagttgcatactgagcaggacgctatgttggtggacattgaagacttaacccgccacgccgaaagtcaacagaagcatatggctgaaaagatgccagccaaatag

SEQ ID NO: 25309 - DNA, 690 bp, synthetic construct
  source 1..690: mol_type = other DNA; note = Synthetic coding sequence
atgcagcagcgggtgctggagctgatcccccagatcgccaacgagcaactcactgaggagctcttgatcgtgaatgacaacttgaacaacgtgtttctgaggcatgagaggttcgagaggttcagaacaggacaaacgaccaaggcaccatctgaggccgagcccgctgctgatttgatcgatatgggcccggatcctgccgccaccggtaatttgagctctcagctggcggggatgaacctggggagctcctcagtgagagcgggccttcagtcccttgaagctagcggacgattggaggatgaatttgacatgtttgcattgacaagaggcagcagcctggccgaccaaaggaaagaggtcaaatatgaggcaccacaggctactgatggtctggcaggagccctggatgctcgccagcaatcaacaggtgccattcctgtaacccaagcctgtctgatggaggacatagaacagtggctttcgaccgacgtaggcaacgacgctgaagagcccaagggggtaacaagcgaggaattcgacaaattcctggaggagagggccaaggccgctgacaggctgcctaacctgtcaagcccaagcgcagagggaccgcctgggcccccttctggccctgccccaagaaaaaaaactcaggaaaaagacgatgacatgctgttcgctctgtag

SEQ ID NO: 25310 - DNA, 1650 bp, synthetic construct
  source 1..1650: mol_type = other DNA; note = Synthetic coding sequence
atgagccgggtggccaagtaccggcggcaggtgagcgaggaccccgacatcgactcgttactggagacccttagtcctgaggagatggaggagctggagaaagaactcgacgtcgtcgatccggacggatctgtcccggtagggctgcggcagcgaaaccagaccgaaaaacagtccacaggtgtttacaaccgcgaggctatgctgaatttttgtgaaaaggagacaaagaagctcatgcagagggagatgtccatggacgagtctaaacaggttgagacgaaaacggacgcgaaggaggagaaaataatccggggaattgataaggggagagtgcgagctgcagtggacaagaaagaagcaggcaaggacggacgtggcgaagagcgagccgtcgctaccaaaaaggaggaggaaaagaagggaagcgacagaaataccggtctctcgcgagataaagataaaaagcgagaggagatgaaggaggtcgctaaaaaggaagatgacgaaaaggtgaagggagagaggagaaataccgatacccgaaaggagggcgagaaaatgaagagggctggcggaaacacagatatgaagaaagaagacgagaaagtgaagaggggcactgggaacaccgatacaaaaaaggatgatgaaaaagttaaaaaaaacgagccgctgcacgaaaaggaagcaaaggacgattccaaaacaaaaacaccagaaaagcagacacccagtggtcccaccaaaccctcagaaggacccgctaaagttgaggaagaggcagcaccatctatttttgatgagcccctggagagagtaaaaaataacgatccagagatgactgaagtcaatgtgaacaattcagattgcatcacgaatgagattttggtgcgtttcacagaagccctcgaattcaacaccgtggtgaagctattcgccctggcaaacacgcgagctgacgaccacgtggccttcgccatcgcaatcatgctgaaagcgaacaaaactatcaccagtctcaacttggatagtaaccacatcacaggtaaagggatactggctatcttcagggcactccttcaaaataataccctgaccgaactgagatttcacaatcaaagacatatttgtgggggcaagaccgagatggagattgcaaaattattaaaggagaacactacactccttaaattgggttatcactttgaattagcaggcccaagaatgacagtcaccaatctgctaagtcggaacatggataaacagagacagaagcgcctccaggagcagcggcaggcgcaggaggccaagggcgagaaaaaggaccttcttgaggtccccaaggcaggggccgtggctaaaggatcacctaaacccagcccgcagccgtccccaaagccttcacctaaaaattcccccaaaaaaggaggcgcacccgcagcaccacccccacctcccccaccattggccccccctcttattatggaaaatcttaagaactctttgtcacctgccactcagagaaagatgggtgacaaagtcttacctgcacaggaaaagaattctcgggatcagctcttagcagctatccggtcttctaaccttaaacaattgaagaaggtagaagtgcctaaactgctacagtag

SEQ ID NO: 25311 - DNA, 231 bp, synthetic construct
  source 1..231: mol_type = other DNA; note = Synthetic coding sequence
atgagcgccagctgcgacggctgcgtgggcagccggccccccgtgcacctggcttccggttactccctcgctgacctactggtgctagagatgggaatgggcacccagtgctggacagaggatcagaggagatggtcatcactatggccctggagtcatctgagcagcgacccgtcgctccctaacgttcaggtcaccaggctgaccttactttcggagcaagccccgtag

SEQ ID NO: 25312 - DNA, 1416 bp, synthetic construct
  source 1..1416: mol_type = other DNA; note = Synthetic coding sequence
atggccaacagcttcgccgcccggatcttcaccaccctgagcgacctgcagactaacatggctaacctgaaagtgattgggatcgtgatcgggaagactgatgtaaaaggattcccagatcgcaaaaatataggatccgagcgttatacctttagcttcacaatccgggacagccccgcacacttcgtgaatgccgcctcttggggcaatgaggactacattaagtcattatccgactctttcagggtcggtgactgcgtcatcattgagaatccgctgattcaacggaaagagattgagcgcgaagagaagttctctcccgcaacaccctccaactgtaagctcctgctgtccgaaaaccacagcaccgtgaaagtgtgtagcagttacgaagttgatacgaaactgttatcccttattcacttgccagttaaggaaagccacgactactactcactcggagatatcgtcgctaacggacatagccttaatgggagaattattaacgttttggcagccgttaagtcagtgggtgaacccaagtactttaccacatctgacaggcgtaagggccaacgatgcgaggttcgcctatacgacgaaacagagtcctccttcgctatgacttgctgggacaatgaatcaatcctgttggcacagtcttggatgcccagagagactgtaatcttcgcttcagacgttcgaattaattttgataagtttcgtaattgcatgactgcaactgtaatatccaagactatcatcacaaccaaccctgatattccggaggctaacatactcctgaattttatacgagaaaataaagaaacaaacgtgttggacgacgaaatcgattcctactttaaggaatcaattaatctgagtactattgtcgatgtttacaccgtcgagcagctcaaaggcaaagctctcaagaacgaaggcaaagcagatccctcctacgggatcttgtacgcttacatttcaaccctcaatattgatgatgagaccaccaaagtggtgagaaatcgatgtagtagttgcgggtatatcgtgaatgaagcgagcaatatgtgtactacttgtaacaagaattctctggacttcaagagcgtattcctgtctttccatgtccttattgacctcactgaccacaccgggacattacactcttgcagtctgaccgggagtgtggctgaggagaccttggggtgcacggtacatgagttcctggcgatgaccgatgagcagaagaccgccttgaaatggcagttcctgctggagaggtccaaaatttatctgaagttcgtactgtcacatagagccagatcaggactcaagataagcgtgcttagttgcaagctcgcggaccctacagaagcctcccggaatttaagtggacagaagcacgtctag

SEQ ID NO: 25313 - DNA, 747 bp, synthetic construct
  source 1..747: mol_type = other DNA; note = Synthetic coding sequence
atggccaccagcgcccccctgcggagcctggaggaggaggtgacctgctccatctgcctggactatctgagagacccagttactattgattgtggtcatgtgttctgtagaagttgtacgacagacgtacgcccaatcagcggtagcaggcccgtgtgcccactctgcaaaaaaccatttaagaaggagaacatccgcccagtctggcagttggcctcattagtggaaaacatcgaaaggctcaaagtcgataaagggcgtcaaccgggtgaagtgactagagagcagcaggacgctaagctctgtgaacggcaccgggagaagctccactactattgtgaggatgacggcaaactgttatgcgtgatgtgccgagagtcccgcgagcatcgcccacatactgcagtgctgatggagaaggccgcccagccgcatagagagaagatacttaaccacctgagtacactcagacgcgatcgggataagatccagggctttcaggcgaaaggggaggctgacatcttggcagccctgaagaagctccaggaccagaggcagtatatcgtggctgaatttgaacagggccatcagttcttacgcgaaagagaagagcacctgctggagcaactcgccaagctcgaacaggagctgacagagggaagagaaaagtttaagtctcgaggcgttggagagctggctagattggccttggtgatctcagagctggaaggaaaggcccagcagtag

SEQ ID NO: 25314 - DNA, 2646 bp, synthetic construct
  source 1..2646: mol_type = other DNA; note = Synthetic coding sequence
atgttctggaagttcgacctgcacaccagcagccacctggacaccctgcttgaacgcgaagacttgtccctccctgagttactggacgaggaagacgtccttcaggagtgcaaggtcgttaatcgaaagctgcttgatttcctgcttcaaccaccccacttacaagccatggtggcctgggtgacccaggagccccctgattccggcgaggaaagactccgatacaaataccccagcgttgcatgcgagatactgactagcgacgtgccacagataaacgatgcactcggagccgacgaatctctgctcaacaggctgtacggttttctgcaaagcacaggctctttgaatccccttctggcttcttttttttcaaaagtgatgggtatactcataaatcggaaaactgatcagctagtttcttttctgcggaagaaggatgatttcgttgatcttctgctgcaacatatcggcacttctgccatcatggacctcctgctgcgactgctgacttgtgttgaaaggccccagctgcggcaggacgtggtcaactggctgaatgaagagaagatcgtgcagcggctgatagagcagatccatccatctaaagacgaaaatcagcatagcaacgcttcacagagtctgtgcgacataattcgcctctctcgagagcagatgatacaagtgcaggacagtcccgagcccgatcagctactcgctactctcgagaaacaggaaacaatcgagcagctcctctcaaatatgtttgagggggaacaaagtcagagcgtcatcgtctctggtattcaggtcctgctcactctgctggaaccaaggcggccccggagtgaaagcgtcaccgtgaactcctttttcagtagcgtggatggccagctggaattgctggcccagggggcactcgagagtactgtgagttcagtgggtgctttacatgccctgagacccagactttcctgttttcaccaactcctgctggagccaccgaaactagaacctctccaaatgacgtggggcatgctggccccaccccttggcaacacacggctgcacgtggttaagttgctggcatccgccctgtccgctaacgatgccgcgctgacacacgaattgttggccctggatgtccccaacactatgctggatttgttcttccactacgtcttcaacaatttcctccacgcacaggtggagggatgtgtttcaacaatgctgtccctgggcccaccacctgattctagcccagaaacaccgattcagaatcccgttgttaagcacctgttacagcagtgtcgattggtagagcgcatcctgacatcctgggaggagaacgacagagttcagtgtgccggcgggccacgtaagggctacatggggcacctgacacgcgtggcaggggccctggtgcagaataccgaaaaggggcctaatgccgaacagctacgccaactactcaaggagcttccaagtgaacagcaggagcagtgggaggcctttgtttccgggcccctagcggaaaccaataaaaaaaacatggtcgacttggttaatactcaccatctgcattcatctagcgacgacgaagatgacagactgaaagagttcaattttcctgaagaggccgtgcttcagcaagctttcatggatttccaaatgcaacgcatgaccagtgccttcattgatcactttggcttcaacgacgaggagttcggagagcaggaggagtccgtcaatgcccctttcgataaaaccgccaacatcacattctccctgaatgctgacgatgagaacccgaacgccaatcttcttgagatttgttataaggacagaattcaacagttcgacgatgatgaggaagaagaagatgaggaggaggcgcagggtagcggagaatcagacggagaagacggtgcgtggcaaggttctcaactggctcgtggcgcgcgcctcgggcagccccccggagtaaggtcgggcggaagcacggactctgaagatgaggaggaggaggacgaggaagaggaggaggatgaagagggcattgggtgtgccgcacgaggcggcgccacccccttgtcttatccaagtcctgggccgcagcctcccggaccttcctggaccgcgacatttgatccagtgcctaccgatgcgcctacttctccacgggtctccggagaggaagagctccacacgggacctcccgcaccacagggaccactgagtgttccccaggggttacctactcaatcccttgcctctcctccagcccgcgatgctctccagctcagaagccaagatcctactcccccctctgcaccccaggaggccacggaggggagcaaggtgactgaaccctccgcgccttgtcaagcactggtgagtattggggacctgcaggctactttccatggcataagatccgctccgagcagctccgactcagctacaagagatccaagtacttccgtgcccgcatctggggcccatcagcctccgcagacaacagaaggtgagaaaagccctgagccgcttggtttgccccagtctcagtccgctcaagccctgacaccccctccaatacccaacgggtctgcacccgagggacctgcctccccggggagccaatag

SEQ ID NO: 25315 - DNA, 354 bp, synthetic construct
  source 1..354: mol_type = other DNA; note = Synthetic coding sequence
atgaagttccagtacaaggaggtgcaccccttcgagtaccggaagaaggagggtgagaaaattcggaaaaagtatcctgacagggtgccactgattgtcgaaaaggcccctaaagctcgcgtgcctgatctcgatcgacgaaagtacctagtgccctcagacctgaccgacggccagttctacctgttaattcgaaaacgcatccatcttcgtccagaggacgctctgttctttttcgtgaataataccattccacccacttctgcaaccatgggacagctgtatgaggacagccacgaggaagacgactttctgtatgtggcatactcgaacgagagcgtgtacggcaagtag

SEQ ID NO: 25316 - DNA, 1089 bp, synthetic construct
  source 1..1089: mol_type = other DNA; note = Synthetic coding sequence
atgcgggagatcgtgcacctgcaggccggccagtgcggcaaccagattggggccaagttctgggaggttatctccgatgagcacggtattgaccctactgggacgtaccatggcgattcagatttacagctagaaagaattaatgtatactataacgaagctactgggggcaactacgttccacgagcggtactggtggacctagaaccgggaaccatggattccgtgagatccggcccctttggtcagatttttcggccagacaatttcgtgttcgggcagtcaggagccggcaataattgggcaaaaggccattatactgagggcgcagagctcgttgacgccgtgctcgacgtggtgcgtaaagaagccgagagttgcgattgcctccaggggttccagctcactactccaacatacggggacctgaatcacttagtgtccgcaaccatgagcggagttaccacatgcctgcgttttcccggacaacttaacgccgacttgcggaaactcgccgtgaacatggtgccgttccccagactgcactttttcatgcccggctttgcgccactgaccagccgaggaagtcagcaatatagagccctcacggtacccgaactcacgcaacagatgttcgacgctaagaatatgatggctgcttgtgacccacggcacggaaggtacctcactgttgccgccgtttttcgcggaaggatgtctatgaaggaggtggatgaacagatgttgtcagtgcaatcaaagaattcctcatatttcgtggagtggatccctaacaacgtgaagacagcggtctgcgacattcccccacgaggattgaaaatggctgccactttcataggcaattcaacagctatccaggaactgttcaagcgaatctcggaacagtttaccgccatgttcaggcggaaggcctttttgcactggtatactggagaagggatggacgaaatggagttcactgaagccgagagtaacatgaatgaccttgtaagcgagtaccagcaatatcaggacgccacagcggaggagggcgaatttgaggaagaggccgaggaggaagtagcatag

SEQ ID NO: 25317 - DNA, 654 bp, synthetic construct
  source 1..654: mol_type = other DNA; note = Synthetic coding sequence
atggaggagaccatgaagctggccaccatggaggacaccgtggagtattgcctcttcctgatccccgacgagagccgcgatagcgataagcacaaagagattctgcaaaagtacatcgaaagaattataacgcgcttcgcaccaatgttggtgccatacatatggcagaatcaaccatttaatctgaaatacaagccaggtaaggggggagtgcccgcccatatgttcggagtgaccaagtttggtgacaacatcgaggacgaatggtttatagtctacgtgatcaagcagattactaaagaatttcctgagttagttgccagtaccaaccgggtgttcttttgccacggggagctgtgcattattccggcccctaggaaaagcggtgcagagtcctggctaccaacaacccccccaacaatcccccaggcactaaatatcattacagcccacagcgagaagattctggcaagcgaatccatccgagccgccgttaaccgtcgaatccgtggttaccccgaaaaaatccaggcgtccctgcacagagcccactgcttcttgcccgcagggattgttgctgtgctcaaacagaggcccaggttggtggccgctgccgtgcaagcattttacctgagggacccgatcgacttgtag

SEQ ID NO: 25318 - DNA, 1188 bp, synthetic construct
  source 1..1188: mol_type = other DNA; note = Synthetic coding sequence
atggccagcgccgccagcgtgaccagcctggccgacgaggtgaactgcccaatctgccagggcacactgcgagagcctgtgacgatagactgcggacataatttctgtagggcttgtctaactagatactgcgaaattcctggcccagacctggaggagtctccgacttgtcctctgtgtaaggagcctttcaggcccggctcttttagaccaaactggcagctcgctaacgttgttgaaaacatcgaacggttacagcttgtctctactttgggcctgggcgaggaggacgtatgtcaggaacatggcgaaaagatttattttttttgtgaggacgatgagatgcaactgtgcgtggtctgtcgtgaagcaggtgagcatgcaacacacaccatgagatttttggaagacgcagccgccccctacagagagcagatccataagtgcctcaaatgcctgaggaaagaaagagaggagattcaagaaattcaatccagagaaaacaaacggatgcaggtacttctcactcaagtatcaaccaagcggcagcaagtcatttcagaattcgctcacctgaggaaattcttagaagagcagcagagcattttgttagcacaattagaatctcaggacggcgatatcctgagacagcgggatgaatttgaccttctagtagctggtgaaatttgcaggttctcagccctgatcgaagagctcgaggagaaaaacgagagacccgcccgcgaactgctaacagatatacgatcaacgctgatccgttgcgaaacccgaaagtgtcgtaaacccgtcgctgtcagcccagagctaggccagcgtatccgcgatttccctcagcaggccttgcctctgcagagggagatgaaaatgttcctggagaagctctgctttgaattagattacgagcctgcccacatttccctcgacccgcagacatcgcatccgaagctgttgctctccgaagaccatcagagagcacagttctcttacaaatggcaaaacagcccagataacccccagcgatttgatagagcaacatgtgtcttggcacatacgggtattaccggtggaaggcacacgtgggtctggatggcgagggtgccaggtgattcggggtgctgtcaattctgttcacctcctagcgtgttgggaaccgaggtggcggcatag

SEQ ID NO: 25319 - DNA, 102 bp, synthetic construct
  source 1..102: mol_type = other DNA; note = Synthetic coding sequence
atgagcatcagcagcgacgaggtgaacttcctggtgtaccggtacctccaggagtctggcttctcccatagcgccttcaccttcggcattgagagtcattag

SEQ ID NO: 25320 - DNA, 1242 bp, synthetic construct
  source 1..1242: mol_type = other DNA; note = Synthetic coding sequence
atgttcgccagcgacctgctgcgggccctggactgctgccccggcgccgggagcagcggcctcttaccacagctcggaccccgtcagttgttggctttcacagtgaactgtctggggaaccatcggtatcttggcttttttgaagatctagagcagaggcataaagctcaggtgctggtggaagacatctctgacattctcgaggagcatgcggagaaacactttcacccatacatcgcgtactgcagcaacgaagtctaccaacaaaggactcttcaaaaactgatctcttccaacgccgctttccgagaagccctccgtgagattgaacgacgacctgcttgcggtggcctgccaatgctctcttttttgatactgccaatgcaaagggtgacaaggctgcccctcctgatggatacattgtgcctgaaaactcagggacactcagaaaggtataaggccgcctccagagccctgaaggcgatcagcaagctggttcggcagtgtaatgagggcgcccacagaatggagaggatggaacaaatgtacaccttgcatacccagctggatttttctaaagtcaaatcacttcctctcattagtgctagcaggtggctgctcaaacgcggggaactcttcctggtcgaggagacaggtctgttccgcaaaatcgccagcaggccaacctgctacctgttcctcttcaatgacgtgttggtcgtgaccaagaaaaaaagcgaggagagttacatggtacaggactacgcgcagatgaaccacatccaggtcgaaaaaattgagccgtccgaattacctctcccaggggggggtaaccgtagttccagcgttcctcaccccttccaggtgactctgctgcgaaattccgagggacgacaggagcagcttctcttgagctctgattccgcctctgatcgtgcccggtggatcgtcgcattgactcactccgaaagacaatggcagggcctcagcagtaaaggagacctaccccaggtcgagatcacaaaagcttttttcgccaaacaggcggatgaggtgaccctgcagcaagccgacgttgttttggttctgcagcaggaagacggctggctgtacggagagcgcttacgggatggcgaaacagggtggttccctgaagattttgcaagatttataacctcccgagttgcagtggaaggcaacgtacgacggatggaaagacttagggtggagaccgacgtgtag

SEQ ID NO: 25321 - DNA, 1890 bp, synthetic construct
  source 1..1890: mol_type = other DNA; note = Synthetic coding sequence
atggaggagagccccctgagccgggcccccagccggggcggcgtgaacttcttgaacgtcgcacgtacttacattccaaatacaaaggtggaatgtcactatactctacctccaggcaccatgccttccgccagcgattggattggcatattcaaagttgaagcggcttgcgtgcgcgattaccatacctttgtgtggagtagcgtgcctgaatcgaccaccgacggttctccaatccatacctccgtacagtttcaggcatgcaatcagctcgatgagagtcagcaggaacggaacgaccttatgcagctgaaattgcagttggagggacaagtaacagagctgaggtcccgagtgcaagagttagagcgagcactagcaactgcacgacaggaacacacagaactgatggaacaatataagggtatatctagatcgcatggggagatcacagaagagcgtgatatccttagtcgtcagcaaggcgaccacgttgccaggatcctggagctggaggatgacattcaaaccataagtgaaaaggtcttaacaaaagaggtggaactagatagactacgagacacagtgaaggctctgactagagagcaggagaagctactcgggcagttgaaagaggttcaggctgataaggaacagtcagaggcagaactccaggtggcgcagcaagagaaccatcacctgaacctggacttaaaagaagccaaatcttggcaggaggaacagtccgctcaagcccagagacttaaagacaaggtggcccagatgaaggataccctcggacaggcacagcagagggtggccgagctggagcccctcaaagagcaactgcgtggagcacaggaactagctgccagtagtcagcaaaaggccacactcctcggcgaggagctcgcttcagcagctgctgcgcgcgatcgcaccatcgccgagctgcaccgatctaggttagaagtggcagaggtgaacggacgacttgcggagctgggtcttcacctgaaagaggagaagtgtcaatggtcgaaagaacgcgcagggcttcttcaaagtgtcgaggcagagaaagataagatcctaaaactgtccgcagagatccttaggctggaaaaggcagtccaggaagaacggacgcaaaatcaggtctttaagactgaactcgccagagaaaaggatagctccctagtgcagctgtcagagtcaaagcgcgagttaacagagttgcggtcagcccttcgcgtgttgcagaaagaaaaggagcagttacaggaggagaaacaggagctcttagaatatatgagaaaacttgaggctcggctggagaaggtggcagatgagaaatggaacgaggacgccaccaccgaggatgaggaagctgctgttggactttcctgtccagcagcccttaccgactctgaagacgagtctccagaggacatgcgcctaccaccttatggcctgtgcgaacgaggagatcccgggtcctcacccgccggccctcgcgaagcgtccccactggtggtcatctctcagcctgctccaatttccccgcacttgtccggtcccgccgaagactcttcctccgattcggaggcggaggatgaaaagtccgtcctcatggccgccgttcaaagcggcggagaggaggccaacctgctgctgcctgagctgggctcagccttctacgatatggcttcgggatttacagtgggcaccctatctgagacaagtaccggtggcccagccacacccacatggaaggaatgtccaatctgcaaagagcggttccctgccgaaagcgacaaagacgctctggaagaccatatggatggacactttttcttttcgacccaggaccccttcacgttcgaatag

SEQ ID NO: 25322 - DNA, 2451 bp, synthetic construct
  source 1..2451: mol_type = other DNA; note = Synthetic coding sequence
atgcccctgagcagccccaacgccgccgccaccgccagcgacatggataagaacagcgggtccaacagcagcagcgcaagcagcggtagctcaaaaggtcagcagccccctcggtccgcttcggccggtcctgctggggaatctaagccgaagtcggatggaaagaatagttctgggtcaaaacggtacaaccgtaagcgggaattaagttaccccaagaatgaaagttttaacaatcagtcccgccggagttcctcccagaaatccaagactttcaacaaaatgcccccacagcgcggagggggatcttctaaactttttagtagcagttttaacggaggcagacgtgacgaagtcgccgaagcccagcgtgccgagtttagtcctgcccaattttcaggaccaaagaagatcaatctgaaccacctgctgaatttcacattcgagcctagaggacaaaccggtcacttcgaggggagcggacacggatcttggggaaagcgaaacaagtgggggcacaaaccctttaataaggagctgttcctccaggccaactgccagttcgttgttagcgaagaccaggattacaccgctcatttcgcagatcctgacactctggtgaactgggactttgtggaacaggtacgcatctgcagccatgaagtaccttcatgccctatctgcctgtatccaccaactgcagccaagataacaagatgtggacatatcttttgttgggcttgcatcctgcactacctctctctgagtgagaagacttggtctaagtgtcccatctgttactccagcgttcacaaaaaagacctcaaaagtgtagttgctacagagagtcatcaatacgttgttggtgataccataactatgcaacttatgaagagagaaaagggcgtacttgtggcccttccaaagtctaaatggatgaacgttgaccaccccatccatctcggagacgaacagcacagccagtactccaaactgttgctcgcaagcaaggaacaggtgctccatagagtcgtacttgaggaaaaggtagcacttgagcagcagctggccgaggaaaagcacacacccgaaagctgcttcattgaagcagccatccaggagctaaagaccagagaagaggccctgtccgggctggccgggagccggcgcgaggtgacaggggttgtggctgcgctggaacagctcgtcttgatggcccccctcgccaaggaatctgtgttccagcctagaaaaagcttgttacagcaaggcgttctcgagtacttgtcagcctttgacgaggagactaccgaggtctgcagtcttgacaccccgtcaaggccactggccttgcctctcgtggaagaagaagaggccgtgagtgagccagaaccagaaggcctccctgaggcctgcgacgacttggagctagcagacgacaatctgaaggaaggaaccatttgcaccgagagtagccagcaggaaccgattacgaaaagcggattcacccggctgtcgagtagcccatgctactacttctaccaggctgaggatggacaacatatgttcctccaccccgtaaatgttcgctgtctggtgagagagtacgggagtctggagcgctctcctgagaagattagcgctactgtggtcgagattgctggctactctatgagcgaggacgtgcggcagcgccaccgttatctctcccatctccctctgacatgcgaattctcaatttgtgagctggcactgcagccacctgtcgtgtctaaagaaactctggagatgttttcagatgatatcgagaaacggaagcggcagcggcagaaaaaagccagggaagagaggcgacgcgagcggaggatcgaaattgaagagaataaaaaacaaggaaagtaccctgaagtgcatattcccttggaaaacctccagcagtttcccgcatttaatagttacacatgtagttcagacagtgcattgggccctacgagtacggagggccacggcgccctgtcaatctctccactaagtagatctccgggatcacacgctgactttttgcttacccccctgtcacctacagccagtcagggatcaccaagcttctgtgtgggctctctcgaggaggacagccctttcccatccttcgcacaaatgctgagagttggtaaggccaaagcggacgtgtggccgaagaccgcccctaaaaaggacgaaaatagtctggtccctccggcaccggtcgattcagatggcgagagcgataacagcgaccgggtgcccgtccccagcttccagaattccttctctcaggctatagaggcagccttcatgaaactagacacccctgccacgagtgatcctttgagtgaggaaaaaggcggcaagaagcggaaaaaacagaaacagaaactactcttctctacctccgtcgtgcacactaagtag

SEQ ID NO: 25323 - DNA, 429 bp, synthetic construct
  source 1..429: mol_type = other DNA; note = Synthetic coding sequence
atggccagccccggcaaggacaactaccggatgaagagctacaagaataaagctttaaacccgcaagagatgaggcgccgaagggaggaggagggtattcagctccggaagcagaagagggaggagcagctttttaaaaggaggaatgtctacctcccccggaacgatgagagcatgctggagagcccaatccaagatccagacatatcctcgaccgtccccatccctgaggaggaagttgtcacgacagatatggtccagatgatctttagcaataatgccgaccaacagctgacagccacgcagaaatttcggaagctgctttcaaaagaaccaaaccctcccattgaccaggtcatccagaaaccaggcgtggtccaaaggttcgtgaagttcctcgagcgcaatgagaactgcactctgcagtag

SEQ ID NO: 25324 - DNA, 297 bp, synthetic construct
  source 1..297: mol_type = other DNA; note = Synthetic coding sequence
atgagcgagcagggcgacctgaaccaggccatcgccgaggagggcggtaccgagcaggagaccgccacccccgagaacggtattgtcaaatctgagtccttagatgaagaagaaaagctggagctgcagcggcgactggaagcccagaaccaggagcgaaggaagtctaagtccggcgccgggaaggggaagctcacccggagtctcgcagtctgcgaggagtctagcgcacgaccagggggagaatctctgcaggaccaggagagtatacaccttcagttgtcatccttcagctag

SEQ ID NO: 25325 - DNA, 1917 bp, synthetic construct
  source 1..1917: mol_type = other DNA; note = Synthetic coding sequence
atggagaacctgcagaccaacttcagcctggtgcagggcagcaccaagaagctaaacgggatgggagatgatggctcacctcccgccaaaaaaatgataaccgatattcacgctaatggcaaaacaattaacaaggtgccgacagtgaaaaaggaacacctggacgattatggcgaagcgcccgtagaaaccgatggggaacatgtcaagcggacctgtacaagcgtcccagagactctccatcttaacccgtcactaaaacacaccttagctcagtttcacctgagcagccagtcctctctgggcggccccgcagcctttagtgctcgtcactcccaggagagtatgtccccaaccgtgtttttgcccctcccgagtcctcaagtactaccaggcccgctgttaattccaagtgattcaagcacagagctcacacagactgtgctggagggcgaatctatctcttgcttccaggtcggtggggaaaagcgactatgcttgccccaggtccttaactctgtgcttcgcgagtttacattgcagcagataaacaccgtgtgcgacgagctgtatatttattgctcgcgctgcacgtcggaccagctacacattctgaaagtgctcggaatcttgccctttaacgccccatcttgcgggctcatcacgctgacagacgcacagcggctctgtaatgccctcctccgcccacgtacattcccccagaacgggtccgtgttacccgcaaaatcttcgctcgcccagctaaaagagacaggatcagccttcgaggtggagcacgaatgcctcggtaaatgccaaggcctgtttgctccgcagttctacgtacagccggacgcaccctgtatccaatgcctagagtgctgcggcatgtttgcccctcagactttcgtgatgcacagtcaccggtcacccgataagcgaacctgtcattggggtttcgaatcggcaaagtggcattgttatcttcatgtgaatcagaaatacttgggtacacccgaggagaagaaattgaagataatactcgaagaaatgaaagagaagttttccatgcggagcggcaaacgcaatcagtcaaaaaccgacgctccctctggtatggagctccaatcctggtaccccgttataaaacaggaaggcgaccatgtctcacagacacattcattcctgcatccctcctattacctatatatgtgcgataaagtagtggcccctaacgtttcactgacatccgccgttagccagagcaaggaactcacaaagaccgaagctaatgcctccatttctaacaactcaactagcaaaagaaaatccgagtcagcaacttgtaacctcgtcagggacatcaataaagtcggtatcgggctggtagccgctgctagttctccactgctcgtgaaggacgtgatctgtgaagacgacaagggcaagataatggaagaagtgatgcgcacttacctgaagcagcaggagaagctcaacctcatcttgcaaaagaagcagcagctgcagatggaagtaaagatgctttctagcagcaaatcgatgaaagagctgactgaggagcaacaaaatctacagaaggagttggagtctctgcaaaatgagcatgcacaaaggatggaagagttttatgtggaacagaaggatctcgagaagaagttagagcagataatgaaacagaagtgcacatgtgacagtaaccttgagaaagacaaagaagcagaatacgccgggcagttggcggaactgagacagagacttgaccatgctgaagctgatcgtcaggaactgcaggacgagctacgccaggagagagaggcccgacagaaactggagatgatgatcaaagagctgaaactgcaaatcctgaagagctcaaagacagccaaggaatag

SEQ ID NO: 25326 - DNA, 1530 bp, synthetic construct
  source 1..1530: mol_type = other DNA; note = Synthetic coding sequence
atgaagcggggccggctgcccagcagcagcgaggacagcgacgacaatgggagcctgagcaccacgtggagtcagaacagtaggagccagcacagaaggtcatcatgctccagacatgaagatcgcaaaccatccgaggtgttcagaacagatctcatcacagctatgaagttgcatgactcataccaactgaacccagatgaatattatgtcctcgccgatccgtggcgccaggaatgggaaaaaggtgttcaggtgcctgtgtctcctggcacaatcccccagccagttgctcgcgtagtgagtgaggagaaaagcctcatgtttatccgcccaaagaagtacatcgtctctagtggcagtgagccgcctgagctgggctatgttgacatccgtaccttggctgatagtgtgtgtaggtatgatctgaatgacatggacgcagcatggctggaactcaccaatgaggagttcaaggaaatggggatgcctgagctggatgagtatactatggagcgagtgctagaggaattcgaacaaagatgctatgacaacatgaatcatgctattgaaaccgaggaaggcctaggcatcgaatatgatgaggacgtcgtgtgtgacgtgtgtcagtctcctgatggtgaagatggcaacgagatggttttctgcgataaatgcaatatctgtgtgcaccaggcctgctacggcattttgaaggtccctgaaggcagttggctctgccgcacctgcgcactgggcgtacaacccaagtgcctgctctgccccaagaagggtggtgccatgaaaccaacccgcagtggtactaaatgggtgcacgtttcatgcgccctctggattccggaggtgagcatcgggtcaccagagaagatggaaccaatcacaaaggtcagtcacattccttcttctaggtgggctctggtgtgctctctatgcaacgagaagttcggggcgtccatccagtgtagtgtgaaaaattgtcggacagccttccatgtgacttgtgcctttgacagaggcctggagatgaagaccatcttggccgaaaatgacgaggtgaagtttaaatcctactgtcctaaacactcctctcataggaagcccgaggaaagtctggggaagggcgccgcccaggagaatggcgccccagagtgttcacctcgcaatcccctggagccttttgcatctctggagcaaaacagagaagaggcacacagagtgtccgttcggaagcagaagctacagcaactcgaggacgagttttacacctttgttaatctcctggacgtggcacgggcccttcggctgccggaagaggtcgtggattttctataccaatactggaagctcaaacggaaggtgaattttaataagcctttgatcactcccaagaaggacgaagaagataatctggcgaagagagagcaggacgtactctttcgccggttgcaactcttcacacatctgagacaggaccttgagagagtgatgattgataccgacaccctgtag

SEQ ID NO: 25327 - DNA, 354 bp, synthetic construct
  source 1..354: mol_type = other DNA; note = Synthetic coding sequence
atggccttcagcggccgggcccggccctgcatcatccccgagaacgaagagattccacgcgccgcactgaatacggtacacgaggcaaatgggaccgaggatgagcgcgccgtcagcaagctgcagcgcagacactcagacgtgaaggtgtataaagaattctgcgatttttatgctaaattcaatatggcaaatgctctggccagtgccacttgtgagcgatgtaaggggggctttgcgcctgccgagactatagttaatagtaatggcgagctatatcatgaacaatgctttgtgtgtgctcagtgctttcagcagtttcctgaaggtctcttttacgaggagcggacctag

SEQ ID NO: 25328 - DNA, 1110 bp, synthetic construct
  source 1..1110: mol_type = other DNA; note = Synthetic coding sequence
atgaaggacacccaggacatccaggaggccagcaaggccatgcagaacaaggtgcatgagcaggaggataaaaatgaaaagcagaagcagagggaagacaagctgggcgtatactctctggtccatttctccccaaaaatgttgggctcagtcgctactacactcccactgtcctcgtctaactcctccggcatgcctttgggctactatctgtcttcacctcagattagtagggttactatttctaccactgggcaactgacttcaaaagccaccgttggcagttgttctcgggtagaaaatagcctggatgctagcccattctccgtgccaaaaaaacaggacgaatctccaatgatcggggacggcgaagactacttcctgtcactgtttggggattctaaaaagcttacagcccacagtaactacacgcaaaaaacgctgaagtacttcagtatgatcctggaggaggtcgggcaattcacctcttcgtctctgggcgacgtcgagattgctgaggtcaacgtgaagggattgtttgtcaagctgattaactcatccttggataaagaaatggcgatcggcgaccacattctacagcagaatgtgaacggtcagacaatttcactctaccgatttctgcctaacattgtgatgcaggccaacagcactgtgactgctatcgcttggtacacgccaattcactggaagcaggcctgggaaaaactagacgctgacgtggagttcaatcggtgttccgtggttagtccaacgtttcgtaagcgcgtatttcagtggaccgctagtactgctaccatcacaaaggagaagcaggaccaacccaagaaggatatttccaactatcaggtggaacaagcacaggtgctgttaaagcgtgagaaggaaattccgcctacagtctttcccaataggtccccatggtgccagaacccctacgtttccgctcatccttactgcccactcattgagccacacaatacaagtacagcgggcgggaggctcgataggcagccacgaactagatcaacacgccctaatagggcatccggaagtaagaagaaaaagacatctgagagtcagaaacagtag

SEQ ID NO: 25329 - DNA, 681 bp, synthetic construct
  source 1..681: mol_type = other DNA; note = Synthetic coding sequence
atggaccagagccgggtgctgctgtgggtgaaggccgagcccttcatagtcggagcactgcaggtgcctcctccttcaaaattcagcctgcactacctccgcaagatcagcacatatgtacagataagggcaaccgagggggcttatcccagactgtattggtcaacatggcgacacattgcctgtggcaaattacagcttgctaaggacctcgcttggctctacttcgaaatcttcgattctctcagcatgaagacacccgaggaaagactggagtggtcggaagtgttgtctaactgcatgtctgaagaggaggttgagaagcaacgcaaccagctctcggtggatactctgcagttcctattatttctgtatatacagcagcttaacaaggtatccctgagaacctcactcattggcgaggaatggccgagtccgcgaaataaatcgcaaagtccagatctgactgagaagtcaaactgtcacaacaagaattggaatgactacagccaccaggcttttgtgtacgatcacctgtccgatctcctggagctcttgcttgatcctaaacagctgactgcatctttccactctactcactcatccctcgtgagtcgagaagccgtcgtggccctgtctttcttgatcgaaggaaccatctccagggcccgaaaaatttag

SEQ ID NO: 25330 - DNA, 747 bp, synthetic construct
  source 1..747: mol_type = other DNA; note = Synthetic coding sequence
atgaacgaccggctgggcgaggacgagagcctgctgatgaagctgtactctttccttctgaacgatagtcccctcaaccccctgctggctagtttcttctccaaagttctctccattctgatttctaggaaaccagagcagatcgtcgattttctgaagaagaaacatgatttcgtggacctgataattaagcatattggcacttccgcgattatggacttattactacggctattaacatgcatcgaacctccacaaccgagacaggacgtgctgaattggttgaacgaagagaaaataatccagaggctggtggagatagtgcatccgagtcaagaggaggaccgtcacagcaatgcctcacagagcctctgcgaaatcgtgcggctgtccagagaccagatgctccaaatccaaaattcaaccgagcccgatctgctgttagcctctgggttacctgatttgaacggggtcggtcccaggggactgttagtggacaacatgctctggagccggcttgtcgtgtccttcgcttcacatggccagggcctagctccgctagtggcccacgtcgctagcgtcgtgtggacgtggtggctgcttcaccccaccgtggccagcgtagtttggacttggtggctgctgcaccctactcagggaaactctgtgttgctgcacccaaccgattgctgggaacgagcctctgggacatttctgtggggtataattcttttctgcttgtcttag

SEQ ID NO: 25331 - DNA, 1869 bp, synthetic construct
  source 1..1869: mol_type = other DNA; note = Synthetic coding sequence
atggccatggcccccagccccagcctggtgcaggtgtacaccagcccagccgctgtggccgtctgggagtggcaagatggactcgggacgtggcatccttattcagccacagtgtgtagttttattgagcagcagttcgtgcagcagaagggtcagaggtttgggctgggctcgctggcccacagcataccccttggccaggcagatccctctcttgccccttacattatcgatctgccaagctggactcagttcaggcaggatacaggaactatgcgcgcagtcaggcggcacctctttccccaacacagcgctccaggtaggggggtcgtgtgggagtggctgtctgacgacggatcttggacggcctacgaggcgtccgtgtgcgattatttagagcagcaagtggcgaggggcaaccagctggtcgatctggccccactgggttataattatactgtcaactatacaacccatacacaaaccaataagacatccagtttctgccggtccgttagacggcaagcaggacccccataccctgtgaccactatcattgctccccccggccacaccggggtggcctgcagttgccatcaatgcctcagcgggtctcgtaccggccccgtgtctggaagatatcggcatagcatgacgaacttacctgcctatcctgtaccacagcacccgccccacagaactgccagcgtctttggcactcaccaggctttcgctccgtacaacaagccaagtctctctggggcccggtcggcaccgcgcctgaatacaaccaacgcctggggagctgcgccacccagtctggggtcccagcccctctatagatctagcctgagccatctgggacctcaacacctcccgccaggctcatcaacaagcggggcagtgtctgcctcactgccttccggtccctcctcttctccaggctctgtgcctgctaccgtcccaatgcaaatgcccaagccatctcgagtgcaacaggcacttgcagggatgaccagcgtgctaatgagcgctatcggcctacccgtctgcctgtctcgggcaccgcaaccaacatctccacctgcatcgaggctcgcgagtaagagccacggtagcgtgaagcggctgcgcaagatgagcgtgaaaggagctactccaaaaccggaacccgaacccgagcaggtgataaagaattacacggaagagttgaaagtaccaccggatgaggactgcataatttgtatggagaagctctctacagcatcaggatactctgacgtgacagactcaaaggccatcggttccttagcagtcggccacctcaccaagtgtagccacgctttccacctgctgtgtctgctcgccatgtattgtaatgggaacaaggacggatccctgcaatgtccctcctgcaagaccatctatggtgagaagaccggcacacagccgcagggcaaaatggaggtgctcaggttccagatgagccttcctgggcacgaggattgtggaaccatcctcatcgtatactccattccacatggcatccaaggtcctgagcatcctaacccaggtaaaccttttactgctagagggtttcccagacagtgctacctcccggacaacgcacaaggtcgcaaggtgttagaactgctgaaggtggcttggaaacgccgcttgatttttaccgttggcacctcctcaactaccggcgaaactgatactgttgtctggaatgagatccatcataaaacagaaatggatagaaacatcacggggcatggctaccctgaccctaactatttgcagaacgttctggcagagctggccgcacagggtgtgactgaggactgccttgaacaacagtag

SEQ ID NO: 25332 - DNA, 4008 bp, synthetic construct
  source 1..4008: mol_type = other DNA; note = Synthetic coding sequence
atggaggagatccccgtgaaggtggccgtgcggatccggcccctgctgtgtaaagaggctctgcataatcaccaggtgtgtgtccgcgtgatacctaatagtcagcaggtgatcattgggcgagacagggtattcaccttcgattttgtgtttggtaagaatagtacacaagacgaagtctacaatacctgtatcaagcctctggtgttgtctctgatcgagggctataacgcaactgtctttgcctatggccagacaggctcagggaaaacgtataccatcggcggtggacatatcgcttcagttgtagagggccaaaagggaattattcctcgagctatccaggagatctttcagtccatctccgagcacccctctatcgactttaatgtgaaggtcagttacattgaagtttataaagaagatctgcgcgacctgctggagctagaaacctccatgaaagatctccatattcgtgaggacgaaaagggcaacacggtgattgtaggcgctaaagaatgccacgtggaaagcgctggcgaggttatgtcccttctagaaatggggaacgcagctaggcacaccggcaccacccaaatgaacgagcactcctcacggagtcacgctatttttaccataagcatttgccaggtgcataaaaacatggaagccgcggaggatggatcatggtattctccccgccacattgttagtaaatttcattttgttgacctggccggaagtgaaagagtgacaaagacagggaatactggagaaaggttcaaagaatccatccaaatcaactccgggctgctggccttggggaacgttatcagcgctttaggtgaccctagaagaaagtccagtcatataccataccgggatgccaagatcactaggcttctcaaagattctcttggcggatcggccaaaacagtgatgatcacctgcgttagcccatccagctccaatttcgatgaaagcctgaacagtctgaaatacgctaacagagcgcgcaacatcagaaataagcccacagtgaacttctcccctgagtcagaccgcatcgatgaaatggagttcgaaataaagctcctacgcgaggccctacaaagccagcaggcaggggtatcacagaccacccaaattaatagagaaggctctcctgacacaaatcggatccatagcttagaagaacaagtagcgcagctgcagggcgagtgcctcggataccagtgctgtgtggaagaagctttcacctttctggtggacttgaaagataccgtccgtcttaacgaaaagcaacagcacaaacttcaagagtggtttaacatgatacaggaggtaagaaaggctgttctcacttccttccggggcattggagggaccgccagcctcgaagaaggcccccagcacgtgacggtactgcagttgaaacgcgaactcaagaaatgccagtgtgtgcttgccgctgacgaagtggttttcaatcaaaaggagctggaggtgaaagaattaaaaaaccaggtgcagatgatggtgcaggaaaacaaaggccatgccgttagtttgaaagaggctcagaaagttaaccggctccagaatgaaaaaatcatcgagcagcagctgctggtggaccagttgtccgaggagttgacaaaactgaacctcagtgtgacaagctccgccaaggagaactgcggggatggcccagatgctcgaatccctgaaaggcgcccctacaccgtaccctttgacacccacctcggccactacatctacatcccctcacggcaggattcaagaaaggttcacacaagtcccccaatgtattcacttgatcggatcttcgccgggttcagaacaaggagccaaatgcttctgggtcacatagaggagcaagacaaagtgctgcattgccagtttagcgacaacagtgacgacgaggagagtgagggtcaggaaaagagtggcacacgctgtaggtccagatcctggatccaaaaaccggactctgtttgtagcctggtggagctatcagacacccaggacgaaacgcagaaatcagaccttgagaacgaggacctcaagatagattgcctgcaagagtcacaggaactcaatttgcagaaactgaaaaactcggaaaggatactcaccgaagccaaacaaaagatgagagagttgactatcaacattaaaatgaaggaagatcttatcaaagagctcatcaaaacagggaacgacgctaaatcggtgagtaaacaatactcccttaaagtcacgaagcttgagcacgatgcagagcaagctaaagtggaattaatcgagactcagaagcagctccaggaactcgagaataaggatttatctgatgtcgcgatgaaagtgaaactccagaaggaatttagaaaaaagatggatgcggccaagctgcgggtacaggaaatccagctaaaaactggacaggaggaggggttaaaaccgaaagccgaggatctcgatgcttgcaaccttaagcggagaaagggctcctttggctcaatagaccacttgcagaagttagacgagcagaaaaaatggttggatgaagaagtcgagaaagtgctcaaccagcgccaggagctcgaggagctcgaggcagaccttaaaaagagggaagccatcgtatccaaaaaggaagcactgttgcaagaaaagtcacatctcgagaataaaaaactgaggagttcacaggcccttaacactgactctctgaaaattagtactagactcaatttgctggagcaggaactcagcgaaaagaacgtgcagctgcaaactagcacagcagaagagaagactaagatcagcgagcaggtggaagtgctgcagaaggagaaggaccaactccaaaaacgccgtcataacgttgatgaaaaattgaagaatggccgagtgctttctcctgaggaggagcatgtgctattccaactggaggagggtatcgaagcccttgaagccgctatagagtacaggaatgagagtattcagaaccgtcagaagagcctgcgcgcctcgtttcacaatttatcccggggggaggctaatgtgctggagaagctggcatgcctctcgccagtagaaatcagaaccatcctattccggtattttaacaaggtggtgaatctgcgggaggcagagagaaagcagcaattgtacaacgaagaaatgaaaatgaaagtcctggaacgggacaatatggtgcgtgagctggagtcagcactcgatcacctgaagttacagtgcgaccggaggctgactcttcaacagaaggaacatgagcaaaaaatgcagctcctactccatcatttcaaggagcaggacggcgaggggatcatggaaactttcaagacgtatgaggacaagatccaacagcttgaaaaggatctctacttctataaaaagacttcacgcgatcataaaaagaagctaaaggaactcgttggcgaggcaatcaggaggcaactagctccttcggagtaccaggaggctggggacggagtcctgaaacctgaaggaggagggatgcttagcgaagaattgaagtgggcatcaaggccagaaagcatgaagctcagtggaagggaacgggaaatggacagtagtgcatcctcgctgcggacgcagccaaacccgcagaagttatgggaggatatccccgaactaccacccatccacagttcactggccccccccagcgggcacatgctgggaaatgaaaacaagacagagactgacgataaccagttcacaaagtcacattcccgtctgtcctcccagatccaagttgtggggaatgtgggcaggctgcatggggttacccccgttaagctgtgcaggaaggaactgcgtcagataagcgccctggaactgagtctgagacggtccagtttgggagtcgggattgggtccatggccgcggactccattgaggtgtctcggaagcctagggacctcaagacctag

SEQ ID NO: 25333 - DNA, 2745 bp, synthetic construct
  source 1..2745: mol_type = other DNA; note = Synthetic coding sequence
atggaggagcggatcaccaccctggagaagcggtacctggccgcccagcgcgaagctacttcaatccatgacctgaatgacaagctcgaaaatgagctggcgaacaaagaaagcctgcatcgccaatgtgaagagaaggcaaggcacctgcaagagctacttgaggtggcggagcagaagctgcagcaaacaatgcgaaaggccgagacactccccgaggtcgaggccgaactggcacagaggatcgccgctctgacaaaggccgaggaacgtcatggcaacatcgaagagcatctgcgacagctcgaggggcagctggaagaaaaaaatcaggagttggctcgtgtacgacagcgtgagaagatgaatgaggatcataataagagactgtccgacaccgtggaccgacttctaagcgagtccaatgagagactgcagttacacttgaaggagcgtatggcggcgttagaggagaaaaatactctcatccaggagctcgaatcttcccagagacaaattgaagagcagcatcaccacaaggggcgcctgtcagaggaaattgaaaagcttaggcaggaggtggaccagctgaaaggaagaggtggcccctttgtcgacggcgtgcattcgcggtcccatatgggatccgcggctgacgtccggttcagtttagggaccacgacacatgcccctcccggggttcatcgacgttatagtgcacttcgggaggagtcagctaaagattgggaaacaagtcctttgccagggatgcttgctcccgcggccggcccagcctttgattctgatccagaaataagcgatgtggatgaagacgaaccagggggacttgtggggtcagctgatgtggttagcccgtcaggccactccgacgcacagactctcgcaatgatgctgcaggagcagcttgacgccattaacgaggagattaggatgattcaggaggaaaaagaatccacggaactccgcgccgaggaaatcgagaccagagtgacctctggtagcatggaggccttgaacttaaagcagttgagaaaacgcgggtctattcccacctccctgacagcactgagcctagcttctgcttcccctccactttccggccgttccacacctaaactaactagccgaagcgctgcacaagatttagacaggatgggtgtgatgacactgcccagcgacttgaggaagcaccgcagaaagctcttatcacctgtgagtcgagaagaaaatagggaggacaaggccacaatcaaatgcgaaacctcacctccatccagccccagaacacttagactggagaagcttggtcaccctgcactgagtcaggaggaaggaaaatccgccctcgaggaccagggctctaacccctcaagttctaacagtagccaagacagtctgcacaaaggcgcgaaacgtaaaggcatcaagagtagcattggccggctcttcggcaagaaagagaagggacgcctgatacaattatctcgggacggagcaacaggtcatgtgctcctgaccgacagtgaatttagcatgcaagaaccaatggttcctgcgaagctcggcacgcaggcagagaaggataggcgtctgaaaaaaaaacatcagctcctcgaagacgcacgcagaaagggcatgcctttcgctcagtgggacgggcccacagtagttagctggttggaactttgggtcggaatgcctgcttggtacgtggcagcctgtagagccaacgtgaagtccggcgcaatcatgagtgcgttgagtgacactgagatacaaagagaaattggtatatccaatgccctacacaggctgaaacttcgtctggctatccaggagatggtcagtctcacctccccctccgccccccccaccagtcgcacctcaagcggaaatgtgtgggtgacgcacgaggaaatggaaactctcgaaacatcaaccaaaaccgactccgaagagggctcatgggcccagacactggcttatggcgacatgaaccatgagtggattggaaacgagtggctgcctagcctgggactcccacaataccgcagctatttcatggaatgtcttgtggacgccaggatgctcgaccatctgacaaagaaagacttacgcgtgcatttgaagatggtggacagctttcataggacatctctgcagtatggaattatgtgtctgaagcgcctgaattatgaccgaaaagagctggaaaagcgaagagaggaaagtcagcatgagataaaggatgtccttgtctggacaaacgaccaagtagtgcactgggtccagtccatcgggctgcgtgattatgccgggaacttacatgaaagcggagtacatggcgccctgctagccctggacgagaatttcgaccataacacactggcccttatacttcaaattccgacccagaacacccaagctaggcaagtcatggagcgagaattcaacaacctcttggcattgggaacggaccgtaagcttgacgacggtgacgataaagtgtttcggagggccccttcttggcggaaaagattccgtcctcgggagcatcatggacggggtggcatgttgtccgcttccgctgaaactctgcctgccggatttagggtgagcacgctgggaacccttcagccacccccagcccctcctaaaaagatcatgcctgaggcccatagccactatctgtatgggcacatgctgagcgcctttcgggattag

SEQ ID NO: 25334 - DNA, 1494 bp, synthetic construct
  source 1..1494: mol_type = other DNA; note = Synthetic coding sequence
gacgtgggcggcgaccggccctgggacagcggcaacacccagctgccacctaggaacccggtgaaggccaacgcaatgtttggggctggcgacgaggatgatactgactttctatctccttctggcggcgctcgcctggcctcgttattcggtctggaccaagctgccgccggacacgggaacgagttctttcaatatacagccccaaaacagccaaagaaaggtcagggcacagcagccactggaaaccaggctactccgaagacagcccccgcaacaatgagcacccctacaattttggttgccacggctgtacacgcctacagatataccaacggacagtacgtgaaacaggggaaattcggggctgctgtgttgggaaatcacactgcgagggagtacaggatcctgctctatattagtcagcagcagccagtcaccgtggcacgcattcacgtgaattttgaactcatggttaggcctaataactacagtacattttacgatgatcagagacagaactggtccatcatgtttgagagcgagaaggcagcggtggaatttaataagcaagtgtgtatcgccaagtgtaatagcacttcctcactggatgccgtactgtctcaagacctcattgtggccgacgggcccgccgtggaagtgggggacagcttagaagtcgcctacacaggttggcttttccagaatcacgtcttaggtcaagtgtttgactccaccgcaaataaggacaagctgcttcgcctgaagcttggtagcggtaaggtcataaaggggtgggaggacggcatgctgggcatgaaaaagggcggaaagcgccttcttatcgtgccacccgcttgcgccgtggggtccgaaggcgtaatcggatggacacaggcaaccgacagcatcctggtctttgaagtggaggtcaggagggtgaaattcgcacgcgatagtggatccgacgggcactcagtcagctcgagggattcggccgcaccttctccaatcccgggcgccgataacctttcagccgaccctgtggtatcaccaccaacctctatcccatttaagtcaggtgagccagcgcttcgaaccaaatccaactccttatccgaacaactggctatcaatacttctccggatgcagtgaaggccaagttaatatccagaatggccaagatgggccagcccatgctccccatacttcccccacagctggactccaacgattccgaaattgaagacgtgaataccctgcagggtggaggccagcccgttgttaccccttctgtgcagcctagcctccatcctgcccatcccgctctgccacagatgaccagtcaagcaccgcagcctagcgtcaccgggctacaggccccaagcgctgcgctgatgcaggttagttcactggatagccactctgcggtgagtgggaatgcgcaatcatttcaagtgacgttctacaaccgcatcaattacatcctgtag

SEQ ID NO: 25335 - DNA, 462 bp, synthetic construct
  source 1..462: mol_type = other DNA; note = Synthetic coding sequence
atgaacctggccgagatctgcgacaacgccaagaagggccgggagtacgccctactgggtaactacgattccagcatggtgtactatcagggggtcatgcagcaaattcagcgccactgccagagcgtaagagaccctgccatcaaaggcaagtggcagcaggtccggcaggagctcctggaggaatacgaacaggttaaatccattgtctctacattggagtctttcaaaatcgacaagccccccgactttcctgtaagttgtcaggatgagcctttcagggatccagccgtgtggcctcctcctgttcctgccgaacaccgcgcccctccacaaatccggcgcccaaatagagaagtgagacccctgcgaaaagagatggcaggagttggagcaagaggacccgttggtagggcccatcctattagtaaatctgaaaagccctctacttctcgggactag

SEQ ID NO: 25336 - DNA, 627 bp, synthetic construct
  source 1..627: mol_type = other DNA; note = Synthetic coding sequence
atgttccaggtgcccgacagcgagggcggccgggccggcagccgggctatgaaaccccctggcggggaatcctctaacctcttcgggagccccgaagaggcaacccctagctccaggccaaatagaatggccagcaacatattcggacctactgaagaacctcaaaatatacccaagcgcactaatcctcctggaggtaagggatccggtatcttcgacgagtccacccccgtgcaaacacggcagcacctgaacccaccagggggcaagacttccgacatttttggctcacccgtgactgcaacgagtcggctggcccatcctaacaagcctacccgcaactccagagaccgggtagccatgttcagttttccctttgcccagatgtctggcgtgggcagaggactcgtgctttgcgagcccggctgttcggctagccccggacgacacgattcttgccttgaaacacgcgcatttcagatggcaggccgatgtttgtgtggggatgaaatgggtcacccatggccatcgctgatgtgtagcccgggcctgcggggcacagggaggggagtgcgcgttgggaggtggggaagggcctggtcattagaccagcaaccagcctcctag

SEQ ID NO: 25337 - DNA, 591 bp, synthetic construct
  source 1..591: mol_type = other DNA; note = Synthetic coding sequence
atgcccttcagcaaggagaagtacatcctggacagcagccccgagaagctgcacaaagaactggaggaagaactcaaactgagctctaccgacctccggagtcatgcctggtaccatggtcggatcccacgggaagtgtccgaaacactggtgcagcggaatggcgacttcttgatccgggatagcctcacctccctaggcgactacgtactaacctgccggtggcggaatcaagcgctgcacttcaagattaataaggttgtcgtgaaggcaggtgaatcctacactcatatccaatacctattcgaacaggagagctttgatcacgtccctgcactggtgcgctaccacgtcggaagtcgcaaggcggtatccgaacagagcggggcgatcatatactgcccggtgaacaggaccttccctctgagatatctcgaggcctcctacggactggggcaaggatcctcaaaaccagcctccccagtttccccttctggacctaagggcagccacatgaaacgtcgtagtgtcaccatgactgacgggctaaccgccgataaggtcactcgaagtgatgggtgtcccacctag

SEQ ID NO: 25338 - DNA, 1986 bp, synthetic construct
  source 1..1986: mol_type = other DNA; note = Synthetic coding sequence
atgcaggccaacggcgccggcggcggcggcggcggcggcggcggcgggggtggtggaggtggaggcggtgggggacagggtcagacccctgaactagcctgcctgtccgctcaaaacggagagagctctcccagtagctcttcttccgctggagacctggcgcacgctaatgggctgctccccagcgctccctctgccgccagtaataacagtaacagcctcaacgtgaataacggtgtccccggcggggccgccgccgcttcctcagctaccgtggcagcagcatcagccactaccgctgcttcatccagtctagctacaccagagctggggagctccctgaagaaaaaaaaacgcctctcgcaaagcgacgaagatgtcatccggctaatcgggcaacatctgaatggactgggccttaatcagacagtggacttgctcatgcaggaaagcggttgcaggctggaacacccttctgctacaaaattccggaaccatgtgatggagggcgactgggacaaggctgagaatgacctgaatgaacttaagcctttagtacactctccacatgccatcgtcgtgcgcggggcccttgaaatctcccagacacttctcggaatcattgtgcgcatgaagttcctgttgctccagcaaaagtacctagaatatctggaggatggcaaggttctggaggccctccaggtgttaagatgcgagctgacgcctctcaagtacaacaccgaacgcatacacgtcctatctgggtatctgatgtgcagccacgcagaggacctaagggctaaagccgaatgggaaggcaaaggtacagctagtcggagtaagctgcttgacaagttacagacatatttgcccccgtctgtaatgctgccccccagacgtctccaaaccttacttaggcaggccgtcgaactccagcgcgatagatgcctgtaccataataccaagctcgataataacttggacagtgtttccctcttgatcgatcacgtctgcagtaggaggcagttcccatgctacacacagcagattttaactgaacactgcaacgaggtgtggttttgcaaattctccaatgacggaactaaactcgccacgggaagtaaggacacaactgttatcatctggcaggttgatccagatactcatctgctcaaactgttaaaaactctggaaggtcatgcttatggcgtgtcatacatcgcgtggtctcctgacgataactatttagtggcatgcggacctgatgactgtagcgagctttggctgtggaatgttcaaacaggtgaactcagaaccaaaatgagtcaaagccacgaggattccctgacctccgtcgcctggaacccagacggcaagcgattcgttactggaggtcagcgaggtcagttttaccagtgcgatcttgacggcaatcttctggactcttgggaaggcgtgcgcgtgcagtgcttgtggtgcttgtccgatggaaagaccgtgctggcctccgatacccaccagcgcattcgtgggtacaattttgaggatctgacggaccgcaatatcgtgcaagaggaccatccaatcatgagcttcacgatcagtaagaacggccggcttgcattgctcaacgttgccactcaaggcgtgcacttgtgggatctgcaggaccgcgtgcttgtgcggaaataccagggtgtgacgcagggtttctacactatccactcttgtttcggcggtcacaatgaggattttatcgcgtctggcagcgaagatcacaaagtgtatatctggcacaaacgcagcgaattgcctattgccgaactcacgggccatacgcggacagtgaactgtgtgtcctggaacccccagattccttccatgatggcttcagccagtgacgatggcaccgtaaggatttgggggcccgcccctttcattgaccaccagaacatagaggaggagtgcagcagcatggacagttag

SEQ ID NO: 25339 - DNA, 1113 bp, synthetic construct
  source 1..1113: mol_type = other DNA; note = Synthetic coding sequence
atggagaagaagaagatggtgacccagggcaaccaggagcccaccacaacacctgacgctatggtccaacccttcacaacgattccatttcctcccccaccacaaaatggcattccgaccgaatatggggtcccacacacgcaagattacgccggccaaacaggagagcataacctgaccctctatggtagtacccaagctcacggagaacagagtagcaattccccctctacccagaacgggtccttaactactgaaggaggtgctcagaccgatggtcagcaatctcagacacaaagctctgagaattcagagagcaaatccactcctaagagactccacgtttccaatatccccttcaggtttcgcgaccctgacttgcgccagatgtttggtcaatttggcaaaatactggacgtggaaataatttttaacgaacgtggctccaagggcttcggcttcgtcacctttgagaattctgctgatgccgatagggcaagggagaagctccatgggaccgtggtggaggggagaaagattgaggtaaacaacgcaacggctagagttatgacaaataaaaagatggtcactccttatgctaatggctggaaactgagtccggtagtgggcgccgtgtacggtccagagctttatgctgcttcctcatttcaggcagatgtcagtttaggaaacgacgccgctgtgcccctctctggacgcggcgggatcaatacttatatccccctaatctccctgccgctggtgcctggcttcccttaccctaccgccgccacgacagccgccgccttcaggggggctcatctcaggggccgaggccgaacggtatatggtgccgttcgggcagtcccgcccaccgccatcccagcctatccgggcgtggacatgcagcctaccgatatgcatagcctactgttgcagcctcagcctcctctgttgcagcccctacagcctttgacggtcactgtgatggccggttgcacacaacctacccctaccatgcctctgccactcccgttggcaatggagctggccctttggcgggtgtataccgaggtcgccacagcagatctccctccaacagaggtgacctag

SEQ ID NO: 25340 - DNA, 348 bp, synthetic construct
  source 1..348: mol_type = other DNA; note = Synthetic coding sequence
atgccccacctgcccctggccagcttccggccccccttctggggcctccgccatagccggggtctcccccgatttcacagcgtgtccacccagtcagagccgcacgggtcccctatttcacggagaaatagggaggctaaacaaaaaaggctgagggaaaagcaggcgactctggaggcggagatcgcgggtgaaagcaagtcccccgccgagtccattaaggcatggcggcccaaagaactggttctatacgagataccgaccaagccaggggaaaagaaagatgtttcaggacctctgcccccagcctacagccccaggtatgtggaagccgcttggtacccctag

SEQ ID NO: 25341 - DNA, 3039 bp, synthetic construct
  source 1..3039: mol_type = other DNA; note = Synthetic coding sequence
atgctgctgaagagcatcttcatcgtgtacatcttcttctacagcatttccgaattgtccctggatagcaccctgcatgcggtgaatctgcattgtaacaatatctccaagattgaggccattgaccacatctggaatctccaacacctggatcttagtagcaatcaaatttcacgcatagaagggcttaataccctgaccaagctttgcactctgaatctgagctgtaacctgattactaaggtggaagggctcgaagagctgataaatctgactcggctcaatgtgtcttacaatcacatcgatgacctgagcggccttattcccctgcatggtatcaagcataaacttcgctatattgacctgcattccaataggatagattcgatccaccatctgttgcaatgcatggttggccttcactttttgacaaacctgattctggaaaaggatggcgacgataaccccgtttgtagactacctggataccgagctgtgatcctgcaaaccctgccccaacttcgcatactggactgtaaaaacatctttggtgaaccggttaatttgaccgaaatcaactctagccagttgcagtgccttgaggggctcctggacaatctggttagcagcgactctccgcttaacatctctgaggacgagatcatagatcgcatgcccgtaatcactgcccccatcgacgagctcgtgccactcgaacagtttgcctccactcccagtgatgccgtcctgacgtcattcatgtctgtgtgccagtcatctgaaccagaaaagaacaaccatgaaaacgatctgcagaatgaaataaagctgcaaaagctcgacgaccagatcctgcagttgctgaacgagaccagcaatagcattgacaatgtgttggagaaggatcctagacctaaaagggatactgacattactagtgaatccgactatggcaatcggaaagaatgcaatcgaaaggtgcctcgtagatctaaaatcccttatgatgccaagactatccaaactatcaagcatcataataagaactacaatagttttgtttcttgtaaccgcaagatgaaaccaccttatttgaaggagctgtacgtgtcaagctctctcgctaactgccctatgctgcaggagagtgagaagccgaaaactgaaatcattaaagtcgaccaaagtcattctgaagataatacttatcagtccctggtcgaacagcttgaccaggagcgcgaaaagcgatggcgggcagaacaggctgagaacaagttgatggattacattgacgagctccataaacacgccaacgagaaggaggacattcacagcctggccttgctgactaccgatagacttaaagagatcatctttcgggaaagaaatagcaaaggacagctagaggtgatggttcataagttacagaatgaaattaagaaacttaccgtagagctcatgaaagccaaggaccagcaagaggatcacttaaaacacctgcggaccctagaaaagacgctagagaaaatggagcgtcagaagaggcagcaacaggccgcgcaaatccggctgatacaggaggtggagctgaaagcctcggccgccgatagggaaatttatctgctgaggaccagtctccacagggagcgtgaacaggcgcagcaactgcatcagttgctggccctgaaagagcaggagcacaggaaggaattagagacccgagagtttttcaccgacgctgatttccaggacgctctcgcaaaggaaatcgctaaggaagagaagaagcatgagcaaatgattaaagagtatcaggaaaaaatcgacgtgctgtctcagcaatatatggacctcgagaatgagtttaggatcgcccttactgtggaggctagacgattccaggatgtgaaggatggcttcgagaatgtggctacagaactggccaagagtaaacacgccctcatctgggctcagcggaaagaaaatgagtcttcttctttgatcaaagatttgacctgcatggttaaagagcagaagacgaagctggcagaggtcagtaagctgaaacaggagactgccgcgaacctacaaaaccagatcaacaccctagaaatacttattgaggatgacaaacagaagagtattcagatcgaactgctcaaacacgagaaggtgcagctcatttccgaactggctgcaaaagaaagtctgatcttcggcctgcggactgagaggaaggtctggggtcacgagctcgcccagcagggctcatccctggcacagaatcgggggaagctagaggcacagatagagtccctgtctagagaaaatgaatgtctgagaaagaccaacgagtctgacagtgatgctctgcggatcaaatgtaagatcatcgatgatcagactgagacgatcaggaagctcaaggactgtctccaggaaaaagatgagcacataaagagactgcaagaaaagatcacggaaattgaaaaatgtactcaggagcagctcgacgagaagtcctctcagctcgacgaggtgttggagaaactcgagcgccataacgaaagaaaagaaaaattaaaacagcagttgaagggaaaagaggttgagctcgaagagatccggaaggcgtattctaccttaaacaggaaatggcacgacaagggggaattgctgtgccacctggaaacgcaggtaaaggaggtgaaggaaaaatttgaaaacaaggagaaaaagctaaaagctgaacgcgataagtccattgaacttcagaaaaacgccatggaaaagctgcacagcatggacgatgcttttaaacgacaggtagatgctatcgtcgaggctcaccaggcagaaatagcccaactagcaaatgagaaacagaagtgcattgacagcgcaaacctgaaagtgcaccagatcgaaaaggagatgcgcgaacttctcgaggagacgtgcaagaacaagaagactatggaggccaaaattaaacagctggcattcgcgttgaatgaaatacaacaggatatgtag

SEQ ID NO: 25342 - DNA, 4665 bp, synthetic construct
  source 1..4665: mol_type = other DNA; note = Synthetic coding sequence
atgagcgccaccagctggttcctggtgagcagcagcggcgcccggcataggctgccacgcgagctgatctttgtaggcagagaagagtgcgaactgatgcttcaaagccggagtgtcgacaaacagcatgccgtgatcaactacgatcaggacagggatgagcattgggttaaggaccttggctccctcaacggtacctttgtgaacgacatgaggattccagatcaaaaatatgtaaccttaaagctgaacgacgttatacggttcggatatgactccaacatgtatgtgctcgaacgggtccaacacagggtgcccgaagaagctctcaaacacgaaaaatatacttctcagctgcaagtgtcagtcaaaggattggcacctaagagaagtgaggctctgccagagcacacaccctattgtgaagcgtctaatcctcgaccggagaaaggcgaccggcggcctggcaccgaagctgctagttacagaacgcctttatacggacagcctagttggtggggcgaggatgacggctctacactacctgatgcacagaggcagggcgagccctatccagagcgtccgaagggtccagtacagcaagatggagaactccatggttttagggctcctgcagagccacagggatgcagttttcgacgcgaaccttcctactttgaaatcccaacaaaagaaacacctcagccctcccagcctccggaggtgcccgcccacgagatgccgaccaaggatgctgaggcaggaggtggtggggccgccccggtggttcagagtcatgcctccttcactattgagttcgacgactgcagtcccggtaagatgaagataaaggatcatataacaaaattcagcctccgccagagaaggcccccagggaaggaggcaacccctggagaaatggtttccgctgagacaaaagttgccgattggttagtgcagaacgacccatccctcctgcacagagtagggccaggggacgaccgacatagcacaaagagcgatctcccagtacacactagaacactaaaggggcacaaacatgaggacggaacacagagtgattctgaggaccccttagccaaggcagcctcagccgccggcgtgccccttgaagcatcgggcgaacaggttcgcttgcagaggcagatcaaacgggatccccaggagctcttgcacaaccagcaggcatttgtgattgagttctttgacgaggacacgccacggaaaaaaagatctcaaagttttactcactctccaagcggtgatccgaaggcagacaagcggcgtggcccaacaccagcagatagggacagaccctcagtgcccgcgcccgtccaggccggtggccgatcctctggacctcaaagagccggaagtttgaaaagagagaagactgaggagagactgggttcaccaagccccgccagcagaacaccagctcggcccttcggttccgtgggtcgccgctcacgcctcgctcaggattttatggctcaatgcctccgggagagcagccctgccgccaggcctagcccggagaaggtcccacccgtgctcccagccccgttaacgccacacgggacttcccccgtggggcctcccaccccccccccagcacctacagacccccagctgaccaaagctcgtaagcaggaggaggatgactccctgagcgacgctgggacctacacaatcgaaacagaggctcaagacacagaagtagaggaggctcgaaaaatgatcgaccaggtattcggcgtcctggaaagtcccgagctgtctagagcttcaagcgctacttttcgcccggtcatcagaggagaccgggacgagagcgacgatggaggcgtcgcccaacgaatggcgttgctgcaggagttcgcaagcagacccttgggggcagccccgcaagccgaacaccaggggttacctgtgccgggatcacccggaggccagaagtgggtgtcgcgctgggcctctttggctgattcatactccgaccccggtctgacagaagatggcctgggccggcggggaggtgagcccgaaggctcactgccggtccgcatgagacggcggctgccccaattgcctagcgaaagggccgactcacctgcagggcctgaatcctcacggcggtccggccccggaccacccgagcttgactctgagcagccatcccgcctctttggacaagaagaactggatcccgattctctcagtgatgcttctggctcagacggtggccgtggtccagagcctggcgtggagccccaagattcacggcgccgctcaccccaggaaggccccacctggagccgcggtcggaggagcccacgggccccgggcgagcctacacctgcatctttcttcataggggatcagaatggagacgccgtgctctctcgcaagccactggctgctccaggggacggtgagggcctgggccagaccgcacagccgtctccccccgcacgggacggtgtctacgtgtccgccaatggccggatggttatccaacttagaccggggagaagccctgaacctgacggccctgccccagcctttctgagacaggaaagctttactaaagagccagcctccgggccgcctgcaccaggaaaaccccctcacatttccagccaccctctcctccaggatttagcggctacccgggcggctaggatggattttcacagccaggatacccacctgattctgaaggagacggagaccgccctcgccgcattggaagccagactcctttcgaactctgtagatgcagagtgcgagggaggctccacaccccggcccccagaggatgccctgagcggtgacagcgacgtcgatactgcaagcaccgtaagcctgcgctccggcaagagtggccccagccctacaaccccccagcctcttcgtgcccagaaggagatgagcccgtctcctcccgcagcccaggaccccggaggcacagctctagtgtccgcacgggaacagagctcagagcgtcagcaccacccactcggacctactgacatgggacggggggagcccgtgaggcgtagtgccatcagacgggggcacaggcccagaggttcacttgactggccttctgaagagcgaggacccgtcctggctcaccttcccagcagcgacgtgatggcctccaatcacgagaccccagaagccacaggcgctgggcgcttagggtctcggagaaagccagccgccccaccacctagcccagccgctagggaggagcagtccagatccagcgcctcaagtcagaagggcccccaggcgctgacaaggtccaattcattgtccacccctcgcccaacccgagcttccagactgaggcgcgcgcggctgggcgatgcgagcgatactgaagctgcggacggtgagagagggtcgctgggaaaccctgaacctgtgggtagacctgccgctgagcaggccaaaaagctctctagattggacattttggcaatgccacgcaaaagggcaggaagcttcacaggaacctctgacccagaggccgcccccgcacgaacttcttttagcggacgtagtgtcgagctctgctgcgccagccgcaaaccaacaatggcagaagcccgggctgtgtcacgtaaagctgcgaacactgctacaacgacagggccaagacaacccttcagccgcgcccggagcggctcggcgcggtacacttcaacgactcagaccccacgtgccggaagctcttcccgggctcgcagccgcgccccgggaccgcgggatacagatgatgacgaggaagaacctgatccttacggcttcattgtgcagaccgctgaaatcgcagaaatcgccagattatcgcagaccctagtcaaagacgttgctatactggcccaggaaatccatgatgtcgccggagacggcgacacactcggttcctccgagcctgcacacagcgcctcgctgagcaatatgccaagcactcctgcctccactatttcagcgcgtgaggagctggtgcagcgaatccccgaggcctctctgaactttcagaaagttcccccaggatccttaaacagtcgcgattttgatcagaacatgaatgattcctgtgaagacgcactggcaaacaagaccagaccgaggaatcgggaggaggtcattttcgacaacctcatgctgaatccagtgagccaacttagccaggctattcgcgaaaatacggagcacctggccgagaaaatgaaaatccttttccagaacaccggcagggcttgggaggatctggaagcccggatcaacgccgagaatgaggtgcctatcctaaaaacctctaacaaagagatttcctccatcttaaaggagttgcggagagtccagaagcagctggaggtaattaacgccatagtggatcccagtggatcactggatctcctcaccggaaacagatccctggcctccagtgcgcagccaggactgggcaaggggagagttgctgcacaaagcccaccttcgcccgccagcgccgaggctctgttacccgctcttccactgcggaacttcccacagagagccagctgcggcccccccagccttcccgaccctacttttctgcccgacgctgaaagattcttgatctag

SEQ ID NO: 25343 - DNA, 696 bp, synthetic construct
  source 1..696: mol_type = other DNA; note = Synthetic coding sequence
atcatcctgctgctggtgcccagcgaggagaccgacgagaacgacttaattttggaagtgacggcgggggtgggtggcgggctgcgtcacgcttcagcctctataggtggatcggaggcctataggcacatgaagttcgaaggcggcgtccatcgcgtccaaagagttcctaagactgaaaaacaaggacgggtgcacacatctaccatgacggtagctatcctccctcagcccaccgaaataaaccttgtaataaaccccaaggatctgcgtatcgatacaaagcgggccagcggtgctgggggacaacatgtgaatactaccgactccgccgtccgcatagttcacctccccacgggcgtggtctccgaatgccaacaggaaagatctcagcttaagaataaggagctggcgatgactaagctgagggctaagttgtatagcatgcacctcgaggaggagattaataaacggcaaaacgcaaggaaaatccaaatcggatcaaaggggagatcagagaaaatccggacttacaattttccacagaatagggttacagaccataggatcaataagaccctacacgacctggagaccttcatgcagggggactacctcctggacgagctggtgcaatcccttaaggagtatgccgactacgaaagcctagtcgaaatcatcagccagaaagtgtag

SEQ ID NO: 25344 - DNA, 483 bp, synthetic construct
  source 1..483: mol_type = other DNA; note = Synthetic coding sequence
atggaggccgagcggccccaggaggaggaggacggcgagcagggccctccgcaggatgaggaaggttggcccccacccaactccaccactcgcccatggcgttctgccccgccatccccaccgcccccagggacaagacatactgcccttgggccacgctccgccagcctactctctctccagactgagctgctgcttgacttagtggccgaggctcagtctcgccgactggaggagcaaagggctactttttatactccccagaacccgagtagccttgcccctgcgcccctgagacccctcgaagatcgagaacagctgtactccactatactttctcatcagtgccagcgcatggaggcacaacggtctgaacccccccttcccccagggggacaagagctgttggagttgctcctgagggttcagggtggagggagaatggaagagcagagatctcgcccccctacccatacgtgctag

SEQ ID NO: 25345 - DNA, 423 bp, synthetic construct
  source 1..423: mol_type = other DNA; note = Synthetic coding sequence
atgcagttcggcgagctgctggccgccgtgcggaaggcccaggccaatgttatgctgttcctggaggaaaaagaacaggcagccttatcccaggccaacggtatcaaagcccacctggagtacagatccgcagaaatggaaaaatctaaacaggaactcgagaccatggccgctatttcgaatactgtgcagtttctcgagatgtgtatgacctctcgtagtacgcgcacgcaacacacctccatctcagggtgccgcagaaggactgcacgtagcccaaccccaagaccggggtccattcccacacggacttcgccggctggcagctgcacgggcggacggtgttgccccagccgggtctgcacttgcaccggcaccattttgcggtggcgatcgtcggggcaggctccaatgctcgcatag

SEQ ID NO: 25346 - DNA, 819 bp, synthetic construct
  source 1..819: mol_type = other DNA; note = Synthetic coding sequence
atggccagcagcaacaccgtgctgatgcggctggtggccagcgcctactccatcgcccagaaggcgggcatgatagtgcggcgtgtaatcgcagaaggtgatctgggaatcgtagagaaaacatgtgctactgatcttcagacgaaggccgacaggcttgctcaaatgtctatatgctcgagcctggcccggaagttcccaaaactgaccataatcggtgaggagctggtggtttgggtggatccgttagacggcacaaaggaatacactgaaggtctccttgacaacgtaacggtacttatcggcatagcctacgagggtaaggcaatcgccggtgttattaatcaaccttactataattacgaggctggccccgacgccgtattgggacgaacaatctggggcgtgctgggcctgggagctttcggattccagctgaaggaggttccagccggcaagcacatcattactacaaccaggtcacacagcaacaaattagttactgactgcgtagctgccatgaatcctgatgcggtacttcgcgttggcggtgccgggaacaagatcatccaactcattgagggtaaggcctccgcctacgtgtttgcatcgccagggtgcaagaaatgggatacctgtgctcccgaagtcatactgcacgcagtggggggcaagctgactgacatccacggaaacgtgcttcaataccacaaagacgtgaaacacatgaacagtgcgggagttctcgcaacattgcgtaattacgattattacgctagccgggtgccagagagtattaaaaatgccctggtgccttag

SEQ ID NO: 25347 - DNA, 606 bp, synthetic construct
  source 1..606: mol_type = other DNA; note = Synthetic coding sequence
atggagagcaaccacaagagcggcgacggcctgagcggcacccagaaagaggctgctctccgggctttggtgcagcgcacggggtattctctggtgcaagaaaacggccagcgtaagtacggcgggccaccccccggttgggacgcagccccaccggagcgcggctgcgagatatttattgggaagcttcctagggacctttttgaagatgagttgatcccactgtgcgaaaaaatcgggaaaatctacgagatgagaatgatgatggattttaatggtaacaaccgagggtatgcctttgtgacattttccaataaagtggaagcaaaaaatgctattaagcagctcaacaactacgaaattcgaaatggccgcttgctcggggtctgcgccagcgtcgacaattgtcgactgttcgtgggggggatccccaagaccaagaaaagggaggagattctcagtgagatgaagaaagtcacagagggtgtggtggacgttatcgtttatccgagcgcagccgacaagacgaagaaccgaggttttgccttcgtggagtacgagagtcacagggctgctgccatggctcggcgcaagctcctgccctag

SEQ ID NO: 25348 - DNA, 1905 bp, synthetic construct
  source 1..1905: mol_type = other DNA; note = Synthetic coding sequence
atggccctgagcaagcgggagctggacgagctgaagccctggatcgagaagacagtcaagcgtgtactgggcttttccgagcctaccgtggtgacggccgcattaaattgtgtgggcaaggggatggacaagaaaaaggctgccgaccacctgaaaccctttttagatgactcaactcttagattcgtggataaactgtttgaagctgtcgaagagggccgttcctcacgtcacagcaagagctctagcgacaggtcacgcaagagagagttaaaaattaagcagatgatggaggccgctacgcgacagatcgaagagcgcaagaaacaactgtccttcatcagcccccccactccacagcccaagactccatcttcttctcagccagaaagactgccaattggaaacaccatccagcctagccaggcggccactttcatgaacgacgcaattgaaaaagcacgcaaagctgcagaattacaagctcgcattcaggcccagcttgctctgaaacctggcctgattgggaatgccaatatggtggggttggctaacttgcatgctatgggcatagctccgcccaaggtggaactcaaagaccaaacaaagcccacccctctgattctcgatgagcaaggccgcactgtagacgctacagggaaggagatagaacttacacaccggatgccaaccttaaaggcaaacatccgcgcagtcaaacgtgagcagttcaagcagcagttgaaggaaaagccgagtgaggacatggagtctaataccttctttgaccctagggtgtccatcgcaccgtctcagagacagaggcgaactttcaagtttcacgataaggggaagttcgaaaagatcgcccagcgcctacgaactaaggcgcagttagagaaacttcaggcagagatttctcaagcagcgaggaagactggaatccacacgagcactcggctggccctcattgcaccaaaaaaggaacttaaggagggagatatccccgaaatcgaatggtgggacagttacatcattccaaatggctttgatcttactgaggagaatcccaagcgggaggactatttcggaattacgaatctggttgagcacccggcccagctgaatcccccagtagataatgacacacctgtcactctgggtgtgtacctcactaaaaaggagcagaagaagctccgtagacaaacccggagagaagcccagaaggaactgcaagagaaggtccgccttggtctcatgcccccacccgaaccaaaggtgcgcattagcaacctgatgcgggttctggggaccgaagcagtccaagatcccaccaaagtagaagcacatgttagagctcagatggcaaagaggcaaaaggcgcacgaagaagccaatgccgccagaaagctcaccgccgaacaacgaaaagtgaagaaaatcaaaaagttaaaagaggacatatcccagggtgtgcatataagcgtctacagggttcgtaatctatcgaaccccgcaaaaaagttcaagattgaagccaatgctggacagttatacctaacaggagtcgtggtcctgcacaaggacgtgaatgtggtcgtggtggaaggagggccgaaggcacagaagaaattcaagaggctcatgctgcatcgaattaagtgggacgaacagaccagtaacacgaagggagacgatgatgaagagtctgacgaggaggcggtcaaaaaaaccaacaagtgtgtgctggtgtgggagggaactgccaaagaccggagcttcggtgaaatgaaattcaagcaatgccctacagaaaacatggctagagagcactttaaaaaacacggagccgaacactactgggacctggctctgtccgagtccgtcttggagtccacggattag

SEQ ID NO: 25349 - DNA, 3192 bp, synthetic construct
  source 1..3192: mol_type = other DNA; note = Synthetic coding sequence
atgccccacctgcccctggccagcttccggccccccttctggggcttacgacattctagaggattgccccgatttcactcggtttcaacgcagtctgagccgcatgggtctcctatctccaggaggaacagggaggccaaacaaaagagactgcgcgagaagcaggcaacattagaagctgagatcgcgggcgagtccaagtccccggccgaaagcattaaagcttggcggcccaaggagctcgtactgtacgagattcctaccaaaccaggcgaaaaaaaagatgtctccggtcctttacccccggcctacagtcctcggtacgtagaggccgcctggtacccatggtgggtcagggaagggttttttaagccagaataccaagctcgactaccccaagcgacaggggaaacatttagtatgtgcatccctccaccaaatgtcacaggtagcctgcatatcggccacgctctgacagttgcaatccaggacgcacttgtgcgctggcatcgaatgagaggggaccaagtattgtgggtaccgggctcagaccacgcaggtattgcaacccaggctgtggtcgaaaaacagctatggaaggaaagaggagtgcgccggcatgaactgtcaagggaggctttcctccgggaggtatggcagtggaaggaggcaaaggggggagaaatttgcgagcagttgcgggccttaggtgctagtctagattgggaccgagaatgcttcaccatggacgtggggtccagcgtcgctgtgaccgaggctttcgtgcggctttacaaagctggtttattgtaccgcaatcaccagcttgtaaattggtcttgtgctttgcgaagtgcaatatcggacattgaggtagagaatagacccctccccggacatacccaattacgcttaccaggctgtcccaccccggtaagcttcggcctgctgttctccgtcgcgtttccggtagatggcgaacctgacgccgaagttgtggtgggaaccacaaggcctgagaccctccctggagatgtggccgttgctgttcacccggacgattctagatacactcatctccacggcagacaactgagacatcccctgatgggccagcccctgcctctcatcacagattatgctgtgcagccgcacgtcggcactggggctgtgaaggttactcccgcacattcgccagccgacgctgagatgggagctaggcacggattgtctcccctcaacgtcatcgcagaggatggcacaatgaccagtctctgtggagactggctccaaggattgcaccggtttgtggctagagagaaaatcatgtccgtcctctctgagtggggcctcttcaggggacttcagaaccaccccatggtcctgcctatatgttcccggagcggagacgtcatagaatatctgttgaaaaaccagtggttcgtgaggtgtcaagaaatgggggctagagctgccaaagccgtggagtctggcgctctcgagctatctccttcattccaccagaaaaactggcagcactggttcagtcacattggagattggtgtgtttcgagacagctatggtggggtcatcagatacccgcctatctggttgttgaggatcacgcccagggagaggaagattgctgggtggttggccgcagtgaggccgaggcacgggaggtcgcagctgaactgactggtcgccctggggccgagcttactctagaacgagatcctgatgtgctagatacatggttctcttccgcactcttcccattcagcgctctcggatggccccaggagactcccgacctcgctcgtttctatcccctgagcttattagaaacaggcagtgatctcctcttgttctgggtaggacgcatggtaatgcttggaacacagctgacaggtcaactgccttttagcaaagtcctgctgcatcccatggttagggaccggcaggggagaaagatgtccaagagtctgggcaatgtgctggatccccgggatataatctcaggtgtggagatgcaagtgctgcaggagaagctgcgttcgggaaatcttgaccccgccgaactcgcaatcgtagctgccgcacaaaagaaagacttcccacacggcatccccgagtgcggcaccgatgcccttcggtttacactgtgttcccacggcgtacaagctggcgacctgcacctatctgtgagcgaggtacaatcttgccgacacttctgcaacaaaatctggaacgccctgcgtttcatcctcaacgctttgggagaaaagttcgtgccccagcctgcagaggagctgtcccccagctcacctatggacgcctggatcttgtcccgattagccctcgccgcccaggagtgcgagagaggattcttgactagggaactttctctggtgacgcacgcacttcaccatttttggctgcataatctgtgcgacgtgtatcttgaggccgtgaagcctgtgttgtggcattccccacggccactggggcctcctcaggtgcttttttcttgtgccgatcttggtctcaggcttttagccccgttgatgccattcttggctgaagaactgtggcagcgcctgcctcctcgtcctggatgcccacccgctcccagcatttctgtcgcaccatatcctagtgcttgttcactggaacattggaggcagcccgaactcgaacggaggttttcgagggttcaggaggttgttcaggttctgcgtgccttaagggccacctaccagcttactaaagcgcggccccgcgtactcctgcagtcttcggaacctggtgatcaagggctgttcgaggccttcttggaacccctgggcactctgggatactgtggtgcggtcggactactgcctcctggcgcagccgcaccgagtggctgggcacaagccccactgagcgataccgcacaagtgtacatggagctccaagggctcgtcgacccgcagatccaattgcccctgctggccgcacggaggtataagctgcagaaacagctcgatagcctcacggcccgtacccccagcgagggagaggctggaactcagaggcagcagaagctgagtagccttcagttggagcttagcaagctcgacaaagccgcttctcatttgaggcaacttatggacgagcctcctgcacctggctcccccgagttgtag

SEQ ID NO: 25350 - DNA, 2118 bp, synthetic construct
  source 1..2118: mol_type = other DNA; note = Synthetic coding sequence
atgatcgacagcgtgaagctgcggcgggacagcgccgccgacttctttagccattacgaatatctgtgtgccctgcagaacagcgtccctttacctgcagtgagggcctgcctgcgtgagggagtcctcgacttcaatgcagaccggctcagaggtgtggactgggctcctcttctgtcaactcttaaaatcaataaggatttacctttggtctctatcaagtcgttcttccagccctggcttggtgacaccggctccgatatgaataaattttgtaggtctagggtgcctgctattaggtataaggatgtcaccttccaactgtgcaaagcccttaagggatgtctctccatcagctcagtgctgaagaacctggagcttaacggcttgatcctgagagaaagggacctgacaatcctggccaaggggttgaacaaaagtgcctctttggtccacctctctcttgcaaactgtcctatcggtgatggagggctcgaaattatatgtcagggaatcaagtcatccattaccctgaagaccgtgaatttcacgggatgtaaccttacatggcaaggggccgaccatatggcaaaaatccttaaatatcagacaatgcggaggcatgaggaaacctgggcagaaagcctaaggtaccggcgtcccgatcttgattgtatggccgggttgaggcgcattacactgaactgcaatacccttatcggggacttgggggcatgtgcctttgcagatagtctctcggaggatttatggttaagagccttagatcttcagcagtgcggcttgacgaacgaaggcgccaaggccctgctggaagctctcgaaacaaacacaactttggtggtgctggacatacgcaagaaccctcttattgaccatagcatgatgaaggccgtgatcaagaaagtgttgcagaatgggcgcagcgccaagtctgagtaccaatggatcacgagtccttctgtaaaggagccatcaaaaacggctaagcagaaaagacgcacaataatcctgggtagcgggcataaaggcaaggcgacaatcaggatcggacttgcaactaagaaaccggtatcatccgggagaaagcactcactgggcaaggaatactacgctccagctcctcttccaccaggggtgtctggattcctcccatggcgtacggcggagcgggccaagaggcacaggggattccccttgataaaaaccagggacatttgtaatcagctccagcaacctgggttccccgtgacggtgaccgtggaatctccctctagctcggaggtcgaagaggtggacgatagttctgagtccgtgcacgaagtgcctgaaaagaccagcattgagcaagaagcactgcaggaaaaactggaagagtgcctgaaacagctgaaggaggagagggtaataaggttaaaggttgataaacgagtgtctgagttggagcacgaaaatgcacagttgaggaacatcaacttttctttgtcagaagctctgcacgctcagtccctgaccaacatgattttggatgacgagggagttctgggcagcattgagaactctttccagaagttccacgcatttcttgacctgttaaaagatgccgggctggggcagctggcgaccatggctggcattgatcaatctgatttccaactgctggggcatccacagatgacaagcaccgtgtctaatccacccaaagaggaaaagaaggcattggaagatgaaaaaccagaacccaaacaaaacgcgctcgggcaaatgcagaatattcaagtaagcatttgcatgcagtctgcttacaatgagggcaccctaatgaaattccagaagatcacaggggatgccaggatcccactgcctctcgatagcttccctgtgccggtgtctacgcctgagggactcgggacatcatcaaataacttaggtgtacctgccactgagcaacgtcaggagtcctttgagggcttcatcgccaggatgtgcagtccctcccctgatgctacgtccgggaccggctcccagaggaaagaggaagagctgtcacggaattcaagaagcagttcggagaagaaaaccaaaactggtagccactag

SEQ ID NO: 25351 - DNA, 1287 bp, synthetic construct
  source 1..1287: mol_type = other DNA; note = Synthetic coding sequence
atggcctggcagagccggaagggcggccacttccgggaggtggccatgcaatggaaggtgaccttgacatctcggtgggggcttctgaggcattgtcaggtccttgccggcctccttcacttgggaaacatccagtttgccgcctcagaagatgaagcacagccctgtcagcccatggatgacgcaaagtattccgtcaggactgctgcaagtctgctcggactgccggaggacgtactgcttgaaatggtgcagatacggactatcagagcagggcgtcagcagcaagtctttcgcaaaccttgcgcccgagcagagtgcgacactcggagagattgtctggccaagctcatctacgctcggctgttcgactggctagtcagcgtcatcaactcctccatttgtgcggataccgattcatggacaaccttcattggccttctcgacgtctacggattcgagtctttccctgacaacagtctggagcagctgtgcattaactacgctaatgagaaactccaacagcattttgtcgcccactatttgagagcacaacaggaagagtacgccgtggagggactagagtggagctttatcaactatcaagataatcaaccatgtctcgacctcatcgagggatcaccaatcagcatctgtagtctgataaacgaggaatgcaggctaaatcgacccagctctgcggcccagcttcagaccaggatcgagactgccctcgccggctccccttgtctaggacacaataagctgtcgcgagaaccatcttttatagtcgtgcactacgccggccctgtgaggtatcatacagccggactcgtagagaaaaacaaggacccgattcctcccgaactggatggggtggaggagaagcacttctcccaggcaccatgttccctgagtacgtccccacttcagactcgcctcctggaggctatcatacggctttggccacttggtctagttctggcaaatacagccatgggcgttggaagttttcagaggaaactggtcgtatgggcctgcctgcaactccccagaggctctccctcttcgtacacagtccagacagcccaggatcaagccggcgtgacttctattagggcactgccacaaggtagcattaagtttcattgtcgcaaatcccccttgcggtatgccgacatctgtcccgagcccagtccatattctataacaggttttaatcagatcctgctcgagaggcatcggctgatccacgtgaccagcagcgcctttaccgggctcgggtag

SEQ ID NO: 25352 - DNA, 927 bp, synthetic construct
  source 1..927: mol_type = other DNA; note = Synthetic coding sequence
atgaaccccatcgtggtggtgcacggcggcggcgccggccccatcagcaaggatcggaaggagcgtgtgcatcagggtatggtgcgggcagccacagtcggctacgggattctgagggagggtggcagcgcggtggatgctgtcgagggtgcggtggtcgccctcgaagatgaccctgagttcaatgccggttgcgggagtgtccttaatacaaacggtgaagtcgagatggatgcttctataatggatggcaaagacctatccgcaggggccgtgagtgccgtacaatgcattgctaacccaataaagctcgccaggctcgttatggagaagacccctcattgttttctcaccgaccagggcgcagcccagttcgccgccgcaatgggagtgcccgagattcccggcgagaagctggtaactgagaggaataaaaaacgcctcgaaaaagagaagcacgagaagggtgcccagaaaaccgactgccagaaaaatttaggcaccgtgggagcggtagccctcgactgtaaaggcaacgtcgcctatgcgacaagcactgggggaatagtgaataaaatggttggacgtgtgggagattccccatgtctaggcgccgggggctatgccgacaacgatataggggcagtgtcaacaactggccacggcgagtccatactcaaagtgaatctcgctcggctaacccttttccacattgagcagggcaaaacagtggaagaggctgccgacctttcacttggatacatgaagagtcgggtgaaggggcttggcgggctgatcgtggtatccaagactggagactgggtggctaagtggacttccacctctatgccatgggccgccgccaaagatggaaagcttcattttggcattgaccccgatgacaccaccatcactgatttaccctag

SEQ ID NO: 25353 - DNA, 429 bp, synthetic construct
  source 1..429: mol_type = other DNA; note = Synthetic coding sequence
atgagcctgcacggcaagcggaaggagatctacaagtacgaggccccatggaccgtgtacgctatgaactggtccgttcgccctgacaaacgatttaggctggcactaggatctttcgtggaagagtataacaataaagtggttatcctggatgtgagagtgccatgtacaccggtggcaagattaaacaaccacagagcatgcgttaacgggattgcttgggccccccatagcagctgtcacatctgtacagctgctgacgaccaccaagcactgatatgggacatccaacagatgccccgggccatcgaggaccctattctcgcatataccgctgagggggagattaacaacgtgcaatgggcgtctacccagccagattggattgctatctgttacaataactgtctggagattcttcgagtatag

SEQ ID NO: 25354 - DNA, 1233 bp, synthetic construct
  source 1..1233: mol_type = other DNA; note = Synthetic coding sequence
atggccgcccccagccccagcggcggcggcggcagcggcggcggcagcggttctggcacgccaggccctgtagggtcccctgctcccgggcacccagcggtcagcagtatgcaggggtttcagatcaacttctgtgagaaagcccagtccaagcgaaaggccctcaagctcaatttcgctaatcctcctttcaaaagtactgcccggtttaccctgaaccctaaccctacaggcgtgcagaacccacatatcgaacggctgaggacccattctatagaatcttccggcaaactcaagattagtcccgaacagcattgggattttaccgccgaggatctgaaggatttgggggagatcggacgcggtgcatacggcagcgttaacaagatggttcataagccctcggggcaaattatggcggttaagcgcattaggagtacagtggatgaaaaggagcagaagcagcttttaatggatctcgacgtcgtcatgcggtcatccgactgtccctacatcgttcaattttatggggctctgttccgagagggggattgctggatatgtatggaattgatgtccacatccttcgacaaattttataagtacgtctattccgtgctcgatgacgttatcccagaagagatcctcgggaagatcacgcttgccaccgtcaaggcacttaatcatctgaaagagaacttaaaaataatccatagggatattaagccgtctaatatccttctagatcggtccgggaacattaagctgtgcgacttcgggatctccggccagttagtagatagtattgccaaaacccgcgacgctgggtgcagaccctacatggctcccgaacgaatagatccgtccgcaagccgccagggatatgatgtcaggagcgacgtgtggtcactggggattaccctatacgagcttgctacaggccgcttcccgtaccccaagtggaattctgtgttcgatcagctgacccaggtcgtaaaaggcgaccctccccagttgtcaaactctgaagaaagggagttttctccttcttttataaattttgtgaacctgtgtctgacaaaagacgaatctaaacgacctaaatataaagaattgcttaaacatccgtttatcctgatgtacgaggagagggcggtcgaagtggcttgctatgtctgcaaaatcctggaccagatgccagccacacctagctcacccatgtatgtcgactag

SEQ ID NO: 25355 - DNA, 687 bp, synthetic construct
  source 1..687: mol_type = other DNA; note = Synthetic coding sequence
atgcagctggccgtggtgagcgaggagcaggaccagaacctgaaccgactaatttgttggatcttgatgcagtttatttatatcagctccgactatgtgttcgacgggaccaaccctccataccgagaagaggacatccctgcgcctttgaatctctacgggaagacaaagctcgacggggagaaggctgtcctggagaataacctgggagcagcagtcctgcggatcccgatcctctacggggaagtagagaaactggaggaatcagccgttacggtgatgtttgacaaggtacagtttagtaacaagtccgctaatatggaccattggcagcagcggttccccactcacgttaaagacgttgccaccgtctgccgtcagctagcggagaaaaggatgctggacccctctatcaaaggaacatttcactggtcaggaaacgagcagatgactaaatacgagatggcttgcgccattgccgacgcttttaatttgccctccagtcatttgcgccccattacagactccccagtgctgggagcccagagacctcgaaacgctcagctagattgcagcaagctagagactctgggcatcgggcagagaacgccttttcgaataggtataaaagaatcactctggccttttctcatcgacaaacggtggcgacagacagtcttccattag

SEQ ID NO: 25356 - DNA, 1101 bp, synthetic construct
  source 1..1101: mol_type = other DNA; note = Synthetic coding sequence
atgagcgccgccaaccccgagacccccaacagcaccatcagccgggaagctagtacacaaagcagttccgcagccgcatcccaggggtgggtccttccagagggtaagattgtccctaacaccgtgttcgtggggggcattgatgctagaatggacgagactgagatcggcagctgcttcgggcggtatggatccgtaaaagaggtcaaaatcattactaaccgaactggcgtcagtaaaggctacggcttcgtctcattcgtcaacgatgttgacgtgcaaaaaatcgtagggagtcagatccatttccacggaaaaaagctcaaactggggcctgccatcaggaagcagaagctgtgtgcacgtcatgtgcagccacgacccctcgttgtcaatccaccaccgcctcctcagtttcagaatgtgtggcgaaatcccaataccgaaacctatcttcagccccaaatcaccccgaatccagtgacccaacatgtccaggcttattccgcgtacccccacagccctggccaagtgataacagggtgccaacttcttgtgtacaactaccaagagtaccccacttaccctgacagcgccttccaggtgaccacaggttatcagttgccggtctacaactatcagccgtttcccgcataccccagttctccgttccaagtaaccgcaggctaccagctgcccgtgtacaattaccaggcgtttccagcttacccatcttccccgtttcaggtgacaactggctaccagttaccagtgtacaattatcaagcctttccagcttatccttcgagccctttccaggtgaccactggttaccagctcccggtgtataattatcaggcgtttcctgcctacccatcttcaccatttcaggttacaacaggttatcagctccctgtttacaactaccaggctttcccagcgtaccccaatagcgccgtgcaggtgacaactgggtaccaatttcacgtgtataactatcagatgccgccccagtgccctgtaggagagcagcgcaggaatttatggacggaggcctacaagtggtggtatctggtgtgcctaatacagaggagagactag

SEQ ID NO: 25357 - DNA, 306 bp, synthetic construct
  source 1..306: mol_type = other DNA; note = Synthetic coding sequence
atggccagcgccggcacccagcactacagcatcggcctgcggcagaagaacagcttcaagcagtccggccccagcggcacagttccagctacccctcccgagaaaccatccgaggggcgagtatggccacaggcccatcaacaggtcaaacccatctggaagttagagaagaaacaggtcgagaccttatctgctggtctgggccccgggctgttgggtgtgcctcctcagccagcgtacttcttctgcccaagcacactgtgttctagcggaaccaccgctgtgattgctgggcattcaagttag

SEQ ID NO: 25358 - DNA, 2121 bp, synthetic construct
  source 1..2121: mol_type = other DNA; note = Synthetic coding sequence
atgatcgacagcgtgaagctgcggcgggacagcgccgccgacttcttttcccactatgagtatctttgcgcgctgcaaaacagcgtccccttgccagccgtgcgtgcatgcttgcgagagggcgtgctcgactttaatgctgacaggctcagaggggtcgactgggctcccctgctgagtacactgaagatcaacaaagacctgcctctagtgagtattaaatccttttttcagccttggctgggggatacgggaagtgatatgaataagttttgccgaagtcgcgtgcctgccattagatacaaggatgtgactttccaactctgcaaagctctaaaaggttgtctctcaatcagttccgtgcttaaaaacctagagctgaacggtctgatcttgcgggagcgagatctcactattctggctaaggggttaaacaaatctgcaagtctggtgcacttgagcctggcaaattgtcctattggagacggcggactggagatcatttgccaaggtattaagagctcaatcacactgaagaccgtcaacttcacggggtgtaacctgacctggcagggagcggaccacatggccaaaattctgaaataccagactatgcgacgccatgaagaaacatgggcagagagcctgagatacaggagaccggatctggactgcatggccgggctgcgaagaataacgctgaactgtaataccttgatcggagacctcggggcatgcgcctttgccgattccctcagcgaagatttgtggctccgggccctcgacctccaacaatgcggtctgacaaatgagggcgcaaaggcattattggaagcacttgagactaacacgaccctggtggttttggatatcagaaaaaatccgcttattgaccatagcatgatgaaggccgtaataaagaaggtgctgcagaacgggagatccgccaaaagcgaatatcagtggatcacaagtccttctgtgaaggagcccagtaagaccgccaaacagaaaaggcggacaatcattttaggatcagggcataagggtaaggccaccatcaggatcgtcgggctggccacgaaaaagcccgtttcttctggtagaaagcacagtctagggaaagagtactacgcgcctgcccctctcccgcccggtgtgagtggattcctgccctggcgcaccgcggagagggccaaaagacatcgagggtttcccttaatcaagactcgtgatatctgcaatcagctccaacaacctgggttcccggtgactgtcactgtggagtcaccttcgagctctgaagtggaagaagttgatgattcctctgagtccgtgcatgaggttcctgaaaagacctcgatcgaacaggaggctctccaggaaaagctggaggaatgcctgaaacagctgaaagaagaaagagtaatcaggctcaaggtggataagagggtatctgagcttgaacatgagaacgctcagctgcgaaacatcaacttttctctgagcgaggcactgcatgctcagtccctaacaaatatgatactcgatgacgaaggggtgctcggcagtatcgagaatagtttccagaagtttcatgcttttcttgacctgctcaaagatgctgggcttgggcagttggccactatggccggcatcgaccagagcgatttccagcttctagggcatcctcagatgacctccacggtgtccaatccccctaaagaagagaagaaagccctggaggatgagaagcccgagcctaaacagaatgctctcggacagatgcagaatatccagtttcagaaaatcactggcgatgccaggatccccctgccgctagactcatttccagttcctgtaagtactcctgaaggtttgggaactagtagtaacaaccttggcgtacctgccactgaacagagacaagagtcttttgagggttttatcgcccggatgtgcagtcccagccctgatgcgacctcgggcacgggttcacagaggaaggaggaggagctgtccagaaatagtagatcaagctccgagaaaaagaccaaaacaggcgaatacacaaagaaacactcggacaagcagcaccctggaaaggacctacattcttag

SEQ ID NO: 25359 - DNA, 1932 bp, synthetic construct
  source 1..1932: mol_type = other DNA; note = Synthetic coding sequence
atggcctgccagcagagccggtaccacagcttcagcagcgccagcagattacagcctcgcccaagtggcgtcacaatcgatgagtctttcctaaccgaagacaagagcactcagaatcgcaaactgttacaaaaaaggcgtaccttggaactgcccgccgcaccactctcccattgccaggctcccgtgctaggaggtaccggtaagctgccaactcagggcgcaccccctgccggacccggacaccgatttcacccggggactaaggccgccgctcatcaacgtgaaaaaatccgggccctggagcctttaaaggctaagctcgtgacagtgaacgaggactgcaatgaacgaattctggcaatgagagcagaggagaagtacgagatttctttactcaaaaaagagaaaatgaatttactcaagttgatcgacaagaaaaatgaggaaaagatttccctgcaaagcgaggtcactaaactgaggaagaacctggcagaggaatacttgcactacctcagcgaacgcgatgcctgcaagatcctgattgcagatttgaacgagctgagatatcagcgggaggatatgtcactggcacaatcacccggcatctggggtgaagatcctgtaaagctcaccctggcactaaagatgacacgtcaagacttgactagaacccagatggaacttaataacatgaaggccaattttggtgatgttgtaccccgtcgtgattttgagatgcaggagaagacgaacaaagacctgcaggagcagctcgataccctccgggcttcgtacgaggaggtgcgaaaggaacatgaaattttgatgcaactgcatatgtcaaccctaaaagagagagaccagtttttttccgaactgcaggagattcagcggacatcgacaccaagacctgactggacaaagtgcaaggacgtggtagcgggtggaccagaaagatggcagatgctggcagagggcaaaaactccgaccagctcgtagacgtactgttagaggagatcgggtccggactactccgcgagaaagatttcttccccggactgggctatggggaggctatccccgcttttttgcgcttcgatggtctcgtagagaacaaaaagccaagcaaaaaggacgtagtgaacctgttgaaggatgcctggaaagagcgcctggccgaggagcagaaagagactttcccagacttttttttcaacttcctcgaacacaggtttggtcctagcgacgccatggcgtgggcctataccatctttgaaaacataaaaatttttcatagcaacgaggtgatgagccaattttacgccgtgcttatgggcaagcggtctgaaaacgtgtacgtcactcaaaaggaaaccgtcgctcagctgctgaaagagatgacgaatgcagacagccaaaacgaagggctgctgactatggagcaattcaacacagttctcaagtctacgttccccttgaagaccgaagaacagatccaggaactgatggaggctggagggtggcatccgtcgagctccaatgctgacctgttaaattacagaagtttgtttatggaagatgaagaaggtcagtctgagccgttcgttcagaaactctgggagcagtatatggatgaaaaggacgagtatcttcagcagctcaagcaggagctgggaatcgaacttcacgaagaggttactctaccaaaactgagaggggggctgatgacaattgacccctccctggataagcagacagttaatacctatatgtcccaggccttccagttgcccgaaagtgagatgccagaggagggcgatgaaaaggaagaggcggttgtagagatcctccagacagctcttgaacgtctgcaggtgatcgacattcgccgggtcgggccacgggaaccagagcctgcctcttag

SEQ ID NO: 25360 - DNA, 474 bp, synthetic construct
  source 1..474: mol_type = other DNA; note = Synthetic coding sequence
atggccaccagcgcccccctgcggagcctggaggaggaggtgacctgttcaatatgtctcgattacctgcgggatcctgtaacaattgactgcggacacgtgttctgtagatcctgtacgaccgacgtgaggcctatctcaggatctaggcctgtctgccctttgtgcaaaaagccgttcaaaaaagagaacattagaccagtgtggcagttagcaagtctcgtcgagaatatcgagagactgaaggttgacaagggtaggcagcctggggaggtcactagggaacaacaggatgcgaagctttgtgaacgccatcgagagaagctgcactattactgcgaagacgatggcaagctgctgtgtgtgatgtgtagagagagccgagagcataggccacacactgcagtgctcatggagaaggcagctcagccacaccgggagaagattctgaaccatcttagcactctgcgctag

SEQ ID NO: 25361 - DNA, 939 bp, synthetic construct
  source 1..939: mol_type = other DNA; note = Synthetic coding sequence
atggcccagccctacccccccgcccagtaccccccccccccccagaacgggattccagctgagtacgccccacccccccctcaccctacgcaggactattccggtcagactccagtgcctactgaacacggtatgacactctacacacctgcccagacccaccctgagcaaccaggttcagaggcctccacgcagcccattgccggaacccaaaccgtgccgcaaactgacgaagctgcccagaccgactcccaacccctgcacccttcagatcctactgaaaaacagcagcccaagagactccatgtgagtaacatccctttccgatttcgtgatccagatctgcgccagatgttcggtcagttcggcaagatcttggatgtcgagatcatattcaacgaacgaggaagcaaaggattcggctttgtgaccttcgaaacctcctccgacgcagatcgcgcccgggagaagctcaatggcaccattgtggagggacgcaagatagaagttaataatgctacagctagggtaatgaccaataaaaagaccggaaatccctacaccaacggatggaaactgaaccccgtcgtcggagcagtatacggacctgaattttacgccgtcactggattcccataccccacgactggcacggcagtagcttacagaggcgctcacctaagaggacgtggccgggcagtctataataccttcagggccgccccccccccccccccaattccaacctatggagcagttgtataccaggacggtttttatggagccgagatatacggcggatacgcggcctataggtacgcacagccagccgctgcagctgcggcatactccgattcttatgggagggtctacgccgcagccgatccctatcaccacacaatcggacctgccgccacctatagtatcggtactatgtag

SEQ ID NO: 25362 - DNA, 300 bp, synthetic construct
  source 1..300: mol_type = other DNA; note = Synthetic coding sequence
atggccagcctgctgcaggaccagctgaccaccgaccaggacctgctccttatgcaggagggaatgcccatgcgcaaggttagaagcaaaagctggaaaaagctgcgttacttcagactccagaatgatggcatgactgtctggcacgctcggcaggcccgcgggagcgctaaaccaagttttagcattagtgatgttgagacaattaggaacggtcacgactctgagcttttgagatctctcgcagaagaacttcccctggaacagggattcacgatcgtgttccacggccgcaggtag

SEQ ID NO: 25363 - DNA, 1620 bp, synthetic construct
  source 1..1620: mol_type = other DNA; note = Synthetic coding sequence
atggccaccagcgcccccctgcggagcctggaggaggaggtgacctgctcgatctgcctcgattatctccgagaccccgtgaccattgactgcggtcacgttttttgcagatcttgtaccaccgatgtccggcctatttcagggagtcggcctgtctgtccattgtgcaagaagcccttcaagaaagagaacatacgtccggtttggcagctagcgagcctcgtcgaaaacattgagcggctcaaggttgacaagggcagacagccaggagaggtgacccgggagcaacaggacgccaaattgtgcgagcggcacagggaaaagctgcattactattgcgaagacgatggtaaactgctctgcgtgatgtgccgcgagagccgcgaacataggcctcacactgcagtattgatggagaaagcagctcagccacatcgggagaaaatcctcaaccacctctctacgttgcggagggaccgggataaaatccaggggttccaggcaaagggtgaggccgacatcttagccgcgttgaagaaactgcaggaccagaggcaatatattgttgcagagtttgaacagggccaccagtttttacgggaaagagaggagcatttgttagaacagctcgcgaaattggagcaggagctgacagagggccgggagaaattcaaatcccgcggtgtgggggagctagcccgcctggccctggtgataagtgagttagaaggcaaagcccagcaaccagctgccgagctcatgcaggacacgagggacttcctcaataggtaccctcggaagaaattctgggttggtaaaccgatcgcccgggtggttaagaagaaaacaggcgagttctctgataagctcctgtctctgcagaggggcctgcgagagtttcaaggaaagctgctaagagacctcgagtacaagaccgtcagcgtgacattagacccccaaagtgctagtggctatttgcagttgtcagaggattggaaatgcgtgacctatacatcgttatacaaaagcgcatatctacatccccagcagttcgattgcgagcctggagtcctgggaagcaagggttttacttggggaaaggtgtattgggaggtagaagtggaaagagagggctggagtgaagacgaagaagagggcgatgaggaagaagagggggaagaagaggaagaagaagaggaagcaggctatggggatggttacgacgactgggagacagacgaggacgaggaaagcctcggtgatgaggaggaagaagaggaggaggaagaagaggaggttcttgagtcatgcatggtgggcgtagcgagagactcagtgaagagaaagggagatctctctttaagaccagaagacggcgtgtgggcactcaggcttagcagcagtggcatctgggctaacacctcgccagaggctgagttgttccccgccctgcgccctcggcgggttgggatcgccctggattacgaaggaggtaccgtaaccttcacaaatgcagagtcccaagagcttatctacaccttcacggcaacattcactcggaggttggtgccctttttgtggctgaaatggcccgggaccagattactacttagaccttag

SEQ ID NO: 25364 - DNA, 480 bp, synthetic construct
  source 1..480: mol_type = other DNA; note = Synthetic coding sequence
atggccaccagcgcccccctgcggagcctggaggaggaggtgacctgctccatttgtctcgactatctacgcgaccctgtaacaattgactgcggacacgtgttctgccgctcttgtacgacagatgtccgccccattagcggatccagacccgtatgtcccctttgtaaaaaaccattcaaaaaagaaaatattcgacctgtgtggcagctggaaaagatcctgaatcatctctccaccctgagaagggaccgcgacaaaatccaagggttccaagccaagggagaggcagatatcctagccgctctcaagaagctgcaggatcagcgccaatatatcgtggcggagttcgaacagggacaccagtttctgagagaaagagaggagcacctcctggaacagctagccaagcttgagcaggagctgactgaaggtagggaaaagtttaaatccaggggagtgggcgaactggctagatag

SEQ ID NO: 25365 - DNA, 579 bp, synthetic construct
  source 1..579: mol_type = other DNA; note = Synthetic coding sequence
atgggcaagggctgcaaggtggtggtgtgcggcctgctgagcgtgggaaagactgccatactggaacagctgctgtatggaaaccatactattggcatggaggattgcgagacgatggaggatgtctacatggcgtcagtcgaaacggaccggggggtgaaggaacaactgcacctgtacgacacaagaggcctgcaggaaggagtcgaactgcctaagcattacttttcatttgcggacgggtttgtcctggtgtacagcgtcaacaacctcgagagcttccagagagttgagcttctgaagaaggagatagataagtttaaagacaagaaagaagtggcgatagtggtcctgggcaataaaatcgatctgagcgagcaaagacaggtggacgcggaagtcgctcagcaatgggcaaagtccgaaaaggtgcggttatgggaggtgaccgttacagaccgcaaaactcttatcgagccattcactctgctggctagtaagttgagccagccccagtctaagtccagtttccctctccctgggaggaagaacaaaggcaactccaatagcgagaactag

SEQ ID NO: 25366 - DNA, 309 bp, synthetic construct
  source 1..309: mol_type = other DNA; note = Synthetic coding sequence
atgcacaaccggagccagggcttcttcttcagcagctgccacccccagaaccacgttagctatggatgccagtctccgagcttcattttttgcagatgccagagcctgaactttgtttcccgtacttgttaccctctctcctacttctcctatgggaatcaaactattggatctatatctaacagcttcagatctctaaattacgtatctcacagtttccagcctatctcattcatgcatagcagcttccagcccgcttgttcagattttgtcggatggcagagtcccttcctgaggcggacatgttag

SEQ ID NO: 25367 - DNA, 723 bp, synthetic construct
  source 1..723: mol_type = other DNA; note = Synthetic coding sequence
atggacctggtgcggctgggcctggagcggggcgagaccgccaaggaggccttagatgttattgtcagcctgttggaagaacacggccagggcggtaattactttgaggatgccaatagttgccatagcttccagtccgcctacctaattgtggaccgagacgaggcctgggtgctcgagaccattggcaagtattgggcggcagaaaaagtcactgaaagtataactgtccagaccatgatgaataccctccgagataaggctagcggggtttgtattgattccgagttctttctgactaccgccagtggtgttagcgtactgcctcagaaccgctcatccccttgcatccactactttacaggaacacccgatccatcaaggtctatattcaagccctttatcttcgtagacgatgtgaagctggtcccaaaaacccagagcccctgcttcggggatgatgaccctgctaagaaagagcctaggttccaggagaagccagaccggcgacacgagttatacaaagctcatgagtgggcccgggctatcatagagtctgaccaggaacaggggagaaaactgcggagcactatgttggagctcgagaagcagggcttggaagccatggaggaaatcctcacttcttcagagcccctggacccggccgaggtaggtgatttgttctatgactgtgtggataccgaaatcaaattcttcaagtag

SEQ ID NO: 25368 - DNA, 900 bp, synthetic construct
  source 1..900: mol_type = other DNA; note = Synthetic coding sequence
tgacgggaggaggacatctaccagttcgcctactgctacccctacacttacacaaggttccaacattatctggattctttgcagaagaggaatatggactacttttttagagaacagcttgggcagtcggtgcaacagcgcaagctcgaccttctcacaattacatcgcctgataacctgcgggagggcgccgaacagaaggtagttttcatcacaggaagagtacatccgggtgagacgccatctagcttcgtctgtcagggaatcatcgattttttggtctcacagcatcccatcgcctgtgtgctgcgggaatatctggtattcaaaatcgcccccatgcttaatcctgatggggtgtatctcggcaactacaggtgctctctcatgggctttgacctgaataggcattggctcgacccttccccatgggtccaccctacactccatggcgtgaagcagctgatagtgcaaatgtacaatgatcctaaaacaagcctcgagttttacatcgatatacatgctcattccacaatgatgaacgggtttatgtatggtaatatttttgaggacgaggagagattccagcgccaagccatttttccaaagctgttatgtcagaatgcagaggatttctcgtactcaagcacgtcattcaacagggatgccgtcaaagctggaaccggacgcaggttcctaggaggcctccttgatcatacttcctactgttatactctcgaagtcagcttctattcctacatcataagtggcactaccgcagctgtcccatatactgaggaagcatgtatcctctccccccatcctgctttgggacagcctagctccagccgtgaatacccctctctaacagggcaggagctgggcccgcagcttaggtag

SEQ ID NO: 25369 - DNA, 1041 bp, synthetic construct
  source 1..1041: mol_type = other DNA; note = Synthetic coding sequence
atggccgccgccgagcccgccagcagcggccagcaggcccccgccggacagggacagggacagaggccaccaccccaacccccacaggcccaggcgccccagccacccccaccccctcaactcggaggggcgggcgggggatcttcacggcatgagaagtcactaggacttttgacaactaaattcgtgtccctactacaagaagctaaggacggggtgctggacctgaaggccgctgccgatacactcgcagtccggcagaagagacgcatctacgacattaccaatgtgttggaggggatcgacctcatagagaaaaaaagcaaaaactcaatacaatggaagggagtaggggcaggctgcaacacaaaggaggtgattgaccgactgcggtacctcaaggccgagattgaggaccttgagctcaaagaacgtgagctcgatcagcagaagttatggctgcaacagtctatcaaaaacgtcatggatgatagtatcaacaataggttttcatacgtgactcatgaggacatttgcaactgtttcaacggcgacacccttctggcaatccaagctccctctggtactcagctggaagtgccaataccggagatgggccagaacgggcagaagaagtaccaaatcaatctcaagtcccacagcggacctatacatgtccttctgatcaataaggagagctcaagcagtaagcccgtcgtcttccctgttcccccacctgacgatttgacccagcccagctcacagtctctgacaccagtcactccccaaaaaagctccatggcgactcagaatctgcctgaacagcatgtgagtgaaaggtcgcaagcactgcagcagacctccgccacagatatctcatcagccgggtccattagcggagatatcatcgatgagctgatgtcatcggacgtcttccctcttctgagactatcaccgacacccgcagatgactataactttaatctggacgataacgagggggtatgtgatctgtttgatgtccagatcctgaactattag

SEQ ID NO: 25370 - DNA, 396 bp, synthetic construct
  source 1..396: mol_type = other DNA; note = Synthetic coding sequence
atgagcaagcggtacctgcagaaggccaccaagggcaagctgctgatcatcatttttatcgtgacactctgggggaaagtggtcagctctgcaaaccatcataaagctcatcacgtgaagacgggaacatgcgaagtcgtcgctttgcaccgttgctgcaacaaaaacaagatcgaggaacgatcccagaccgtgaagtgttcatgtttcccaggccaagtcgccggcaccacccgtgcagctccttcttgcgtggacgctagtatcgtggaacaaaagtggtggtgccatatgcagccatgcttggagggtgaagaatgtaaagtcctccccgaccgcaaggggtggagctgttcatcggggaataaagttaagacaacaagggtcacgcactag

SEQ ID NO: 25371 - DNA, 306 bp, synthetic construct
  source 1..306: mol_type = other DNA; note = Synthetic coding sequence
atgcccttcttcggcaacaccttcagccccaagaagacccccccccggaagtccgccagtttatccaatctgcacagtcttgacagatctaccagagaggtcgaactcgggctagagtatgggtcacctacaatgaacttggctggacagtccttgaaattcgagaatggtcaatggatcgcagagaccggtgtgtcaggcggtgtcgacaggcgagaggtacaacggctgcgcagacgcaatcagcagttggaggaagagaataatctcctgcggcttaaagtggacatccttctggacatgtag

SEQ ID NO: 25372 - DNA, 393 bp, synthetic construct
  source 1..393: mol_type = other DNA; note = Synthetic coding sequence
atggacatcagcaagggcctgcccggcatgcagggcggcctgcacatctggattagcgagaaccgcaaaatggttcccgttcctgagggcgcctacggcaatttttttgaggaacattgctatgtgatactacacgtcccacagagccctaaggccactcagggtgcgagcagtgacctgcactactgggttgggaaacaagctggcgccgaagctcaaggggcagccgaagcttttcagcagagactccaagacgagcttggcggccagactgtgctccacagggaggctcagggccacgagtccgactgcttttgtagttacttcaggccaggcatcatttaccggaagggcggattagcatccgatttgaagcacgtggagactaattag

SEQ ID NO: 25373 - DNA, 51 bp, synthetic construct
  source 1..51: mol_type = other DNA; note = Synthetic coding sequence
atgtgcaccagcgagaccttccaggccctggacaccttcgaggccaggtag

SEQ ID NO: 25374 - DNA, 5553 bp, synthetic construct
  source 1..5553: mol_type = other DNA; note = Synthetic coding sequence
atggagagcaacttcaaccaggagggcgtgccccggcccagctacgtattttcagcggacccaattgcccggcctagtgagatcaacttcgatggaataaaactggatctgtctcacgagttttccctcgtggcgcccaatacagaagctaattcatttgaaagcaaggattacctgcaagtttgcctgaggatccggccgttcacacagagcgaaaaggaactggaatccgagggttgcgtccacatccttgacagccaaaccgtcgtactcaaggaacctcagtgcatcttaggcaggctgtcagagaaatcctcaggacagatggcacagaaattctcattttctaaagtattcggcccagccacaacccagaaagagtttttccaggggtgtatcatgcaaccagtgaaggacttgttgaaaggtcagtcccgcctaatctttacctacgggctgactaattccggaaagacctatacgtttcagggaaccgaagagaatattgggattctccccaggaccctcaatgtcctgttcgatagcttgcaagaacgactgtacacaaagatgaatctgaagccacaccgtagcagagagtatctgcggctatcctctgagcaagagaaagaggagatagctagcaaatctgccctgctccggcagataaaggaggtcaccgttcataatgattccgacgatacgctctacgggtccctgaccaactcgctgaatatctccgaatttgaagaatccatcaaagattacgagcaggcgaatctgaacatggctaactctattaaattcagcgtgtgggtgtctttttttgagatatataacgaatacatttacgacctgtttgtgccagtgtcttccaagttccaaaagagaaaaatgctgagactgtcccaggacgtcaaaggctacagcttcattaaggacctccagtggattcaagtatccgattccaaggaggcatatcgcctgcttaagctcggcataaaacaccaaagcgttgcattcactaagcttaacaatgctagtagccggtcccattctatcttcacagttaagatcttacaaattgaggattctgagatgtccagggtgatccgcgttagtgagctgagcctctgcgaccttgcaggatccgagagaaccatgaaaacccaaaatgagggggagaggctgcgggaaacaggaaatattaatacgtctctgttaactcttggcaagtgcataaatgtgctaaagaatagtgagaagtctaaattccagcaacacgtgccgttccgcgaaagcaagctgacccactactttcagtcgtttttcaatggtaaggggaagatatgcatgatcgtcaacatctctcagtgctatctcgcttatgatgagaccctaaatgttctaaagttcagtgcaatcgctcaaaaggtctgtgtgcccgacaccctaaactcatcccaggagaaactcttcggtccggtgaaatcctcacaggacgtcagtctggattctaactccaactccaaaatcctgaacgttaaaagggctaccataagctgggaaaatagcctggaggatctgatggaagacgaagatctggtggaggagcttgagaatgctgaggagactcagaatgtggaaacaaagctgctggatgaggatctcgataaaacacttgaggaaaataaggccttcatatcccatgaggagaaacgcaaactgttggaccttatagaggatctgaaaaaaaagctcattaacgagaagaaggagaagcttaccctggaatttaaaatccgggaagaagtaactcaagaattcacccagtattgggctcagcgcgaagccgacttcaaagaaaccttgctgcaggagagggagatactcgaggaaaatgctgaacgaaggttagctatatttaaggacctagttggtaagtgtgatactagagaggaagcagccaaggacatttgcgcaaccaaggtagagacagaagagacacacaactacgtcggatttgaggacattatcgatagcttacaagataacgtggcagatatcaaaaagcaggcggaaatagcacatctgtatatagcctctctgccagatccacaggaggctaccgcctgtttagaactgaaattcaatcagatcaaggcggagttggccaagacgaaaggcgaattgattaagacaaaggaggagttgaagaaacgggagaatgaaagcgattcccttatccaagaactggagacttcaaacaagaaaatcataacgcagaatcagcgaattaaggaactcattaatattatcgaccagaaggaggatactataaatgagtttcagaatctgaagagtcacatggagaatacatttaagtgcaacgacaaggctgacacctcttctctcatcatcaacaataagctgatttgtaacgaaacagtggaagtgccaaaagactctaagtctaaaatttgcagtgaaaggaagcgagttaacgaaaatgaacttcagcaagacgaacctccggctaagaagggcacgacatccgcggcttcaagtaggcggctcaggaagctgatctccaagccggttaacagaaccagacagactgaggggcacagcctggtttcaattcacgtttcaagtgccatcaccgaggaccaaaagaagtccgaggaggtgcgaccaaacattgctgagattgaggatattagagtcctgcaggagaacaatgagggtctccgggcattcctgttaacaatcgaaaatgaactaaaaaacgaaaaggaggagaaagctgagctgaataagcagattgtgcatttccaacaggagttgagcttgtcagaaaaaaaaaatcttacactgagcaaggaggttcagcagattcaatcgaactacgacatcgccatcgccgagctgcatgttcagaaatcgaagaaccaggagcaggaggaaaagatcatgaagttatccaatgaaattgaaacagccactcgctcaatcacaaacaacgtgtcacaaattaaactaatgcatacaaaaatcgacgagctcaggaccctggactctgtgagccaaatcagcaacattgacctgttaaaccttcgggacctgtctaatggtagtgaggaagataacttgccgaacacccaattggacctgctggggaatgactacctggtgagcaagcaggtgaaggagtaccgtatccaggaacctaacagagaaaacagctttcatagctctatcgaagccatatgggaggagtgcaaggagattgtcaaggcaagctcaaagaaaagccaccagatcgaagagcttgaacagcagatcgagaagttacaggccgaggtgaaaggctataaagacgaaaataaccgtctcaaagaaaaagagcacaaaaatcaagatgacctcttaaaggagaaagagacattaattcaacaacttaaagaggaacttcaggagaagaacgtgacattggacgttcagatccagcacgtagttgaggggaagcgcgccctctcagaactcacacagggtgtcacatgttacaaagccaaaattaaagagttggagacaatcctggagactcagaaagtagaatgctcgcatagcgcaaaactagagcaagatattctagagaaggagtccatcatcctgaaactggagcgtaacctgaaagagtttcaggagcacctgcaagatagtgtaaaaaataccaaagacctcaatgtgaaggagctgaaactgaaggaagagatcacgcaactgaccaataatctgcaggatatgaaacacctgcttcagctcaaagaggaggaggaagagacaaacagacaagagaccgagaaactgaaggaagagctcagtgcaagcagcgcccggacccagaatcttaaggctgatttacaaagaaaagaagaggactatgccgacttgaaagagaagcttaccgacgcaaaaaaacagattaagcaggtgcagaaggaggtcagtgtaatgagggatgaagacaaattgctgcgaataaagatcaacgaactcgaaaaaaaaaagaaccagtgtagccaagagctcgacatgaaacaaagaacaattcaacagctgaaggaacagctgaataaccaaaaggtggaagaagctatccaacagtacgagcgagcctgtaaggacttgaacgtgaaagaaaagatcattgaggacatgcggatgaccctggaagagcaggaacaaacacaggtggagcaggaccaggtgcttgaagcaaaattggaagaagtggaacggcttgcgaccgaactcgagaaatggaaggaaaagtgtaacgatttggagactaagaataaccaacgatctaataaagagcatgagaataataccgacgtcctgggaaaactcactaacctccaggacgagctgcaagagtcagagcagaagtacaacgctgaccgaaaaaaatggctcgaggagaaaatgatgctgataacccaggcgaaagaggctgaaaacatccgtaacaaggagatgaaaaagtatgcggaggaccgagagcgattcttcaagcagcagaacgaaatggagattctcacagcacagctgacagagaaggattcagacctacagaagtggcgggaagaacgggaccagctggtggctgccctagagatccagctcaaagctctaatctcctcaaatgtgcagaaggacaacgaaatcgagcagctgaagcgtattatatctgaaactagtaagattgagacacagattatggatattaagcctaaaagaatatcctctgctgatcctgataaacttcagaccgagccgttgagtacgtcatttgaaatatcgagaaacaagattgaggacgggtctgtggtcctggacagttgtgaggtgtccactgaaaatgatcagagcaccagatttccaaagcccgagcttgagattcaatttacaccattgcaacccaacaagatggcggtcaaacaccccgggtgcacaacgcctgtgaccgtcaaaataccaaaagcccgtaagcgaaaatcgaacgaaatggaggaggacttggtcaagtgtgaaaataagaaaaatgccacgccccggaccaatttaaagtttcccatttctgacgatcgaaattcttcagtgaagaaagaacagaaggtggctatacggccatccagcaagaaaacatatagcttgcgctcccaggcttctataattggggtgaatctggccaccaaaaagaaagaaggtacgttgcagaagttcggcgactttctgcagcacagcccctccattctacaatccaaagcaaagaaaattattgaaacaatgtctagctccaaattaagtaatgtggaggctagtaaggaaaatgtgagccaaccaaagagggccaagcggaaactgtacacttccgagatctcctcccccatcgacatcagcggccaggttattctgatggatcaaaaaatgaaggaatcagaccaccagatcataaagaggcgtttaaggacgaagacagccaaatag

SEQ ID NO: 25375 - DNA, 1527 bp, synthetic construct
  source 1..1527: mol_type = other DNA; note = Synthetic coding sequence
atgcggtgccccaagagcgccgtgaccatgcggaacgaggagctgttgctttccaatggcaccgctaataaaatgaatggcgcactggatcatagcgatcagcctgaccccgatgcgattaagatgtttgtgggacagatccccagaagttggtctgaaaaggagctcaaggagttgttcgagccatacggagcagtctatcagattaatgttttgagagataggtcacagaatccacctcagagcaaaggatgctgttttgtcacgttctatactcgaaaagcagccctcgaggcacagaatgccctacacaatataaagactttgcccggcatgcaccacccaatccagatgaagcccgcagactccgaaaaatcaaacgcagtggaggaccgcaaacttttcattggcatggtgtctaagaagtgcaatgagaacgacatacgagtgatgttttcgcccttcggtcaaatcgaggaatgccgcattcttcgaggccctgacggcctctctaggggatgtgcattcgtcactttttccactagggccatggcgcaaaacgcaatcaaagctatgcatcaatctcagaccatggaggggtgctcttctcccattgtagtgaagtttgctgatactcaaaaagataaggagcagcggagactgcagcagcagctcgcccagcagatgcaacaactgaacactgcaacctggggcaatttgactggactgggcgggctcaccccgcaatacctcgcacttctccagcaagcaacaagttcaagtaacctgggtgccttttccggcatacagcaaatggccggcatgaacgctctgcagctccagaatttggctaccttagccgccgccgccgccgcggcccaaactagcgctaccagcacaaatgctaatccgttaagcaccacctcatccgctcttggggctctgacaagccctgtggccgcctcaactcctaattctaccgcgggggccgccatgaatagcctgactagtcttggcactctgcaagggctggctggtgctactgtggggttaaataatattaatgcactcgcaggtatggccgccctcaacggcggcctgggggcaaccggtctcacgaacgggaccgcggggactatggatgctttgacacaggcctatagcggcatccaacagtacgccgccgccgcactgccgactctctatagtcagagcctgcttcagcaacagagcgccgcaggaagtcagaaagagggcccagaaggcgcgaacctgtttatataccaccttccccaagagtttggcgaccaggacattcttcagatgtttatgccattcgggaatgtgatctccgctaaggtcttcattgacaagcagaccaatctttccaaatgcttcggatttgtgagttacgacaacccggtgagcgcacaggctgcaatccaggcaatgaacgggttccagattgggatgaagcggctgaaagtgcagctaaaacgatctaagaacgattccaaaccctattag

SEQ ID NO: 25376 - DNA, 975 bp, synthetic construct
  source 1..975: mol_type = other DNA; note = Synthetic coding sequence
atgttcatcggcggcctgagctggcagaccagccccgacagcctgcgagattacttttccaaatttggcgagattagagaatgcatggtaatgagggatccgaccactaagcgcagcagaggctttggtttcgtcacttttgccgacccagcatctgtggataaagtgctgggccaacctcatcatgaactggacagtaaaaccattgatcctaaagtggcgttccctagaagggcccagccgaagatggttacgagaaccaaaaaaatcttcgtaggagggttgtccgccaacaccgtagttgaagatgtcaagcagtacttcgaacagtttgggaaagtggaagatgcaatgttgatgttcgataaaacaaccaatcgccatcgtggctttggatttgtgacttttgaaaatgaagacgtggtagagaaggtgtgcgagattcatttccatgagataaataataagatggtggaatgtaagaaagctcagcccaaagaagtgatgtttccaccaggtactaggggaagagcacgaggccttccctacactatggatgcgtttatgttaggtatgggaatgttgggctacccaaacttcgtcgccacatacggaagaggataccccggctttgcaccctcttacggctatcagtttcctggcttccccgccgcagcgtacgggcctgtggccgctgccgcggtggctgctgccaggggatcagtgttgaatagttacagcgctcagcctaatttcggcgctccagccagcccggccggcagcaaccctgcccggcccggcggcttccctggagccaatagccctggccctgtggccgatctctacggacccgcatctcaggattccggagtcgggaattatatttccgccgccagcccccagccagggagtgggtttggccatggcatcgccggccctctgatcgcaactgctttcacgaacggctaccactag

SEQ ID NO: 25377 - DNA, 333 bp, synthetic construct
  source 1..333: mol_type = other DNA; note = Synthetic coding sequence
tgacacaagccctgctacggcgccctgttcggcccccggggcgtgaatattgggggggtcgggtcgtacttatacaatccaccgaccccctcacccggatgtaccacgcctctgtccccctcaagcttctcaccaccaaggcccaggactggcctgccccaagggaagaagacggagaaggtgatgagtctgggcagaaattggcaccggccctgcttacggtgtcagcgttgccataagaccctaactgccggatctcatgctgagcatgacggtgtgccatactgccacgtgccctgttatggatatctttttggacctaaagccctttag

SEQ ID NO: 25378 - DNA, 411 bp, synthetic construct
  source 1..411: mol_type = other DNA; note = Synthetic coding sequence
atgaccgaggacagccagcggaacttccggagcgtgtactacgagaaggttggattccgtggcgtggaagagaaaaaatccctcgaaattttgttaaaagacgacagactagacacagagaaactgtgtacattctcgcagaggttccctctgcccagtatgtaccgagcgttggtgtggaaagtccttttaggcatcctgccgccccatcatgagagtcatgctaaggtcatgatgtataggaaggagcagtacctcgatgttttgcatgctctgaaagtggtgagattcgtgtcggatgctaccccacaggctgaggtgtatttaagaatgtaccaactggaatcaggcaagctgccaagatccccctcttttccattagaaccggatgatgaagtgttcctcgcatag

SEQ ID NO: 25379 - DNA, 1686 bp, synthetic construct
  source 1..1686: mol_type = other DNA; note = Synthetic coding sequence
atggccagccagttctgcctgcccgagagcccctgcctgagccccccacccttgagcccactggcactggcacctagctccgccattagagaccaaagaactgccaccaagtgggtggcaatgattccacagaaaaatcagacggcctctggcgactcattagacgtgcgcgtgccttccaaaccctgcctgatgaaacagaaaaagagtccttgcctgtgggaaatacagaaattgcaagaacagagagagaagcgcaggcggctgcagcaggaaattagggcacggagagcactagacgtgaatacccggaatccaaactacgaaattatgcatatgatcgaagagtatcgcagacacctggattctagtaagataagcgttcttgagcccccacaggagcatcgcatctgtgtatgcgtgcggaagcggccattaaaccagcgggaaaccacactgaaagaccatgcatttgatgataaagctagtaatgagctggtgtaccaattcacagcacagcccctggtggagtcgatctttaggaaggggatggcaacttgtttcgcttacgggcagactggatctggtaagacttataccatgggcggagacttcagcggcaccgctcaggactgcagcaaggggatctatgctctcgtggcacaggatgtatttttactgctgaggaatagcacttacgagaagctggatctcaaggtgtatggcacattcttcgagatctacggtggcaaagtttatgacctgctgaactggaagaaaaagcttcaggttttagaggacgggaaccagcagatacaggtcgtgggcctccaggagaaagaagtgtgctgcgtcgaggaagtcttaaatttggtggagattggcaattcctgtcggacttcccgccaaactcctgtaaacgctcattcgtcccgttcccacgctgtcttccagatcattctcaaaagcggcagaatcatgcatggaaagttctcccttgtggatctagctgggaatgagcgaggcgctgatactaccaaggcttcgcgcaagcgtcagctcgaaggtgccgagatcaataagagcctattagcgcttaaggaatgcatcctggccctgggacagaacaagcctcataccccattcagggccagtaagttgactctggtgctgagggactcattcattggacagaactcttctacatgtatgatcgctaccatttcccctggaatgacctcttgtgagaatacattaaatacgctgaggtatgcaaaccgagtcaagaagctgaacgtggacgttcgaccataccaccgcggccactaccccattggtcacgaggcgccaaggatgctgaagtcacacattggaaatagcgaaatgtcgttgcagcgggatgagttcatcaagattccatatgttcagagcgaggaacagaaggaaatcgaggaggttgagacacttccgacgctgctgggcaaagataccacaatcagcggcaaaggtagtagccagtggctcgagaacatccaggaacgggcaggaggggtgcaccatgatatcgacttttgtatagcacgatcgctttccatcttggagcagaaaatcgacgcccttaccgaaatacagaagaaactgaaacttctgctggccgacctccacgtgaagagtaaagtggagtag

SEQ ID NO: 25380 - DNA, 375 bp, synthetic construct
  source 1..375: mol_type = other DNA; note = Synthetic coding sequence
tgaagcgcctgcatcggcaactgcagcaccgccctggaggagctgaccgatgatatgacagaggatttcttgccggtgctcagagaatatattttgtacagcgattctatgaagagtgttcttaaaaaacgagaccaggtgcaggcagaatatgaggcaaagctcgaagctgtggcattgcggaaagaagaccggcctaaggtgccagccgacgtcgagaaatgtcaggacagaatggaatgttttaacgccgacctgaaagctgacatggagcgatggcaaaataataaaaggcaggacttccgacagcttctgatgggtatggcagacaaaaatattcagtactatgagaaatccatcgccgatttgaagtag

SEQ ID NO: 25381 - DNA, 747 bp, synthetic construct
  source 1..747: mol_type = other DNA; note = Synthetic coding sequence
atggccaccagcgcccccctgcggagcctggaggaggaggtgacctgtagcatttgcctggattacctccgtgatcctgtgactattgactgcggacatgtgttctgtagatcttgcacaacggatgtgcggcccatctccggcagtcgccctgtgtgcccattgtgcaagaagccatttaagaaggaaaacattcggccagtttggcagctcgcctcattggtagaaaacatcgagcgcttaaaggtagacaaaggccgtcaacccggcgaagttactagggagcaacaggatgcaaagctgtgtgaaagacaccgagaaaagctgcactattattgtgaagacgacggtaaactgctctgtgttatgtgtagagagagccgcgagcaccgcccccacactgcagtgctcatggaaaaggcagcgcaacctcaccgagagaagatccttaatcacctgtcaactctgcgacgcgaccgcgacaaaatccaaggctttcaggcgaagggagaggcagatatcctcgctgccctgaaaaaactccaggaccagcgacagtacatcgttgccgaattcgaacagggccatcagtttctgcgcgagagagaggaacaccttctggagcaactcgccaaactggagcaggaactgaccgaagggcgagaaaagttcaagtcacggggcgtgggagaactggcgagactggccctggtgattagcgaactggagggcaaagcacaacaatag

SEQ ID NO: 25382 - DNA, 1125 bp, synthetic construct
  source 1..1125: mol_type = other DNA; note = Synthetic coding sequence
atggacttcaacatgaagaagctggccagcgacgccggcatcttcttcacaagagctgtgcagttcacagaggaaaaattcggtcaggccgaaaagaccgagttagatgcccactttgagaacttgctcgcgagagccgactcaacgaagaactggactgagaagattttacggcagacagaagtcctcctgcagcccaacccctctgcacgtgttgaggaatttctctacgagaagttggaccggaaagttccttcacgtgtgacgaatggggaactgctggcccagtatatggccgacgccgcatcagaactaggtcctacaacgccttacgggaagactctcatcaaggtggctgaggctgaaaaacagctcggagccgctgaaagagatttcatccatactgcaagcatcagctttcttacccctctcagaaattttttggagggcgactggaagacaatctccaaagaacgacggctcctgcagaatcgccgcctggatttggatgcatgcaaggcacggttgaagaaggctaaggcagccgaagcgaaagcaacgctatggaatgatgaggttgataaagctgaacaggagctcagagtcgctcagactgaattcgatagacaagccgaggtaactcggctcctgctggaggggatttctagcacccatgtcaatcaccttcggtgtcttcacgaattcgtgaaatcccagacgacatattatgcacagtgctatcggcatatgcttgacctacagaaacaactaggaaggttccccggcacatttgtcggcactactgagcccgcttcaccccctctcagctccacctccccgacgactgcggctgccactatgcctgtggttccatccgtggccagtcttgcgccccctggcgaggccagcctctgcctggaggaggttgctcccccagcctcaggcactaggaaagcacgcgttctatacgattatgaagctgccgacagctccgaattagcgctgctcgccgatgagctgatcacagtgtattcccttcctggaatggatcccgactggttaatcggagagcgcgggaataaaaaaggtaaggtaccagtgacgtatctggagctgctgtcatag

SEQ ID NO: 25383 - DNA, 1188 bp, synthetic construct
  source 1..1188: mol_type = other DNA; note = Synthetic coding sequence
atggccagcgccgccagcgtgaccagcctggccgacgaggtgaactgccctatttgccagggcaccctgcgggagcccgtgacaattgactgtggccacaatttctgcagagcctgcctgaccaggtattgtgagatacctggaccggacttggaggagagtccaacttgtccgctctgcaaagaacccttcagacctggatcttttcgacccaactggcagctggccaacgtggttgagaacattgaaaggctacagctggtttcgactcttggactgggcgaagaggatgtgtgccaagagcacggagaaaagatctacttcttttgcgaggacgatgaaatgcagctgtgcgttgtatgcagggaagccggcgaacatgctacccacactatgcggttcctggaggacgcagctgccccatacagggaacagatccacaagtgcctcaaatgcctcaggaaggagcgtgaggaaatccaagagatccagtcccgggagaataagaggatgcaagtgctgctgacacaagtgtctaccaaaaggcagcaggttatctccgagttcgcccatctgaggaaattcctcgaggagcagcagagtatcctgctggcccagttggaaagccaggatggagatatccttcggcagcgggatgaatttgacctgctggtggcaggagagatctgccggttcagcgcactgatcgaagaactggaggagaaaaatgaaagaccggccagagagcttttaactgatatccggtccacacttatccgttgcgaaacgaggaagtgtcgcaagcccgtggcggtttcccccgaattgggtcaacgtattcgcgattttccccagcaggccctgcctctgcaaagagagatgaagatgtttctcgaaaagttatgcttcgagcttgactacgaaccagctcacatctcattggaccctcagaccagccaccctaagttactcctgagtgaagatcaccaaagggcgcaattctcatataagtggcagaattctcccgataaccctcagcgcttcgaccgtgctacatgcgtcttagctcatacaggcattacaggcggccgccatacgtgggtttggatggctagagtgcccggcgatagcggctgctgtcaattctgctcaccaccctcggtcttgggaaccgaagtcgctgcctag

SEQ ID NO: 25384 - DNA, 1131 bp, synthetic construct
  source 1..1131: mol_type = other DNA; note = Synthetic coding sequence
atggagaagaagaagatggtgacccagggcaaccaggagcccaccaccactccagatgcaatggtccagccctttacaacgatccccttcccaccgccacctcagaacgggattcctacggaatatggtgtgccccatacacaagactacgctggtcaaaccggtgagcacaatctgaccctgtacggcagtactcaggctcacggggagcaaagcagcaactccccaagtacacaaaatggatccttgacgactgaggggggcgcccaaacggacggccaacaaagtcagacccagagctccgagaattcggaatctaaaagcacccccaagagactacatgtttccaacatacctttccgtttcagggatcccgatttgaggcagatgtttggccaattcgggaaaatattagatgtagagatcatcttcaacgagcgcggaagtaaagggttcgggttcgtcacatttgaaaacagtgccgacgcggacagggcgcgagagaagttacacggaaccgtggtcgagggtaggaaaatcgaagttaataacgctacggctcgcgtcatgaccaataagaagatggtaactccctatgctaacggatggaaattgtcgccggtggtcggcgccgtctacgggcccgaactgtacgctgccagttccttccaggctgatgttagcctgggcaacgacgcagcggtgccgctaagcgggagaggcggaattaacacatatattccccttataatccccggattcccctatcctacagccgccacaacagcggctgccttccgcggagcacacttaaggggtagagggaggactgtgtatggagcagtccgcgccgtaccacctactgcgattcccgcctaccctggtgtagtctaccaggacggcttttatggagcagatctctatggcggttatgcggcctaccggtatgcacagcccgccacggctacggccgcaacagcagccgcagctgcggctgccgcctattcagatggctacggcagggtgtacaccgccgatccttaccacgccttggcacctgctgcttcctacggcgtaggggcggttgcctcattgtacagggggggttatagtcgctttgctccctattag

SEQ ID NO: 25385 - DNA, 1638 bp, synthetic construct
  source 1..1638: mol_type = other DNA; note = Synthetic coding sequence
atgggcaccccctggcggccccccagccggcggccctggcggtggcctaccggctgcactagaaagacctgtggtcctccgacgtggtcacttgagcgtactcgatcatggctttctggcagggagcattccgtcttcacgggcgttgccatagtccattgcagttcaaaggaccaccagcttgatactagggttagcgaattttatgaggaaaccaaggtgaagttttccgagctgtccgaagaactgctttgggaatacgtgcactctggggagccaatggataaggcgggcggttatggcatccaggccctgggaggcatgttggtggaatcagtccacggcgatttcctcaatgtggtgggctttcctctcaatcacttctgcaaacaactggttaaactttactaccccccaagaccagaggacctgcgtcgcagcgtgaaacacgacagcattcctgctgcagacaccttcgaggacctgtctgacgtggagggaggaggttcggagcctacacagagggacgctggaagtcgcgacgaaaaagctgaagctggagaggctggtcaggcgacagccgaagccgagtgccaccggaccagggagacactgcctccattcccgaccagactgcttgaacttattgaaggatttatgctgtctaagggcttgctgacggcatgcaaattgaaagtcttcgatcttctgaaagacgaggcaccccagaaggccgccgacatcgcaagtaaagtggatgcttccgcttgcgggatggaacgtttgctggacatttgtgcggccatgggcttgctggaaaaaactgaacagggctattcgaacacagagacagctaatgtgtacctggcctctgacggagaatacagcctgcacggctttattatgcacaacaatgacctgacctggaacctcttcacttacttggagtttgccatcagggagggaacgaatcagcatcatcgagcactcgggaagaaggctgaggaccttttccaggatgcttattaccagtctcccgaaacccgactgagatttatgagggcgatgcacggtatgacgaaactgacagcgtgtcaggttgctaccgctttcaacttgtctagattctcgtcagcgtgcgatgtaggtggatgtacaggggctctggcgagggagctggccagagagtatcccagaatgcaagttaccgtgtttgacctgcccgatattattgagctcgcggcccatttccaacccccaggaccgcaggccgtccagatccatttcgctgcaggagatttttttcgtgaccctctgccgtcagccgaactgtacgttttgtgtaggatactgcacgactggcccgatgataaggtccacaaacttctctcccgagtcgcggagtcctgtaagccaggagccggtttgcttctcgtcgaaacactgttggacgaggagaagagggtggcacagcgggcgttgatgcagtccttgaacatgctcgttcagactgaagggaaagagcgctctctcggcgaataccagtgcctacttgaattacacggttttcaccaggttcaggtagtgcacctcgggggcgtcttagatgcgattttggccaccaaagtggcgccatag

SEQ ID NO: 25386 - DNA, 621 bp, synthetic construct
  source 1..621: mol_type = other DNA; note = Synthetic coding sequence
atgagccagaccagcctgaagcagaagaagaacgagcccggcatgcggtcctccaaagagtctctagaggccgaaaaaagaaaggagtcggacaagacgggagtccgattatctaatcagatgaggcgcgcagtaaatccgaaccatagtctaagatgctgtccatttcagggacattcctcttgcaggcggtgcttgtgtgctgccgagggcactgcattggggccatgccataccattcgcatctatattcacatgtgtctactgtgggagcagggacagcagatcactatgatgcgggttagccgcgatcacaccactgatagtggcggcgaaccacaaactacttggggaagccaagaatcaagccttaggaagactgactccaggggatatctcgttaggtctcagtggtccagaatctcacgaagtccatctaccaaggctcctagcattgatgagccgcgaagcagaaacacttcagctaaattgcccagcagttctactagttcgcggactccctcaacctctccaagccttcacgatagcagcccacctcccctgagcggccagcctagcttgcagccgccggcttcccctcagctacccaggagcctgtag

SEQ ID NO: 25387 - DNA, 414 bp, synthetic construct
  source 1..414: mol_type = other DNA; note = Synthetic coding sequence
atggcccccggcacccccaagagcctgctgctgagcgccagcatcaaaagggaaggcgagtcaccgactgcctcaccacactcttcggcaacagacgacctgcatcattccgacaggtaccagaccttcctgagggtgagggccaacaggcaaacgaggttaaacgcccggatcgggaagatgaaacggcggaagcaagacgaggggcaggtgtgcccactctgcaataggcccctggccggatccgagcaagaaatgtctaggcacgtggaacattgtcttagcaaaagagagggctcttgcatggctgaagacgacgctgtagacattgagcacgagaataacaacaggtttgaggaatatgagtggtgtggccagaagcggatccgggcgaccactctcctggagggctag

SEQ ID NO: 25388 - DNA, 570 bp, synthetic construct
  source 1..570: mol_type = other DNA; note = Synthetic coding sequence
atgatccccatctgccccgtggtgagcttcacctacgtgcccagcaggctgggcgaagatgcaaaaatggccactggaaattatttcgggtttacacacagcggagctgccgcagctgctgcagccgctcaatactcacagcaacccgcttctggggttgcgtattcccaccccaccacagtggcatcctataccgtccaccaggctcccgttgccgcacatacagtgactgcggcttacgcacccgccgctgccacggtcgctgtcgctcgacccgcacccgttgccgtagccgctgcagctaccgctgctgcatacgggggctaccccacagcacacaccgcaactgactatggatacacacagagacaacaggaggcacctcccccgcctccaccggctacaacccaaaattaccaggactcttactcttacgtacggtctaccgctcctgcagttgcctacgacagcaagcaatactatcagcaacccgccgccaccgaagctggttccagtagctcctgttgttgttgctgcaatagctgcttagatagggaccatctttattag

SEQ ID NO: 25389 - DNA, 387 bp, synthetic construct
  source 1..387: mol_type = other DNA; note = Synthetic coding sequence
atggacgccgacagcgacgtggccctggacatcctgatcaccaacgttgtgtgtgtattcaggacacggtgccacctcaacctgcggaagattgctctggaaggggctaacgttatctacaaaagggacgtcggcaaagttttgatgaaattgcggaaacctaggatcaccgctacaatttggtctagtggcaagattatctgcaccggcgcgacaagtgaagaggaggcgaagttcggcgcacgccgtctagcccgcagcctgcagaaactaggattccaagtgatcttcaccgattttaaagtggtgaacgtgttggctgtgtgtaatatgcctttcgaaattagattgcctgagttcaccaagaacaatcggcctcatgcttag

SEQ ID NO: 25390 - DNA, 381 bp, synthetic construct
  source 1..381: mol_type = other DNA; note = Synthetic coding sequence
atgtggaccgcccggggccccttccggcgggaccggtggagcagcgaagatgaagaagctgctggaccaagccaggccctctcccccctgttgtctgataccaggaaaatcgtttctgaaggagaattggatcagctcgcccaaattcggccacttattttcaacttccatgagcagaccgctattaaagattgcctgaagattcttgaggagaagaccgcagcatatgacattatgcaggaattcatggcactcgagttgaaaaatctgcccggcgaattcaactcgggaaatcagccctccaatagagagaaaaacagataccgcgacatacttcctttccaacatcatgggtacagtggaccgaacgaaaggacctag

SEQ ID NO: 25391 - DNA, 912 bp, synthetic construct
  source 1..912: mol_type = other DNA; note = Synthetic coding sequence
gaggacgagtacatccagagccacaacttcgacagcgccatgaaggtcacctcacaagggcagccatccccggtcgagccacgaggccccttctacttctgtagattgctcttggacgatctgggcatgaattcttgggaccggcgaaaaaattttcatttgctgaagaaaaacagtaagctgctgagggaacttaaaaatctcgattctcgccagtgtcgcgaaactcataaaatagcagtcttctatattgccgaaggccaggaggacaagtgctccatattgagcaacgaacggggctctcaggcctatgaggactttgttgccggtttgggctgggaggtggacctttctacacattgcgggtttatgggggggcttcagcgaaacggatccaccgggcagacagccccctactatgcaacttctaccgtcgaagtgatttttcacgtgtccacccggatgccctctgactccgacgattcactaactaaaaaacttagacacttaggtaatgacgaggtgcatatagtctggtctgaacattctagggattatcgacgcgggatcatccccaccgcctttggagatgtgagcattatcatctatcccatgaaaaaccatatgtttttcatagcaataactaagaagccggaagtgcctttctttggccctctttttgatggcgcgatagtgagcgggaagcttctcccaagtctggtctgcgctacctgtataaacgcaagtagggctgtcaaatgtctgatccctctgtatcagtccttctatgaagagagggctctttacctggaggctatcatccagaatcatcgcgaagtaatgaccttcgaagacttcgctgctcaagtcttcagtccctccccctcctacagcttatccggaaccgattag

SEQ ID NO: 25392 - DNA, 2883 bp, synthetic construct
  source 1..2883: mol_type = other DNA; note = Synthetic coding sequence
atggaggtgcaggtgagccaggccagcctgggcttcgagctgacctctgtagagaaaagtctccgtgagtggagtcgtctgtcccgggaagtgattgcgtggttatgcccttcctctcctaacttcatcctgaactttccccccccaccatcggcgagcagcgtgagtatggtccagcttttttcctccccatttgggtaccagtcaccatcgggccactccgaggaagagagagagggcaatatgaagtcagctaagccacaggtgaatcattctcagcatggcgagtctcagagggcactttcgccacttcagtccactctctcctctgccgcctctcccagtcaggcttacgagacttatatcgagaatgggcttatctgtttgaagcataagatccggaatatagagaagaaaaaacttaaacttgaggactacaaagatcgcctgaagtccggggagcatctgaatccagatcagctggaagccgttgaaaagtatgaagaggtcttgcataacctggagtttgccaaggaattgcaaaagacatttagcggcctttccctcgatctgctaaaagcccagaaaaaggcccaaagacgggagcacatgctcaagctggaggctgagaagaaaaaactgcggacaatattacaagtgcagtacgtgctgcagaacctcacccaggaacatgtacagaaggatttcaaggggggcctgaatggagcggtgtacttgccatcgaaggaactggattatctcattaagttttccaagctcacctgtccagagagaaacgaatcactgtcagtggaagaccagatggaacagagcagtctatatttttgggatctgcttgaaggatccgagaaggccgtggtgggcaccacttacaagcatttgaaagatttgctgtctaaactgttaaattcaggatactttgagagtattcccgttcctaagaatgcaaaagagaaagaagtgccgctggaagaggagatgctgattcaatcagagaagaaaactcagctgtcaaagactgagagtgtcaaagaatcagaatcccttatggaattcgcgcagcccgagatacagcctcaggagttcctcaaccgacgctatatgaccgaagtggattactctaataaacagggagaggagcagccatgggaggccgactacgcccgcaagcctaacttgcctaagcggtgggacatgctcacggagccagacgggcaggagaaaaagcaagaatctttcaagtcctgggaagctagcgggaagcaccaggaggtctctaagccagctgtgtcactcgagcaacgaaagcaagacacatccaaattacgctctacattgcctgaggaacagaagaaacaagagatctcgaagagtaaacccagtccttcacagtggaagcaggatactccgaaaagcaaggccggctacgtccaagaagaacaaaagaagcaggagacaccaaagttgtggccagttcaactccagaaggagcaggatcccaaaaaacaaactcccaagagctggacacctagcatgcagtcggaacaaaacactaccaaatcttggaccaccccaatgtgcgaggagcaagacagcaagcaacctgagacacccaagtcctgggaaaataacgtggagagccagaagcactctttgaccagccagtcccagatttctcctaaaagttggggggttgcgaccgcatcattgatcccgaacgatcagttgttacctcggaaactgaatacagaacctaaggatgtgcccaagcccgtgcaccagcctgtcggatcaagttcgactctgcctaaagacccagtgttgcgtaaagagaagctgcaggatctgatgacacagatccaggggacctgcaactttatgcaggaatccgttctcgacttcgacaagccatcctcagcgatccctacatcacagcctccctccgcgacacccgggtcccccgtggcctctaaggagcagaacctgtccagtcagagcgactttctgcaggagccattgcaggctacaagcagtccggtgacgtgcagctctaacgcatgcttagtcaccacagaccaggccagctcggggagtgagactgagttcatgacttccgagactcctgaagcggccattccccctggaaagcaaccatcctcactggcctctcccaacccccctatggctaagggatccgagcagggctttcagtctcctcctgcaagctcatctagtgtcacaatcaacacagctcccttccaggccatgcaaacggttttcaacgtgaacgccccactgccccccaggaaggaacaggagatcaaagaatccccttatagtcctggctacaaccagtcgtttacaaccgcctccactcagaccccaccccagtgtcagctgccttccattcacgttgaacagacagtgcactctcaggagaccgcaaactaccatcctgacggtaccatccaggtgagcaacggaagtctcgcgttttaccctgcccagactaatgtcttccctagacctacacagccttttgttaactcgaggggctctgtccgtggatgtaccaggggcgggcgattaattaccaatagctatcgaagccctggtggctacaaaggattcgatacttatcgcggactgccttcaatcagcaacggcaactactcccagctccagtttcaggccagggagtatagcggggccccctattctcaacgcgataacttccagcagtgctacaaacgcggcggcacttcgggcggcccaagggcgaactcccgcgccaattgctttatcatgcgcaacagcctcctgcttattaagcaacagggcggcgtgattctgctccgctag

SEQ ID NO: 25393 - DNA, 1746 bp, synthetic construct
  source 1..1746: mol_type = other DNA; note = Synthetic coding sequence
aacaacaacggcacctacgacggcatcgcctacttcgagtgcaaggaaaagcacggcatttttgcccctcctcaaaagatttctcacattcctgaaaattttgacgactatgtagacatcaatgaggacgaggattgctattctgatgagcgctaccagtgttataaccaggaacagaacgacaccgagggcccgaaggaccgagagaaagatgttagtgagtatttctatgagaaatctttacccagcgtgaacgacatcgaagcctctgtgaaccggtcgaggagcctcaagatcgagactgacaatgttcaagatataagcggcgttctggaagcgcacgtgcatcagcagagctcggtagactctcaaatctcttcaaaggaaaacaaagacctcatcagcgacgctactgaaaaagttagcatcgccgccgaagacgacactctagataacactttctctgaagaactggaaaagcaacagcagttcaccgaggaggaggataacctctatgccgaagcatcagagaagctttgcaccccattgttggatctacttacaagggagaagaaccagctcgaagctcaactaaagagtagtctgaacgaggagaagaagtctaagcagcaactggaaaaaatatctctgctcacagatagcctgctgaaggtcttcgtcaaggacacggtcaaccagctgcagcagataaagaagacgcgtgatgagaagatccaactgtccaaccaggagctgctgggtgacgaccagaaaaaagtgacaccgcaggatctctcacagaacgttgaggagcagtcgccaagcatctcaggctgtttcctcagttctgagctggaagacgaaaaagaggagatttcatcaccagacatgtgccctcgccctgagtcacccgtgttcggcgcaagcggccaggaggagctcgcgaagcgcctggctgaactggagcttagcagagagtttctgtcggccctcggcgacgaccaggattggttcgacgaggacttcggcctgtctagctcccataagatccagaagaacaaggccgaggaaaccattgtcccactgatggccgaaccaaaaagagtgactcagcagccctgtgaaactcttcttgctgtgccacatacggccgaggaggtggagatcttagtgcacaatgccgccgaagagctttggaagtggaaggagctcggtcatgacctgcattctatttcaattcccacaaagcttctgggctgcgcatcaaaaggactggatattgaatctactagtaagcgcgtgtacaaacaagcggtgtttgacctcactaaggaaattttcgaggagatattcgccgaagaccccaatcttaaccaacccgtgtggatgaagccatgcagaataaacagttcttattttcgacgcgtaaagaaccccaataatctcgatgaaatcaaatctttcatagcatcagaagtccttaagctcttcagcctgaaaaaagaacccaaccacaagaccgattggcagaagatgatgaaattcggccggaaaaagcgggatcgggtagatcatatcctggtacaggaactccatgaggaggaagcccagtgggttaattacgacgaggatgagttatgcgtaaaaatgcagctagcagacggcatttttgaaaccttaattaaagacaccatcgacgtgctgaatcagataagcgagaagcagggtcggatgctactggtttag

SEQ ID NO: 25394 - DNA, 345 bp, synthetic construct
  source 1..345: mol_type = other DNA; note = Synthetic coding sequence
atgtggagcctgaccgccagcgagggcgagagcaccaccgcccacttttttctgggcgctggcgacgaagggctgggtacccgtgggattggcatgagaccggaggaaagcgacagcgagctgctggaagacgaggaagacgaggtacccccagaaccccaaataattgtcggtatttgcgcaatgaccaagaagtccaaatcgaaaccaatgacacaaattctggagcgcctttgcaggttcgattatttgactgtggtcatactgggcgaggacgtaatactcaacgagccagtggagaattggcccagctgtcactgcttgatctcttttcattccaaatag

SEQ ID NO: 25395 - DNA, 918 bp, synthetic construct
  source 1..918: mol_type = other DNA; note = Synthetic coding sequence
atggaggccgagagcttcccctgcctgctgcggcccttcttcaaggagaggagctgtgcacttcgcccggctttccataccgctaagtgcgagaaactgcagaaggaaaaagaagagttggaacggaggtttgaagccgagatggccaggttacaagaggaacatggagaccagctccttagtattcggtgccaacaccaggagcaggttgaagacctgacagcctcacatgacgcagcactcctggagatggagaataaccacacagtggcgattaccatccttcaggacgaccacgaccataaggtccaggaactgatgagtacgcatgagttggagaagaaggagctggaggaaaattttgaaaaactccggttgtctttgcaggaccaggtggacaccttaacgtttcaatcccagagtttaagagatcgggctcgccgtttcgaggaagccctgcggaagaataccgaggagcagctggaaattgcactggctccataccagcacctggaggaggacatgaagagcctgaaacaggttcttgaaatgaagaaccaacagattcacgaacaggaaaaaaaaatcctggaacttgagaagcttgcggaaaagaacattatcttggaagaaaagatccaggtgcttcaacagcagaatgaagatcttaaggcaaggatcgaccaaaacaccgtggtgacccgccagctgagtgaggagaatgccaacctgcaggagtatgttgaaaaggaaacccaggagaaaaaacgcctgagtcggaccaacgaggaactgttatggaaactgcagacaggagatcccaccagtccaataaagctgtcgcccactagccccgtgtacagggggtctagcagcggccccagtagccccgctagagtgagcaccactcccagatag

SEQ ID NO: 25396 - DNA, 2319 bp, synthetic construct
  source 1..2319: mol_type = other DNA; note = Synthetic coding sequence
atgcaggagctggaggagctgcggaagcagctgggcagcgtggccacaggatctactttgcagcaatcactggagcttaaacgtaagatgttgcgggataagcagaacaagaagaatagcggccaacaccttcccatctttccagcatgggtgtacgagcggccagctcttattggtgactttcttatcggcgcgggtatttccaccgacactgcactcccaattggaacactccccctggctagccaagaatccgcggtggtggaggacctgttgtacgtcttggtgggtgtcgacggacgctatgtgagtgctcagccactcgccggtagacaatctaggacctttctggtggatcctaacttagacctatccatacgagagcttgtgcaccgtattcttcccgtagccgcgagctatagcgcagtgacccgcttcatcgaagaaaagagttcttttgaatatggacaagtgaatcacgccctagccgctgctatgaggacgctggtcaaggagcaccttatactcgtgagccagttggagcagcttcatagacaaggattgctgtcactgcagaagttgtggttttatattcagcccgcgatgcgcactatggatatcctggccagcctggcaacaagcgtcgacaaaggcgagtgtctggggggaagcacactatccctactccacgacaggtcttttagttacaccggagatagccaggctcaggagctttgtttatacttaacaaaagctgcctccgccccatattttgaagtgcttgagaagtggatttacagaggaattatccacgatccatactctgaatttatggtggaggaacacgaactacgtaaggaaaggatccaggaggactacaacgacaagtactgggatcaacgctatactatcgtccaacagcagattccaagttttctccagaagatggctgacaaaatcctgtctacaggtaagtacctcaacgttgtgagggagtgcggtcacgacgtcacctgtcccgtggccaaagagattatctacacactgaaggagagggcctacgtcgagcagattgaaaaagcgtttaattatgcttctaaggtcctgttggactttctgatggaagagaaggaattagtagctcatctaaggtccatcaaacgctatttcctgatggaccagggcgatttttttgttcatttcatggacctggcagaggaggagctgaggaaacctgtggaagatattacgccccctaggctagaagctctcttagagctcgccctcaggatgagcactgccaatactgatccgtttaaagacgatctgaaaatcgatctcatgccacacgacctgattactcagttgctcagagtactggctatagagaccaaacaggaaaaggcaatggcgcacgcagacccaaccgagctcgctctgtccggcttggaggccttcagttttgactacattgtgaaatggccactgtccctcattataaatcgcaaggccctgacccgctatcagatgctgttcagacacatgttttactgtaagcacgttgaaaggcagctgtgctcagtctggatctccaataagacagctaagcagcacagtctgcattccgcccagtggtttgctggcgcttttacgctgagacaaaggatgctgaactttgtgcagaacattcagtattatatgatgtttgaggtcatggaacccacctggcacatcttggagaagaatctaaagtcagcctctaatatcgatgacgtcctgggacatcatacaggcttcctcgacacctgcctgaaagactgtatgctcacgaatccagagttgctgaaggtcttttctaagctgatgagcgtgtgcgtgatgttcaccaattgtatgcaaaaattcactcagtcaatgaaactcgacggtgagcttggcggacaaactcttgaacattccactgtcctggggctgcctgccggcgctgaggagcgggcacggaaagaactggcaagaaaacatctggccgagcacgcggacacggtgcagttggtgagtggtttcgaggccaccatcaataagtttgacaaaaacttttctgctcacctgttggatctgctggccaggctttcaatctacagcacaagcgactgcgaacatggaatggcctccgtgatctctcggctggatttcaacgggttttacacagagcggctggagcgtttgagcgccgagcggagccagaaggctacgcctcaagtgcccgtactccgggggcctcctgctcctgcacctcgcgttgctgtcaccgctcagtag

SEQ ID NO: 25397 - DNA, 1203 bp, synthetic construct
  source 1..1203: mol_type = other DNA; note = Synthetic coding sequence
atggacttcaacatgaagaagctggccagcgacgccggcatcttcttcacacgcgccgtgcagtttaccgaggaaaagttcggacaggctgaaaaaaccgagttggacgcccacttcgagaatttgctcgcccgcgcggatagcacgaagaactggacagagaaaattctccgccagactgaggtgctcctacagcccaacccaagtgcccgcgtggaagaatttttgtacgaaaagctggatagaaaggtgccctcacgcgtcactaacggcgagctgctggcacaatatatggctgatgcagcatctgagctcggacccaccacgccctacggcaagacactgattaaggttgccgaggctgagaaacagttgggcgctgcagagcgagacttcatccacaccgcaagcatttcctttctgactccactgagaaattttctggaaggagactggaagaccatcagcaaggagagacgtctgcttcagaaccgcagacttgatctcgacgcatgtaaggcccgcctgaagaaagcaaaggcagctgaggcgaaagcgaccaccgtccccgattttcaggaaacccgcccaaggaattatatcttgtccgcctcagcctcagccctctggaatgacgaagtagacaaagctgagcaggaacttagggtggcccagactgagttcgatcggcaggctgaggtgactcgactgctcctggaaggaatcagctccacccacgtcaaccacctccgatgtctccatgagttcgtgaagagtcagacaacgtactatgctcagtgttaccgccatatgcttgatctgcagaaacagctagggtccagccagggagcaatctttcctgggacttttgtgggaaccactgaacccgcgagtcctccattatcaagcactagccccacaaccgctgcggccaccatgccagtcgtgccgagcgtcgccagtctggctcccccaggggaagcctccctgtgcctggaagaggttgcccctcctgcttcaggtactcggaaggctagggtgctatacgattacgaagccgccgattcgagcgaactcgcactcctggctgacgaacttatcaccgtgtattctctccccggaatggatcctgattggcttattggtgagcgaggtaacaaaaagggtaaggtgcccgtgacatatcttgagctgctaagctag

SEQ ID NO: 25398 - DNA, 1827 bp, synthetic construct
  source 1..1827: mol_type = other DNA; note = Synthetic coding sequence
atgcccttctggcccatccggtgcctgaagcggagccggcggatgccgaggggtggggccggggagagagaaaaggttccagccaatcccgaggcactactgctcatggcatcttctcagcgcgacatggaggactgggtgcaggccattcggagagtgatctgggcaccacttggtggagggattttcgggcagcgactggaggagacagttcaccacgagcgtaaatatggaccacgattagcccctctgctggtggaacagtgcgtggactttattcgcgagcggggactgaccgaggaaggcctgttccgcatgccgggacaggcgaatctggttcgcgacctgcaggactcatttgattgtggggaaaagccccttttcgacagcacgactgacgtacataccgtggcttcactgcttaagttgtacctgagggagcttcctgagcccgttgtgccctttgcacgctacgaggattttctctcatgtgcccaactcctgacaaaagacgaaggcgaagggaccttagagctggctaagcaggtgagcaatttgcctcaagccaattacaacctgctcagatatatttgcaaatttctggacgaggtacaggcctattccaacgtgaacaagatgagtgtgcagaatctggcgacagtgtttgggcctaatatcttgaggccacaagtggaggatccagtgactattatggaaggcacttctctcgtccagcacctgatgacagttttgattagaaaacactctcaattgtttacggccccagtgccggaaggacctacatctcccaggggcggacttcagtgtgctgtgggctggggatccgaagaagtcacacgggattcccagggggaacccggcggtccaggactaccagcccataggacgtccagtctcgacggcgcagccgtagccgtgctgtccaggactgccccaaccggacctggatcacggtgtagcccgggcaagaaggtgcaaaccctccccagttggaaatcgtcctttagacagcctcgctctctgtctggttcgccaaaaggcggaggttcttctctggaggtgccgattataagctccggcggcaattggcttatgaatggactgtcgagtctcagaggccatagacgggcaagctctggagacagactcaaagactcaggaagcgtgcaaaggctttctacttacgacaatgtgcccgccccgggcctcgtgcctgggattccaagcgtggcttccatggcatggtccggggcgtcatcaagcgagtcaagtgtgggggggagcttgtccagctgcaccgcttgccgcgcaagtgactcaagtgcgcggtccagtctgcatacagactgggctcttgagcccagcccactgccttcaagcagtgaagatccgaaaagcctggacttggatcattccatggacgaagccggggccggagcctctaacagcgaaccctcagagccggatagtcccacacgcgaacacgccagaagatccgaagcactgcagggtctagttactgaactgcgcgccgagttgtgcagacagagaactgagtatgaacggagtgtgaagaggattgaggagggctccgcagatctgcggaagagaatgagccgtctcgaagaggagctcgatcaggaaaaaaagaaatacattatgctggagatcaagctgaggaattcagaacgcgcccgggaagacgccgagcgtcgcaaccagctgctgcagcgggagatggaggaattcttcagcacactgggctccctgacagttggggccaagggcgcaagagcccctaaatag

SEQ ID NO: 25399 - DNA, 708 bp, synthetic construct
  source 1..708: mol_type = other DNA; note = Synthetic coding sequence
atgttcagcgaggagtgcatcatggacgtgatcggctgcctggagtatgaccccgcactgtctcaacctcggaaacatcgagaatttctgaccaaaactgccaagtttaaagaagtaatacccatctctgatcccgagctcaagcaaaagattcaccagacatatagggtccagtacattcaggatatggttctcccaacgccctctgtgttcgaggagaacatgctgtccaccctccatagcttcatcttttttaataaagtagagatcgtcgggatgcttcaagaggatgagaagtttttgactgatctttttgcccagttgaccgatgaagccacggatgaggagaagaggcaggagctcgtgaactttctcaaagagttctgtgctttttcccaaacactgcaaccgcagaatcgggatgccttcttcaaaaccctttcaaacatgggaatcttgcccgcccttgaagtgattcttgggatggatgatactcaggtcagatctgcagctacagacatcttctcttacttggtcgagtataatccttctatggtgcgcgaattcgtgatgcaagaggctcagcagaacgatgacgtgagtaaaaaacttactgagcaaaaaatcacgtccaaggttaatatcatctgtacgaattcaaagtacctgtacatcggatcatacaactgcttctactatagcttctag

SEQ ID NO: 25400 - DNA, 3513 bp, synthetic construct
  source 1..3513: mol_type = other DNA; note = Synthetic coding sequence
gtgtacaagggccggcacgtgaagaccggccagctggccgccatcaaggtaatggacgtaacagaagacgaggaggaggagataaaactcgagatcaacatgctgaagaaatactcacaccatcggaacatcgctacttactatggcgccttcataaagaagagccctcctgggcacgacgatcagctttggctcgtaatggagttttgtggtgccggcagcattactgacctcgtgaaaaacacgaagggaaacaccctgaaggaagactggatcgcctacatctctagggaaatcctgcggggcctggcccacttacatatccaccatgtgatccatagagatattaaaggacagaatgtccttctgacagagaatgctgaagtcaaactggtcgactttggtgtgagcgctcaactggacagaacggtcggtcgaaggaatacttttatcggaactccctattggatggcccctgaggtgatcgcctgtgacgaaaatcctgatgccacctacgattatcggtctgacctttggtcatgcggaatcaccgccatagagatggcggaaggagctccgcccctgtgtgacatgcaccctatgagagcattattcttaataccacgcaaccccccacctcgcctgaagtcaaaaaaatggtccaagaaattcttttcgtttatagaagggtgcctggtgaagaattatatgcagagacccagcactgagcaactgctgaagcatccctttatcagggaccagcctaatgaaagacaagtccggatacagctgaaggaccacatcgatcggacgaggaagaagaggggggagaaggatgagactgagtacgaatacagtggaagtgaggaggaagaggaggaagtccccgagcaagaaggggagccctcctccatcgtgaatgtgcctggtgagagcaccctccgacgcgatttcttgcgactccagcaggagaataaggaaaggtcggaagccctcaggcggcagcaactgctccaagaacagcagctgcgggagcaggaagagtataaacgccagctccttgctgagaggcagaaaaggattgagcaacaaaaagaacaaaggcgcagattagaagagcagcaacggagagaacgagaggccagaagacagcaggaacgggagcaaaggcgtcgcgaacaggaagaaaaacggagacttgaagagctcgaacggaggcggaaggaagaagaggagcggagacgcgctgaggaagagaagcggagggtggaaagagagcaagagtatataagacgtcaacttgaggaggagcagcgtcaccttgaggtgctccagcaacagctccttcaggagcaggcaatgctgctgcatgaccaccggcggcctcacccccagcacagccagcagcctcccccgccccagcaagagaggtctaagccttcctttcacgctccagaaccgaaggctcactatgagcccgccgaccgcgcccgcgaagtcgaagacaggttccgaaaaacgaaccacagttctcccgaagcccaatccaaacagaccgggagggtgctcgaaccaccagtgccttcgcgcagcgaatccttctcgaatggtaactcggagagtgtgcatccagccctgcagaggcctgctgagccgcaggtgcccgtccgaaccacttccaggtctcctgtactcagtcgccgcgattcccccctgcagggctcgggccagcagaattcacaggccggacagcggaattccacaagcattgagcctaggctcctttgggaacgtgtagaaaagctcgtccctagaccaggtagtggcagctcgtctggctcttctaacagcggctcccagcccggcagccaccctggaagccaaagcggctccggcgaacgctttagggtgcgaagcagcagcaaatctgaggggtcaccatcccagagactggagaatgccgtcaaaaagcctgaagacaaaaaggaagtgtttcgaccacttaagcctgcggacctcactgcattagccaaggagctccgtgcagtcgaggatgtccgaccaccacacaaggtcactgattatagctcctctagtgaagaatctggaaccaccgatgaggaagacgatgatgtggagcaagagggcgcagatgaatctacatcaggtccagaggacacccgagcggctagttcactgaatttaagcaacggcgagactgaatctgtcaaaaccatgatcgtgcatgacgacgtggaaagtgaacctgcaatgactcccagtaaagagggcacgttgattgttaggcaaacccagtccgcatcgagcaccctccagaaacataaatcgtccagcagcttcacgccatttatcgaccctaggctcctacagatcagcccatcttcagggaccactgtgacatctgtcgtggggttcagttgcgatggtatgaggcccgaagccatcagacaagaccccactagaaagggatccgttgtgaatgtgaacccgaccaacacaagaccacaatctgatactccggaaattcgcaagtacaagaagcggtttaattctgaaatcctgtgtgctgccctctggggggtgaacctgctcgtaggaaccgagtctggcctgatgctgctggatcggagcggccaggggaaggtgtatcccctcataaaccgacggcgttttcaacagatggacgttctcgaaggcctgaatgtgctcgtcactatatcaggcaagaaggataagcttcgcgtttattacctgtcttggctgagaaacaagattctccacaacgacccagaagtggagaagaagcaggggtggacaacagttggggatctggagggttgcgtgcattacaaagtggtcaaatatgaacgaatcaaattcctggtcatcgccctcaagagcagtgtagaagtgtatgcctgggcaccaaagccttatcacaagttcatggccttcaagagtttcggcgaactggtgcacaaacctctcctggtagacttaacggtggaggaagggcagcggttaaaagtaatctacggatcttgtgcaggatttcacgccgtggatgtggattcaggcagcgtatacgatatttacctgcctacccatattcagtgtagcatcaagccccatgctatcatcatcctgcctaacaccgatggcatggagctcctggtttgttacgaggacgagggcgtgtatgtgaatacatatggtagaatcacgaaggatgtcgtcctacagtggggcgagatgccaacaagtgttgcatatattcggtccaaccagaccatgggctggggggaaaaagcgatcgagatcaggagtgtggaaacaggccatttagacggcgtgttcatgcacaagcgggcccaacgactaaaattcctgtgtgagagaaatgacaaggttttctttgcttcggtcaggagcggaggtagctctcaggtgtacttcatgacattgggtcggacttccctcctctcttggtag

SEQ ID NO: 25401 - DNA, 1476 bp, synthetic construct
  source 1..1476: mol_type = other DNA; note = Synthetic coding sequence
gtgatcatccaccgggtgctggagaagcaggaggtggaggtgttctacccagattttgggaacataggcatcgtccaaaaatcatcgctcagatttcttaagtgctgctacactaaactgcccgcgcaggccattccctgctccctcgcctgggtccgtccagttgaagaacactggacctcaaaagcgatcttgcagttccagaagttatgcgggttgaaaccactagtgggcgttgtggatgagtacgtggacggaatcctcaacatttttctctgcgacacctcttccaacgaagacgtgtactttcaccatgtccttcggactgaagggcatgccatcgtctgcagggaaaatatctcgagcaaaggattctccgaacttaacccactggcactgtacacaacaagcagtggcgggcccgaggacattgtactgacagaacttggctacccctcccagcagcattacttcaacgaggatcgcaaaatcagcccacaatccaaggagagtgaactgaggattttacaggacatcaacgacgagaagtctctctcacatctaaagtccgaaagcaaagaacccctaaaggactcagagtttgaaagcctgaagacatgtaataagagcttcgaggaggatcctaaatggagcaaccctgaacccaatgatctgaaggaggagaacgaagacgaaatccccacaggtatgccctgtcttgaatctgttactattggcgatgatatctgggacgaaaactggctgcctttacaggccaaaatgggcaagggcggagacgccgctagccatctcttcacagcatctctaggaggcaagaaccagtatagttcttgcaaagagatgccacagaaggactggtgcttctcaactccaaaggatacctgggacgacagctggcagccctccggtttagtgaacggaacaaaggttgaggtgcataaaccagaggtcctgggggcacaggagaaaaacacaggaacaaacaggacgcaaaagcagttggacataaacggtagttccgactcatccacactgcccaagctggaggaattttgtacatcccttactcagtcagagcagagcgctgatgggtcccagagtgaacccaacaattcacagacacagccaaagcaaatacaactcagtaccgccgcgccttgctcaaccaccgctgtggatgactccgcagagaaaccaagcggcagtgtcgaatctagccccgaaatcctgaaaaacgaagacttcagctcctcccgggccatcacactttacaaggacaagaggcaggaatctgtcgaccagctgtctcttatcctgtcctatgaatgccaaatttctcagaagctatacatccctaggtccaccgccacagccgccctgggcgctgccgctcgcctcgcaaccagtaggagcctcttacattggtatcctagtgtaaagaggatggaagcttag

SEQ ID NO: 25402 - DNA, 426 bp, synthetic construct
  source 1..426: mol_type = other DNA; note = Synthetic coding sequence
atgcccaccaccagccggcccgccctggacgtgaagggcggcaccagcccagccaaggaagatgccaaccaagagatgagctcggtcgcgtacagcaacctcgccgtgaaggataggaaggcagtggcaatcttacattaccccggggtggccagtaatggcacaaaggcttcaggcgcaccgacgtctagtagtggctctcctatcgggagtccaacaactactcccccgacgaaacctccttctttcaatctgcaccctgctccccacctgctcgccagcatgcatctgcagaagctcaacagtcaatatcagggaatggctgcagcaacccctggacagccaggcgaagctgggcctctgcaaaactgggacttcggcgctcaggccggcggcgccgaaagcctgtcacccagcgcgggctag

SEQ ID NO: 25403 - DNA, 1188 bp, synthetic construct
  source 1..1188: mol_type = other DNA; note = Synthetic coding sequence
atggccagcgccgccagcgtgaccagcctggccgacgaggtgaactgtccgatctgccaggggactctgcgggaacccgtcaccatcgactgcggacacaatttctgtcgggcttgtctgacacgttactgtgagatccccgggcctgacctcgaggagagtccgacttgtcccctgtgcaaggagcctttcaggcctgggagcttcagacccaattggcagctggctaatgtcgtcgagaacatagagcgcctgcagttagtatccacgctcggcctgggcgaggaagatgtgtgtcaggaacacggtgagaagatttactttttttgcgaagacgacgagatgcagctctgcgtcgtttgtcgtgaggctggcgaacacgcaactcacaccatgcgcttcctagaagatgcagctgctccctatagggagcagatccacaaatgcttaaaatgcctaagaaaagagcgggaggaaattcaagaaattcaatcccgggaaaataagaggatgcaggtcctgctcactcaggtgtcgaccaagcgacagcaagttatctctgaatttgcacatctcaggaagtttttagaagaacagcagagcatactcctggcgcagctggaaagccaggacggcgacatactacggcagcgggatgaatttgatttgctggtagctggggagatctgtcgtttttctgccttaatagaggaattagaagagaagaatgagagacccgcccgcgagttgctgacagacatcaggtcaaccctgataagatgcgagacacgtaagtgccgcaagcccgttgcagtaagccctgagcttggacaacggatacgcgatttccctcaacaagcactgcccttgcagagggagatgaaaatgttcttggaaaaactctgctttgaacttgactatgaacctgctcatatttccctggaccctcagacgtcccaccccaagctgctgctgtccgaggaccaccagagagcccagttcagctataagtggcaaaattcccctgataatcctcagcgctttgatcgcgcaacatgcgtgctcgctcatacaggcattaccggaggtaggcacacatgggtctggatggcaagggtcccaggtgattccggctgttgtcagttctgcagtcccccatcagtcctgggtactgaggttgcagcctag

SEQ ID NO: 25404 - DNA, 1344 bp, synthetic construct
  source 1..1344: mol_type = other DNA; note = Synthetic coding sequence
atggccaccgacagctgggccctggccgtggacgagcaggaggccgccgtgaaaagtatgacaaacttacagatcaaggaagaaaaggtcaaagccgacacaaacggaatcatcaaaacctccactacggcagagaaaacagacgaggaggagaaggaggacagagctgctcaatcgctgctaaacaagcttatacgctcaaaccttgtggataacacgaatcaggtggaagtcctgcaaagggaccccaattccccactgtacagcgtgaaatcattcgaagagttaagactccctcagaacctgatagctcagagccagagcggcacaggcaaaacggccgcctttgttctcgccatgctctccagggtggaaccatctgaccggtaccctcagtgtctgtgtttgtctcctacctatgaactggccttacaaacggggaaagtgatagaacagatgggcaagttttacccagaactgaaactcgcctatgccgtcagaggaaataaactggagcggggtcaaaagatcagtgagcaaatcgtaattggcacgcctggcacggtcctagactggtgttctaagctcaaattcattgaccccaagaagatcaaggtgtttgtcctggacgaggccgacgtgatgatcgccacccagggacatcaggaccaatcgattagaattcaaaggatgttgcctcgtaactgccagatgctgttgtttagcgcaacttttgaggactccgtctggaaattcgcccagaaagtggtgccagatccaaacgtgataaagcttaagcgtgaagaggagactttggacaccataaagcagtactacgtgttgtgtagtagtcgcgacgagaagtttcaggcactctgtaacctttacggggctatcaccatagcccaggctatgattttctgccacactcgaaaaaccgccagctggcttgcggccgaactctccaaagaaggacatcaggtggctttacttagcggagagatgatggtagagcagcgtgccgcagtgattgaaagattccgagaaggaaaggaaaaagttcttgtaactactaatgtgtgtgcaaggggcatcgacgtggagcaagtgtccgttgtcattaacttcgaccttcccgtggataaagacggcaatcctgacaacgaaacttacctccacagaatcgggcggactgggcgtttcggaaagcgaggcctggctgtgaatatggtcgactctaagcactccatgaatattctgaatagaatacaggagcactttaataaaaagattgaaaggctggacacggatgatctggacgagatcgagaaaatcgcaaactag

SEQ ID NO: 25405 - DNA, 630 bp, synthetic construct
  source 1..630: mol_type = other DNA; note = Synthetic coding sequence
atggccagcagcgacctggagcagctgtgcagccacgtgaacgagaagatcggcaacataaaaaagactctcagtttgcggaattgtgggcaggagccaaccctgaaaactgtattgaataagatcggcgatgaaatcatcgtcataaatgaactgctgaacaaactcgagctggagatccagtaccaagagcagaccaacaatagcctgaaggaactgtgcgagtctttggaggaagactacaaagatattgagcatctaaaggagaatgttcctagtcacttacctcaagtgacggtgacccagagctggtatatgaagagcaggctcacctataatcaaattaatgacgttataaaggaaattaacaaggccgtgatcagtaagtacaagatcctgcaccagcccaaaaaatctatgaactccgtgacaaggaatctctaccatcgttttatcgacgaggaaacaaaggacaccaagggccgctacttcatcgtggaggccgacatcaaggaatttaccaccctcaaggccgataagaagtttcacgtgctgctcaatattctgagacattgcagaaggttaagtgaagtgaggggtggaggcctaacacgttacgtcattacatag

SEQ ID NO: 25406 - DNA, 1125 bp, synthetic construct
  source 1..1125: mol_type = other DNA; note = Synthetic coding sequence
atggacagcgtgcggagcggccccttcggccagctgttccggcccgacaactttatcttcggccagactggagctggcaacaactgggccaaagggcactatacagaaggagccgagttagtagacgccgtgttagacgtggtgaggaaggagtgcgaacactgtgattgtctacagggattccagctgactcactctctagggggcgggacagggtcaggtatggggacgctgcttatcagcaagattcgcgaggaatttcccgacagaattatgaacacctttagtgtgatgcctagtccaaaggtttccgatacagtggtggagccttacaatgccaccctgagcgtgcatcagcttgtggagaataccgacgaaacatactgcattgataacgaagccctctacgatatctgcttccggaccctgaaacttaccacgcctacctatggcgacttaaatcacctggtgagcgccactatgtctggtgttaccacatcactgagatttccaggccagcttaacgcggacttgagaaagctagccgtcaatatggtgccgttcccacgattacatttttttatgcctggttttgcgcctctgacgagtcgcggttcacagcagtatcgtgcactgacagtccccgagcttacccagcagatgttcgacgccagaaatatgatggccgcctgcgacccgcggcatggccgctacctgaccgtcgctaccgtttttcgcgggcccatgagcatgaaggaggtagacgaacagatgcttgcaatccagagtaagaactcatcttactttgtggaatggatccctaacaacgtaaaggttgctgtctgcgacatcccacctcgcggtctcaaaatggcttcaactttcatcgggaattccacagcgattcaggaattgttcaagcgcatcagcgagcagttttcagctatgttcaggcgcaaagcttttctgcattggtttactggagagggcatggacgagatggagttcacggaggccgaatcaaatatgaacgatctggtgtctgagtaccagcagtatcaggacgctaccgcaaacgacggagaagaggctttcgaggacgaggaggaagagatagacggttag

SEQ ID NO: 25407 - DNA, 2289 bp, synthetic construct
  source 1..2289: mol_type = other DNA; note = Synthetic coding sequence
atggccagcctgctgcaggaccagctgaccaccgaccaggacctgctgctgatgcaggagggaatgccgatgaggaaggtccgatctaagtcctggaagaaactgcggtattttcgtttacagaacgacggtatgaccgtgtggcatgcccggcaggctaggggatctgccaagccctccttttcaatctcagatgtggaaacaatcagaaatgggcacgatagcgaactgctacgctccctcgctgaagaattgcccttggaacagggattcacaattgtgttccatggacggaggtctaatctggatctgatggcaaactctgtcgaggaagcccagatttggatgaggggacttcagctgctggtggacctggtaacgagtatggaccaccaggaacggcttgatcagtggctgtctgactggttccaaagaggagataagaaccaggacggcaaaatgagctttcaagaggttcaacgcctgttacaccttatgaatgtcgagatggaccaggagtatgccttcagcctctttcaggctgcagataccagccagtccgggactctggagggggaggaatttgtgcagttctacaaggcgctgaccaagcgcgctgaggtgcaggagctgttcgagtctttttctgccgacggtcaaaagctcaccttgctagaattcctcgactttctgcaagaggagcagaaggaacgggattgtacatcagaactcgcgctggaactgatcgacagatacgaaccaagcgattcagggaaactccggcatgtgctcagcatggatggtttcctcagttacctgtgctccaaggatggcgacatttttaaccccgcctgcctacccatctatcaggatatgactcagccactgaaccactacttcatttgttcctcccacaatacatacctagtgggtgatcaattgtgtggccagtcgagtgtagaggggtacatccgtgcattgaagagaggttgtcggtgtgtggaagtggacgtgtgggatggtccttcaggagaacccgtagtgtatcacggacatacgctcacttctagaatcttgttcaaggacgtggtggctaccgtagctcagtacgctttccagacatccgactaccccgtgatcctttctctcgagacccattgtagttgggagcagcagcagaccatggcacgacacctgaccgagattttgggcgagcagctgctgtctacaacgctcgacggggttctgccaacacagctgccaagcccggaggagcttcggcgcaagatcctcgtgaaggggaaaaagctgactctggaagaggatcttgaatatgaggaggaggaggcagagcctgagctggaagaaagcgaactagcccttgaatcccagttcgagacggaaccagaaccgcaggagcagaatctgcaaaacaaagataaaaaaaagaagagcaagcccatcttatgtcccgcgttatcttctctcgtgatttacttaaagagcgtgagttttcgctcgttcactcacagcaaagaacactatcacttttacgagatctcttccttcagcgagacgaaggccaagagactgataaaggaagccggaaatgagtttgtacaacacaatacctggcagctgtcccgcgtatacccttccgggctgagaacagacagttccaattataacccccaagagttatggaacgctgggtgccagatggtcgccatgaacatgcaaaccgctggactggaaatggacatctgtgacggccatttcaggcagaatggggggtgtggctatgtgttgaagcctgacttcttgagagacatccagtcctcttttcaccccgagaagcctatctctcccttcaaggctcagacgctcttgatccaggtgatctccggccagcagctgccaaaagtcgacaaaacgaaggagggcagcatagtggatcccctggtcaaagtgcagatttttggtgtgcgtttggataccgctagacaggagaccaactacgtcgagaataatgggtttaacccctattggggtcagactttgtgttttcgcgttctggtcccagagctcgccatgctacgcttcgtcgtcatggactatgattggaagtcaaggaacgattttattgggcagtataccttgccttggacttgcatgcaacaaggataccgacacatacaccttctgtctaaagacggaatcagcctgagaccagcaagcatttttgtgtatatttgtatccaggagggcctcgaaggcgacgagtcatag

SEQ ID NO: 25408 - DNA, 1461 bp, synthetic construct
  source 1..1461: mol_type = other DNA; note = Synthetic coding sequence
atggccgagctgcagatgctgctggaggaggagatccccggcggcaggcgcgcactatttgactcctacacaaatctggaaagagttgcagactactgtgagaacaattacattcagagcgctgacaaacagcgcgccctcgaagaaacaaaggcttacaccacccagtctctggcctcagtggcttacctgattaacactttggcgaataacgttctgcagatgttagacatacaggcatctcagcttagaagaatggaatctagtattaaccatatatcccagacggtggacattcacaaggagaaggtggctagaagggagatcggtatcctgaccaccaataagaacacttcccgcacgcataaaataatcgcacctgctaacctcgaaaggccagtacggtacatacggaagcctatcgactacacaatcctggatgacatcgggcacggtgtcaaatggctcctacgcttcaaggtctccacccagaatatgaagatgggcggactgccccgaacaacacctccaacacagaaaccccccagtccgcccatgagcgggaaagggaccctagggaggcactccccataccgcaccctggaaccagtacgtccgccggtggtgccgaacgactacgtccctagcccaacaaggaatatggcaccgtcccaacagtcccccgtaaggacagcatcagtcaaccaacgaaatcgcacctactcaagcagtggtagctccggcgggtcacacccaagctcaagatcctcatcacgcgagaattccgggagcggcagtgtgggagtccccatagccgtaccaacaccctctccaccatcagtgttcccagcgcccgccggctctgcgggaaccccaccgttgccggccacgtctgctagtgctcctgcccctctggttccagcaaccgtcccctcctctacggcacccgacgcagccgcaggcggagcccaaacactagcggacggcttcacatcccccacaccgcccgtggtttcctcgactccacccaccggccaccctgtgcagttttactccatgaacagaccagcctcccggcacaccccgccaactattggcggctcattaccttaccgcagaccaccttctattacatctcagacatcgctccaaaatcaaatgaacggagggcctttctatagccagaatcctgtttctgacacgcccccccctcctcccccggtcgaggagcctgtatttgacgaaagtccgccccccccgccaccccccgaggactatgaggaggaggaggcagccgtcgttgaatactcggacccgtacgctgaggaggaccctccttgggcccccaggagttatctggagaaagtggttgctatttatgactacacgaaggacaaagaagacgaactgagtttccaagaaggggctattatctatgttataaaaaaaaacgatgactag

SEQ ID NO: 25409 - DNA, 2145 bp, synthetic construct
  source 1..2145: mol_type = other DNA; note = Synthetic coding sequence
atgctgagccccaagatccggcaggcccggcgggcccggagcaagtctctagtgatgggagagcagtcaaggtcccctggtcgaatgccctgcccacataggctgggacccgtcctgaaggccggatggcttaagaagcagagatctatcatgaaaaattggcaacagagatggtttgtcctaagaggagaccaacttttctactataaagacaaagatgagattaagccacagggctttataagcctgcagggcacgcaggttacagaactgcctccgggtcccgaggaccctggcaagcacttgtttgagatttccccaggcggcgccggtgagcgcgagaaggtgcctgcaaatcctgaggctctgctactgatggctagcagtcagcgggacatggaggactgggtgcaggctattcggcgggtgatatgggcccctctggggggtggcacagcccggcggtcacatgcccaccccctggagcctcttccaccaggaattttcgggcagcgactggaggagactgttcaccatgagagaaagtacggcccccggcttgctcctctgcttgtggagcaatgtgtggatttcatccgcgagagggggctgaccgaagaaggtctgttcagaatgccaggccaggcaaatctggtgcgagaccttcaagattcattcgactgtggcgagaagcctctcttcgacagcaccaccgatgtgcacacggtcgcaagtctgctcaaactctacctgagagagcttcccgagcctgtcgtgccttttgccaggtacgaagattttttatcttgtgctcagcttcttacgaaggacgaaggagaaggaactctggagctcgccaagcaagttagtaacctgcctcaagctaactacaatctcctgcgctacatctgcaagtttctggatgaagtgcaggcatattctaacgtcaataaaatgtctgttcagaaccttgctaccgtgtttggtcctaatattctgcgtccacaagtagaggaccccgtcacgatcatggaggggacctctttggtccagcatttgatgaccgtgctgatacgtaaacacagccaactgtttacggctccagtcccagaaggcccaacctcgcctcgcggtggtctgcagtgcgccgtcggctggggaagcgaagaggtcaccagagactcccagggtgaacctggggggcctggactgcccgcccatcgaacctcatcactggacggcgccgccgtggcagttctgtctagaaccgctccgactgggccaggatcccgatgctctcccgggaaaaaggttcagaccctgccctcttggaagtcttcattccgtcagcccagatccctttcaggatccccaaaggggggtggcagcagccttgaagtgcctattatttcgagtggcggcaactggcttatgaacggactgtcgagtctgcgcgggcatcggagagcgtctagtggggaccgtttgaaggatagcggatccgtacagcggctgtctacctatgacaacgtcccagcccccggacttgtccccggcatcccctctgtcgcttcaatggcctggagtggcgcctcttcgagtgagtcatctgtgggtggatctctaagctcttgtaccgcttgtcgggcttcagattctagtgcccgcagcagcttacacaccgactgggcgttagaaccaagcccgctcccatcgagttctgaggacccaaagagccttgatctggatcactctatggatgaagccggcgccggcgccagtaactcagagccctctgagcccgactccccgaccagagaacatgcaagaaggtctgaggcgctgcaagggctagtgactgaactgagggcggaattgtgccgtcagcgcaccgaatatgagaggagcgtaaagcgcattgaggagggatctgccgacttacggaagcggatgtcgcgcctagaggaagagctagaccaggaaaagaagaagtatattatgcttgagatcaagctgcggaactccgagagagcaagggaagatgctgaaagaagaaaccagctcctccagagggaaatggaagaatttttctctaccctgggaagtctgaccgtgggtgccaaaggcgcacgcgcccccaagtag

SEQ ID NO: 25410 - DNA, 381 bp, synthetic construct
  source 1..381: mol_type = other DNA; note = Synthetic coding sequence
atgtggaccgcccggggccccttccggcgggaccggtggagcagcgaggacgaggaagccgctggacctagccaagcactctctccgttgctgtctgatactaggaaaattgtaagcgaaggagaacttgaccagttggcccaaattcgacctcttattttcaatttccatgagcagaccgccatcaaggactgtttaaaaatcctggaggaaaaaaccgccgcatatgacataatgcaggagttcatggcactggagctaaaaaatttgcccggagaattcaattctggcaatcagccaagtaaccgggagaagaacagatacagggatatactgccgtttcagcatcacggttattccgggcctaatgagcgcacctag

SEQ ID NO: 25411 - DNA, 2442 bp, synthetic construct
  source 1..2442: mol_type = other DNA; note = Synthetic coding sequence
atgagcgagcagggcgacctgaaccaggccatcgccgaggagggcgggacagagcaggaaaccgccacacccgaaaatggaattgtgaagtcagaaagtttggacgaagaagaaaagctggaactgcagaggcgattggaggctcaaaatcaggagaggaggaagtctaaatccggcgccgggaaaggcaaactgactagatctctcgcagtgtgtgaggaatccagtgccagacctgggggtgaatctctgcaggaccaggagtcaatccacctacaactcagttccttcagctccctgcaggaagaggacaaatcccgcaaggatgattctgagcgggagaaggaaaaggacaaaaacaaggacaaaacctctgagaaaccaaaaattcggatgttgagtaaggattgctcacaagaatatacagactctacaggcatagacttgcacgaattcttgattaataccctaaagaataacagcagagacagaatgatcttactcaagatggagcaggagatcattgactttatcgcggacaacaacaaccattataagaaattccctcaaatgagctcatatcagcggatgctcgtgcaccgtgtggccgcttacttcggcctggaccacaatgtggaccagaccggaaaatccgtgatcatcaacaaaacttcgagcactaggattccagagcagagattttgcgagcatctaaaagacgaaaagggcgaggaaagccagaagcggttcatcttgaagcgggacaacagctcaattgacaaggaggataaccaatcagtgtgtagccaggagtccctgttcgtggagaattctcggctattagaagactctaatatctgtaacgagacatacaaaaagcgtcagttgtttcgtggcaatcgcgatggcagcggccgcacttctggatcacggcagagttcttctgagaatgaactgaaatggtcggaccatcagagagcctggtcaagcactgatagcgactcttccaatcgtaacctgaaaccggcgatgacaaaaacagcgtcgtttggcggaattacagtgttgactaggggcgactcaacatcaagcacccgaagcacaggcaaattgagtaaggctggctctgagagcagttcatccgccggatcaagtggctctcttagtaggactcatcctcccttacaatctaccccactggtctctggtgttgccgccggcagtcccggctgcgtcccatatccagagaatggcataggggggcaagttgccccttcttctacgagctatattctgcttccactcgaggccgcgacgggtataccaccaggttccatcttacttaatccgcacactggtcagccttttgtgaaccctgatggcacccctgccatctataacccgcctaccagccaacaaccccttagatccgccatggttggccagagtcagcagcagccccctcagcaacagccaagccctcagccccagcaacaggtccagccaccccagccacagatggcagggccattagtgactcagtctgtacagggcttgcaggcaagcagtcagtcggtccagtatccagccgtgagcttcccacctcagcatctcctcccagtatcgcccacacagcacttccctatgcgagatgacgtcgccactcagtttggtcagatgacactgtccagacagagttcgggagagacacccgaacccccatctggcccagtgtatcctagctccctgatgccccagccggcgcagcaaccatcttatgtgattgcatccacaggtcagcagctgcctaccggaggattctcaggatcaggcccccccatctcacagcaggtactgcagcccccgcctagcccgcagggattcgtccagcagcctcctcccgcacagatgcccgtctactactatccctcaggtcagtatccgacttccaccacgcagcagtaccggcccatggcaccagttcaatataatgcccaacgctcacagcagatgccacaggctgcccaacaggccgggtaccaaccagtgcttagtggtcagcagggattccagggacttatcggagtgcagcaaccccctcaatcccagaacgtgattaataaccagcaaggaacacctgttcaaagcgtcatggtgagctaccctaccatgagctcctaccaagtacccatgacccagggcagtcagggacttccgcagcaatcctatcagcagccgatcatgttgcccaatcaggctggtcaggggtctctccctgccaccgggatgccggtctactgtaacgttacacccccaacaccccaaaacaatctgcgtcttattggcccccactgcccttcatcaacggtccccgtgatgagcgcctcttgcaggactaattgcgccagtatgtctaacgcaggctggcaagtgaaattctag

SEQ ID NO: 25412 - DNA, 1467 bp, synthetic construct
  source 1..1467: mol_type = other DNA; note = Synthetic coding sequence
atgaacggcgccctggaccacagcgaccagcccgaccccgacgccatcaaaatgtttgtggggcagatccccagatcttggagcgaaaaggagttgaaggagttgttcgaaccctacggcgctgtgtatcagatcaatgttctgagagatcgatcacaaaatccacctcagtccaaaggctgctgttttgtcaccttttacacacggaaggccgctctcgaggcgcagaacgccttgcacaatattaagacgctccccgggatgcatcaccccatccagatgaagccggcagattcagagaaatcaaacgccgtagaggataggaagctgtttatagggatggtaagcaaaaaatgtaatgaaaatgacatcagggtaatgttctccccatttggccagattgaagagtgccgcattctgaggggtcccgacgggctgagccgcggttgtgcctttgtgacattctccaccagggccatggcccagaatgccatcaaggccatgcaccagagtcagacaatggaagggtgcagctctccgatcgtggtcaagtttgccgacactcaaaaggataaagaacagcgacggctccagcagcaacttgcgcagcaaatgcagcagctgaacacggctacctgggggaacctgactggattgggcggactcactccgcagtacctagctctcctgcagcaggctacctcaagcagcaatctgggggctttctctggtattcagcagatggctggcatgaatgcgctccaactgcagaatttggccacactggctgctgccgcagcagccgcacaaactagcgccacttctaccaacgccaatccactctcaacaaccagctctgccctgggcgcccttacctcccccgtggcggcttccaccccgaatagcacagccggcgctgcgatgaattccctgacatctctggggaccctgcaaggattagccggcgctacagtggggcttaataatatcaatgcactggccggtacaattaatagcatggccgccttgaatggaggacttggagcaaccgggctgactaacggtacggctggcactatggatgcactgacccaggcctactctggcattcagcagtatgctgctgcagccctgcccacattatattcacagtccctgctccaacagcagtccgccgctggttcccagaaagagggtcctgagggggcgaatttgtttatttaccacctcccacaggaatttggagatcaagacatcttgcagatgtttatgccattcggtaatgttatctcagccaaggtgtttatagataaacagacgaacctgtccaagtgttttgggtttgtttcatacgataacccagtgagcgcccaggctgccatccaggccatgaacggctttcagatcggcatgaaacgcctgaaggttcaactgaagcggtccaagaacgatagcaaaccctattag

SEQ ID NO: 25413 - DNA, 474 bp, synthetic construct
  source 1..474: mol_type = other DNA; note = Synthetic coding sequence
atggccaccagcgcccccctgcggagcctggaggaggaggtgacctgctctatctgtttggactacttgagagaccccgtgacaattgactgcggtcatgtgttctgtaggtcctgcacaactgatgtgcgccctattagcggtagtagacctgtgtgccctctgtgcaaaaagccttttaaaaaagagaatatccggcccgtgtggcagctagcttcattagtcgagaatatcgagagactaaaagtagacaaaggacgccaacctggcgaagtgactagagaacagcaggatgcaaagctctgcgagcgacatagggaaaagcttcattattactgtgaagacgatggtaagctactttgtgtcatgtgtagagagtctcgagagcacaggccacatactgcagttctcatggagaaagccgcccagccccatcgcgagaaaatcctcaatcacctctccaccctgcggtag

SEQ ID NO: 25414 - DNA, 303 bp, synthetic construct
  source 1..303: mol_type = other DNA; note = Synthetic coding sequence
atggccagcgaggacatcgccaagctggccgagaccctggccaagactcaggtggcgggcggccagttgagttttaagggcaaatctctgaaactgaacacagcagaggatgccaaggacgtcattaaagaaatcgaagactttgacagcctggaagcactcaggttggagggtaacactgtgggtgtagaggccgccagagtcatagcaaaggctcttgaaaagaagagcgagctgaaaagatgtcattggagcgatatgttcaccggacgtctcagaacagagattccccccgcattgtag

SEQ ID NO: 25415 - DNA, 459 bp, synthetic construct
  source 1..459: mol_type = other DNA; note = Synthetic coding sequence
atgagcgtgacctacgacgacagcgtgggcgtggaggtgagcagcgatagcttctgggaggtcggtaactataagcgaacagtcaagcgaattgacgacggccatcgtctctgttccgatctgatgaactgtctgcatgaaagagcacggatcgagaaagcatacgctcaacagctgacggagtgggcgaggcggtggcgacagctagttgagaaagggccacaatacggaacagttgaaaaggcgtggatggcatttatgagcgaggctgaaagagtgagcgagctccatctggaggtaaaagccagtttgatgaacgatgattttgagaaaataaaaaactggcaaaaggaagctttccataagcagatgatgggcggtttcaaagaaactaaagaggccgaggatggcttcaggaaggcacagaaaccctgggctaaaaagctgaaagaagtttag

SEQ ID NO: 25416 - DNA, 543 bp, synthetic construct
  source 1..543: mol_type = other DNA; note = Synthetic coding sequence
atgttcgccagcgacctgctgcgggccctggactgctgccccggcgcaggatcttcagggttgttgccccaacttggcccacgccaactcctggcatttacggtgaactgccttggcaaccatagatacctcgggttcttcgaggatttggagcagagacacaaggctcaagttctggtcgaagacatctcggatattctagaggaacacgcagagaagcatttccacccatacattgcctactgtagcaatgaagtttaccaacagaggacactgcagaagctgatatcttctaatgcagcgttcagagaagccctccgcgagattgagcgccggcccgcatgcggtggcttaccaatgctgagctttttgatcctccctatgcagagagtgacacggttgcccctcctaatggacactctgtgcctgaagacacagggacacagcgaacggtacaaagctgccagtagggctcttaaggcaatatccaaacttgtgcggcagtgtaacgaaggcgcccacaggatggaacggatggagtag

SEQ ID NO: 25417 - DNA, 2487 bp, synthetic construct
  source 1..2487: mol_type = other DNA; note = Synthetic coding sequence
atggacagcgaggccttccagagcgcccgggacttcctggacatgaatttccaaagtctggccatgaagcacatggacctcaaacagatggagttagataccgccgccgccaaggtagatgagctcactaagcagttagaatccctctggagcgattcccccgctccgcctggaccccaggcagggcccccatccaggcccccaaggtattcatcttcctcaatccctgagcccttcggttccaggggctctccccgtaaggccgccaccgacggagccgacacgccatttggcaggtccgagtccgcccccacactgcatccatacagccctctgagccccaagggacggcccagctcgcccagaactcctctatatctccagcccgacgcctacggcagccttgatcgcgctacatccccccggccacgagctttcgatggagctggatcatcactcggacgtgccccctcgcctagaccaggcccaggcccgctgcggcagcaggggcctcctacccccttcgactttctgggaagagctggaagcccaagaggaagcccactggcagagggcccgcaggcttttttcccagagcgcggaccttcacctagacctccagccacggcatacgacgctccagccagcgcttttggctcatccttgcttggaagcgggggctctgcatttgcgccccccttaagggcacaggacgacctcacccttcggaggaggccccccaaagcctggaatgaatcagatttggatgtggcgtacgagaaaaagccatcccagaccgcatcttacgaaagattagacgttttcgccagacccgctagcccatccttacagttactaccctggagggaatcatccctggatggcctgggaggcacagggaaggacaatctcacaagcgcgactctcccccgtaactacaaggtgtcaccgctcgccagcgacaggcgttctgacgcagggagctaccgtcgttctctgggctccgcaggacccagtgggacactgccacggagctggcagcccgtgagccgcattcccatgccaccgtccagcccacagccgaggggcgcacctagacagaggcccatccctctgagtatgatctttaagcttcagaatgcattctgggaacatggggctagcagagccatgctcccaggatcccccctgttcacacgcgcaccaccccctaaattgcagcctcagccccagccccaaccccagcctcagtcacagccgcagccacaattaccacctcagccccaaacgcaaccccagacccctacgccagctccacagcatccccagcagacttggcccccagttaatgagggccccccaaaaccccccaccgagctggaacctgagccggagattgagggtttactgacccccgtgcttgaagccggggatgtcgatgaggggcctgtcgccagacctctgtcaccaacccgcctccagcctgcccttcctcccgaggcacagagcgtgcccgaattggaggaggttgcaagggtcctggccgagataccccgtcctctgaaaaggagaggtagcatggagcaagcgccagccgtagctctgccgcctacccacaaaaagcaatatcagcagattattagccggctctttcaccggcatggcggaccaggcccagggggcccagaacccgaactttcaccaatcactgaagggagtgaagctcgggcaggcccccccgctcccgcaccgccagcaccaattccgcccccagcaccttcccagtctagcccacctgagcaaccccagtccatggagatgagaagcgtgttgcgcaaagccgggtccccaagaaaagcgaggcgtgcacggctcaaccccttggttctgcttctggacgctgccctgacaggagaactggaagtcgtgcaacaggcagtcaaagagatgaatgatccatcgcagcccaacgaggaaggaattaccgcccttcacaacgccatttgcggggccaactatagtatagtggacttcctgataaccgcgggcgctaacgtgaattcgcccgatagtcacggctggaccccattgcactgcgcagcctcgtgtaacgacaccgtgatatgtatggccctcgtgcaacatggtgccgccatctttgctacaaccctcagcgatggagccaccgcgtttgagaagtgtgacccctaccgcgaaggctatgccgactgtgcgacctacctagccgatgtagagcagtcaatgggcctgatgaattctggcgccgtctatgcattgtgggattattctgccgagtttggggacgaactgtcgttcagagaaggcgagtccgtgaccgttttacgtcgtgacggcccagaagagactgattggtggtgggcagccctccacggtcaggaaggatacgtgcctaggaattacttcgggctgttcccaagagtgaagccccagcgttcaaaggtatag

SEQ ID NO: 25418 - DNA, 4455 bp, synthetic construct
  source 1..4455: mol_type = other DNA; note = Synthetic coding sequence
atgcggatccccgaccagaagtacgtgaccctgaagctgaacgacgtaattcgattcggttatgattctaacatgtacgtgctggagagggtacagcatagagttccagaagaagctctgaagcatgaaaagtatacaagccagcttcaggtgagcgttaagggcttggcccccaagaggagcgaggcgctgcccgaacatacaccttattgtgaagctagcaacccgcgacctgagaagggcgatcgccgacccggcactgaggccgcctcctatcgcacgccactctacgggcagccttcttggtggggagaagacgacggatcgacactgccagatgctcaaagacagggcgagccctatcccgaacgacctaaaggccccgtgcagcaggacggggaactccacggtttccgcgcccccgccgaacctcaaggctgttcctttcggcgagaacctagctatttcgagatccctacaaaggagacaccccagccttctcagccccccgaggtccccgcccacgagatgccgaccaaggacgccgaagcaggaggggggggggctgcacccgttgtacagagccacgccagtttcacgattgaatttgacgactgtagtcccgggaagatgaaaattaaagaccacataacaaaattctccctgagacagcggcgcccgcctggaaaagaggcaactcctggtgagatggtgagtgcagaaaccaaggtcgcagattggctggttcaaaatgacccgagtctcctacatcgagtgggcccaggtgacgatagacattctaccaaaagtgatctgcccgttcatactaggactttaaaaggccacaagcacgaagatggtactcagtccgatagcgaagacccattggcaaaggctgctagtgccgctggagtgcctctagaagcaagtggggaacaggtgaggctgcagaggcaaatcaaacgcgatcctcaggagctgttacacaaccagcaagcattcgtgattgagtttttcgacgaagacacaccacgaaagaagaggtcccagtccttcacacattcaccctccggcgatccaaaagctgacaaaagaagaggacctacgcccgcggatagggacagaccaagtgtaccggctcctgtgcaagcgggaggtcgcagcagcggccctcaaagggcggggtcccttaaaagagaaaagactgaagaaagactcggatccccaagccccgccagccgcactcccgccaggcctttcggctctgtgggccgcagaagtcggttagctcaggacttcatggcacagtgcctccgcgaaagcagcccagcagccaggccatcccctgagaaagttccccctgtattaccagctcctctaaccccacatggaacctctcccgttggacctccaacgcccccccccgccccgactgatccccagcttactaaggccaggaagcaggaggaggatgacagcctgtctgacgccggaacctacacaatcgagactgaggcccaagacacagaagtcgaagaagctcggaagatgattgaccaggttttcggggtgctggagtcaccagagctgtctcgcgcctccagcgccaccttccgcccggttattcggggagaccgcgacgagagtgacgatggaggagtagcgcagagaatggcacttctgcaggagttcgcgtcccgacctttaggagccgccccccaggctgagcatcagggcctgccggtacccggatccccgggaggccagaagtgggtcagtagatgggcttcactcgccgattcatattccgaccctggcttgacagaggacggactggggcgtagggggggagaacctgaaggaagcctgcctgtgagaatgagaagacggctgccccagctcccatctgaacgggctgactcccccgccggccccgagagtagccgcaggagcggtcccggtccacccgagcttgatagtgaacagcccagtcgactgttcggtcaggaggaattagaccctgattcactaagcgatgcttctggatcggatggcggccggggcccggaacccggtgtggaaccacaggacagccgcaggcgctcgccccaggaggggcctacctggagcagaggacgtcgctcccccagggccccgggggagccaactcctgcgtctttttttattggggatcagaacggagatgcggtgctcagccgcaaacctctggccgcaccgggcgatggagagggactcggccagaccgcccagccctctcctccggcaagggatggagtttatgtctctgctaacggcagaatggtcatccaacttcggcccggacgttctccagaacctgatggtcctgctcccgccttcttacgacaagagtcattcactaaggaaccggctagcggacctcccgcgcctggaaaacccccacacatctcgagccacccattactgcaagacttagccgccacccgagcagcccggatggactttcattctcaagacacgcatctgatccttaaggaaactgaaacagcactggccgcattagaagcaaggctgctgtcaaatagcgtagacgccgagtgcgagggaggaagcaccccacggccgcctgaggacgccttaagcggcgatagtgatgtagacacagcctccacagtgtcactacggagcgggaaaagcgggccctccccaacaacccctcaacctctgagggcgcagaaggaaatgtcccccagccccccagcagcccaagatcctgggggtacagctctggttagtgcgcgcgaacaatcatccgaacgccagcatcacccattaggtccaacagacatgggcaggggggagcccgtcagaaggtctgcgatccggcggggccatcgcccacgcggaagcctcgactggccaagcgaggagagaggaccggtcctcgcacacctgccgtcttcagacgtaatggcttccaaccacgagacacctgaagcaaccggggcaggtcgtctcggttcaagaagaaagccagcggcccctcccccttccccggctgcccgagaggaacagtcacgttcatctgcttcaagccagaagggtccacaggccctgacccgatccaacagtcttagtacaccccggcccacccgggcgtctcgcctccgccgtgccaggttgggcgatgcttcggacaccgaagcggcagacggcgagcgcggttctctaggcaatcccgaacccgttggcagaccagcagccgagcaggccaaaaagctgtctaggctcgacattctcgcaatgccgaggaaaagggccggtagctttaccggcaccagtgaccctgaagcagcccccgcgagaaccagcttttctggaagaagtgtcgagctatgctgcgcaagcagaaagcccactatggctgaggcacgagccgtgagtaggaaggctgccaacactgcgaccactaccggtccgcgacagcctttctcccgcgcccgctcaggaagtgctcgttacacctccaccacccagacacccagagccggaagcagctcacgggcgcgttcccgtgcacctggccctcgggacaccgatgatgatgaggaggaaccggatccctacggtttcatcgtgcagactgccgaaatcgctgagatcgcacgcctgtcccaaaccttggtgaaggacgtcgctattctggcccaagaaatccatgatgtcgccggagatggggacacattaggatcttctgagcctgcacattctgcgagcttgtctaatatgccgtcaactcctgccagcaccatcagtgcacgcgaagagctagttcagcggatccccgaggccagcctgaactttcaaaaagtcccacctgggtcacttaactcgcgggacttcgatcagaacatgaatgactcctgcgaagatgcgctcgctaacaaaacaaggcccagaaaccgcgaggaagtgatattcgacaatctcatgctcaatcctgtgtcccagttgagtcaagctattcgagaaaataccgagcacctggccgaaaagatgaaaattctgtttcagaataccggccgggcttgggaagacctggaagcacggattaacgctgaaaacgaggtgcccatcttaaaaacaagcaataaagagatcagctccattcttaaagagttacggcgggtccaaaagcagctggaagtgattaacgcaatcgttgacccttcggggtcacttgatttacttactggaaatcgctccctggcttcatctgcccagcccgggctggggaagggtcgtgttgcggcgcagtcccctccttctcccgcctccgccgaggccctcctgcccgccttgcctctaaggaacttcccccaaagagccagctgtggacccccttcactgcctgaccctacctttctgcctgatgccgagaggtttctaatctag

SEQ ID NO: 25419 - DNA, 150 bp, synthetic construct
  source 1..150: mol_type = other DNA; note = Synthetic coding sequence
atgtaccccaaccccctgatctactgcacctgctgggacccctggaatctcgggccaagaaaattgataaaaacaccccagttacctagaaagaactctaccgggagctccaaactgacacccctggttccagctcctaagaaccattag

SEQ ID NO: 25420 - DNA, 948 bp, synthetic construct
  source 1..948: mol_type = other DNA; note = Synthetic coding sequence
atggccttccccgagcccaagccccggccccccgagctgccccagaaaaggctgaagacactagattgtggacagggcgccgtgcgcgcagttcggtttaacgtcgatggaaactactgcctgacctgcggatcagacaaaacactgaagctgtggaatccactgcggggaacactattaagaacctattctggacacggatacgaggtgctggacgccgcaggctccttcgacaacagctccttgtgcagcggcgggggggataaggctgtggtcttgtgggatgtggcctccgggcaggtcgtcaggaagttcagaggccacgcgggtaaagtcaacacggtgcagtttaacgaagaagcgacggtcatcctatccggaagcattgactcgtcgatcagatgctgggactgcaggtcccgaagacccgagcccgtgcagacgctggatgaagcccgcgatggggtctcctcagttaaagttagcgatcatgaaatcctggcgggaagcgttgacgggcgtgttaggcgatacgaccttaggatgggccagctgttcagtgattacgtgggctctcccataacatgcacatgtttcagcagagacggacagtgcacactagtgtcttccctggactcgacactccgtcttctggacaaggatacaggcgagctgctgggagagtacaaagggcataagaaccaggagtacaagttggactgctgcctcagcgagagagatacgcacgttgtgagttgttccgaagatggcaaagtgttcttctgggatctggttgagggcgccctggccctggctctccccgtaggctcaggcgtagttcagtctttggcatatcaccccaccgaaccatgcctgctcactgccatgggcggctctgtgcaatgctggcgcgaagaggcctatgaagctgaggacggagccggatag

SEQ ID NO: 25421 - DNA, 3015 bp, synthetic construct
  source 1..3015: mol_type = other DNA; note = Synthetic coding sequence
atgaaggccaccacccccctgcagaccgtggaccggcccaaggactggtacaaaacaatgtttaagcaaattcatatggtgcataagcctgggctgtacaacccaccatacagcgctcaaagtcacccggcagctaagacgcagacctataggccactgtccaagtcccatagcgataatagtcctaacgcgtttaaggatgctagcagcccagtgcctcccccacacgtgcctcctcccgttccgcccctccggcctcgggacagatctagtactgagaaacatgactgggacccgccagaccgtaaggttgacacacggaagttcagaagcgagccaagaagcattttcgaatatgagccagggaagagctctatcttgcagcatgaacgccctgcatccttgtatcaatccagcattgatcgctctctcgaaaggcctatgagctccgctagtatggcgtccgatttccgaaaacgccggaaatctgagcccgctgtgggccccccaagagggctgggagaccagtccgccagccgaacatcccccgggagagttgatttgccagggtccagcacaacattgactaaaagttttacttcttcgagtccctcatcaccctctcgggcaaaggggggtgacgacagcaaaatatgcccatctctttgttcctactcaggattaaacggaaatccgagctcagagctggattactgcagcacgtatcggcagcacttggacgtgccccgtgactcccctcgcgctataagtttcaaaaatggttggcaaatggcccggcagaatgccgagatttggagtagtacagaggagacagtgagtccaaagattaaaagccggtcatgcgacgatctccttaacgatgactgcgattcctttcctgatcctaaggtaaagtcagagtccatggggagtctcttgtgtgaagaagattccaaggagagttgccctatggcttggggcagtccttacgtccctgaggtacgctcgaatggtcgctcacgaattagacatagatccgctcgcaacgcacccgggttcctgaagatgtataagaaaatgcaccgtatcaaccggaaggatctaatgaactcggaggtgatttgtagcgtgaaaagcagaattctccagtatgaaagcgaacagcagcataaggacctgctgagagcctggtcacagtgctcgaccgaagaagtgccgagagacatggtgcctacccgtataagtgagtttgagaagctgatccagaaaagcaagtcaatgcccaatttgggagatgatatgctgagcccagtcaccctggaaccaccacagaacggactgtgtcccaaacgtagattctccatcgagtacctgctggaggaggagaaccagtccggtcccccagcacggggtcgaagaggttgtcagagcaacgcactggtcccaatacacatagaggtgacgtctgatgaacagcccagagcacacgtcgagttctctgattctgaccaggacggagttgtatcagaccattctgattatattcatctggagggctcttctttctgttctgagtccgactttgatcatttctcttttacatcttcagaatcattttatggctcttctcaccatcaccaccaccaccatcaccatcaccaccgtcatctcattagcagttgtaagggacggtgtcccgctagttacacccgctttactacgatgctcaaacatgagagagcccgccacgagaacacagaggaaccacggagacaggaaatggatcccggtctgagtaagttagccttcctagttagtcccgttccctttcgaagaaagaagaattctgctccgaagaagcagacagaaaaggccaaatgcaaggccagcgtttttgaagcattagactctgccctcaaagacatttgcgaccagataaaagcggaaaagaaaagaggctctctgcctgacaacagtatcctgcatcgactgatctcagagttgctgcctgatgtgcccgagagaaactcgtccctgagagccctcaggcgatctcctctgcatcagccactgcaccctcttcccccggacggagctattcactgtcctccttaccagaacgattgcggcagaatgccacgtagtgcgtcttttcaggacgtggatacggctaacagctcctgtcaccaccaggaccgcggaggggcccttcaggatagagaatcccctaggagctatagctctacccttaccgatatgggtagaagcgctcccagagagagacggggcacaccagaaaaggaaaaactgcccgccaaggcagtctatgatttcaaagcacagacctccaaggagctctcttttaagaaaggggacacagtgtacatattacgcaagatcgaccagaactggtatgaaggcgagcatcacggcagggtgggcatattcccaatcagctatgtcgaaaagctcacaccccctgagaaggctcagccagccagaccacccccccccgcacagcctggggagattggtgaggctatcgctaagtataattttaacgctgataccaatgttgaattgtcgctccggaaaggtgacagagtgattctgctgaagagggtggatcagaactggtatgagggaaaaatccctggtacaaaccggcagggcatttttccggtgtcttatgtagaagtggtgaaaaaaaacacaaaaggagccgaagactaccccgacccgccgattccccactcctactcctccgatcgaattcatagcctgtcatcaaataagccacagcgacccgtattcacccacgaaaatatacagggcggcggcgaaccttttcaggctctttacaactatacaccacgcaatgaagatgaactcgaactgagagagtcggatgtgatagacgtgatggagaaatgtgacgacggatggttcgtgggcacatcacgtagaacaaaattctttggcaccttccctggcaactacgtgaaacgcttgtag

SEQ ID NO: 25422 - DNA, 981 bp, synthetic construct
  source 1..981: mol_type = other DNA; note = Synthetic coding sequence
atggccgccgccgccgccgccgccgccgccaccaacggcaccggcgggagctctggcatggaggtcgacgcggccgtaccttctgtgatggcttgtggcgtaactggaagcgtgtccgttgccctgcatccgttagtgatcttgaacatctctgaccattggattcggatgagatcgcaagaaggccgaccggtgcaggtgatcggtgcactgatcggaaagcaagaagggcgcaacattgaggtgatgaattcctttgagctgctgtcacacaccgtggaggagaaaattatcatagataaggagtactactacaccaaagaggaacagttcaagcaggttttcaaggaactggagtttctcgggtggtataccacaggcggccccccagacccaagcgacattcatgtacataagcaggtttgtgagataatcgagtctcctctgttcttgaagctgaaccccatgacaaaacacactgatctaccagtgtccgtgtttgagtccgtaatcgatattataaatggagaagccactatgctgtttgccgagctcacttatacgcttgccacggaagaggcggaaagaatcggtgtggaccatgtggcacgaatgaccgccactggatctggcgagaatagtaccgtggccgagcaccttatcgctcagcactccgctattaagatgcttcactctagagttaagctaatcctcgaatacgttaaagcctctgaagcaggcgaagttccgttcaaccatgagatcctgagagaggcatacgccctttgtcactgccttccagtactgtccaccgacaagtttaaaactgacttttacgatcagtgtaatgatgttggcctgatggcgtacctgggtacaattaccaagacctgcaatacaatgaaccaatttgtcaacaagttcaatgttctctatgatcggcaaggcattggccgacggatgagaggactgttcttttag

SEQ ID NO: 25423 - DNA, 780 bp, synthetic construct
  source 1..780: mol_type = other DNA; note = Synthetic coding sequence
tgattcaccgcccaggcccccagcggccggggcgccgccgtgggctcaggtacacgactcgcaagtctgcggttgctcactgaattagaaagtccagcttggtggcctttctccagcaagttatggaaaaccccccccgaaaccaagcctcgggaagacgttagtatgacctcctgtgagccctttggtaaagagggcatcctgatcaagattcctgctgtgatctcccatcggaccgaaagccatgtgaagcctggacggcttactgttcttgtgtcgggactggaaatacatgactccagtagcctgcttatgcacaggtttgaaagggaggatgtcgacgatataaaagtacatagcccgtacgagatctctatacgacagagattcattggaaaacctgatatggcctacagactaatatccgctaagatgccagaagttattcccatcctagaggtgcaatttagcaaaaagatggaactcttggaggatgccctcgtgctgcgctccgcccgcactagcagtcccgctgagaagagctgtagcgtgtggcacgctgcgtccggactgatggggcgcaccttgcatcgggaacctccggcgggcgaccaggaagggacagccttgcacctgcaaacgtccttaccggctttgtctgaggctgatacgcaggaactgactcagggattccgccccatgtctctcagcacccaaaccgttttggttatgctgtgcagcgagtccgccggcgcactgtggagacagcggctcagctag

SEQ ID NO: 25424 - DNA, 1038 bp, synthetic construct
  source 1..1038: mol_type = other DNA; note = Synthetic coding sequence
atggccgccgccgagcccgccagcagcggccagcaggcccccgccggacagggacaggggcagaggcccccacctcagccccctcaggctcaagccccgcaacctcctccacctcctcagctgggcggcgccgggggtgggtcctcacgccacgagaaaagtctcggtctgctgactactaaatttgtgtctcttctgcaggaagccaaggatggagttcttgacctgaaggccgctgccgatacgctggccgtcaggcagaagaggcgaatctatgatattaccaatgttctcgaaggtatcgaccttatcgagaagaaatctaaaaatagcatccagtggaaaggagttggggcagggtgcaacactaaagaagtgatcgatcgcctgcgttatttgaaagcagagattgaggacctagagttaaaagagagggagctggaccagcagaagctttggctccagcagtccattaaaaatgtcatggacgacagcataaataaccgcttcagctatgtgacccacgaagatatttgcaattgcttcaacggggatacattacttgctatccaggcaccatccggcacacaacttgaggtgccgatcccagaaatgggtcagaacggccagaagaaataccagatcaaccttaaatctcactccggcccaatccacgtgctgctcataaataaagaatcctcatctagcaagccagtggtgtttccagtgccaccacccgatgatttgacccagccgagttcacagagcctcacccccgtaacccctcagaaatcaagcatggctacccaaaatctgcctgagcagcacgtctccgaaagaagccaggcgttacagcagacttctgctaccgacatttcctccgggtccatctcaggtgacattattgacgaactcatgtcttctgatgtttttcctcttctgcgcctgtcccctacaccagccgacgattataatttcaacctcgatgataatgagggcgtttgtgacctcttcgacgtgcagatattaaattactag

SEQ ID NO: 25425 - DNA, 96 bp, synthetic construct
  source 1..96: mol_type = other DNA; note = Synthetic coding sequence
atgaccgtgccctggcggcccggcaagcggcggatcacctacaaggaagaggaagatcttacgctgcagcctcggtcatgtctccagtgtagctag

SEQ ID NO: 25426 - DNA, 489 bp, synthetic construct
  source 1..489: mol_type = other DNA; note = Synthetic coding sequence
atgaacaaccagaagcagcagaagcccaccctgagcggccagcggttcaaaaccagaaaacgagacgagaaagaaagatttgatccaacccagtttcaggattgtattattcagggcttgacagaaaccggcacagatctggaggcggtggcgaaatttctcgacgcaagcggggctaagctggattacagaaggtacgccgaaactttgtttgacattttagtagccggaggaatgctggcaccggggggcaccctggccgacgacatgatgaggaccgacgtttgcgtgttcgccgcacaggaggacctggagacaatgcaagcgttcgcccaagtctttaacaagctgattaggcggtacaaatacctcgaaaagggcttcgaggacgaggtgaagaagctccttctcttcttgaagggattttccgagagtgagcgcaataaactagctatgctgactggagttctgctggctaatggcacatag

SEQ ID NO: 25427 - DNA, 270 bp, synthetic construct
  source 1..270: mol_type = other DNA; note = Synthetic coding sequence
atggccgccgccaccggcgaccccggcctgagcaagctgcagttcgcacccttttccagcgcactggacgtggggttctggcatgagttgacccagaagaagctaaatgagtatcggctggacgaggcccctaaagacattaagggatactactataacggcgacagtgcaggcttacctgcccgcctgacactggagtttagcgcatttgatatgtccgctccaacacccgcccgctgttgtcccgctatcggaaccctgtataactag

SEQ ID NO: 25428 - DNA, 2025 bp, synthetic construct
  source 1..2025: mol_type = other DNA; note = Synthetic coding sequence
atgcagaccagcagcagccggagcgtgcacctgagcgagtggcagaagaattacttcgccattacatctggcatctgcactgggccaaaagcagacgcctatcgagcacaaatcttacggatacaatacgcttgggccaattccgagatctcccaagtctgtgctacaaaactcttcaaaaaatatgctgagaaatattccgctataatcgattctgacaacgtagagtccggtctcaataactatgccgagaatattctcacactagcaggttcacagcaaacagatagtgacaaatggcaatccggtctgagcatcaacaacgtgttcaaaatgtcttccgttcagaagatgatgcaagctggcaagaagtttaaggatagcctgttggagcccgccctagcgagcgttgtgatccacaaggaggcgaccgtctttgatctccctaagttcagtgtgtgtgggtccagtcaagaaagtgattcactccctaacagcgcacacgatcgggatcgaacacaggactttccagagtccaaccgtttaaagctgctgcaaaatgcacaacctcctatggttaccaataccgcccgcacctgtcctacattctctgctcctgtcggggagagcgccactgctaagtttcacgtcacgccactcttcggaaacgtcaaaaaagagaaccacagtagtgccaaagaaaacataggtctcaacgtgtttctttcgaaccagtcctgtttcccagcagcctgtgagaatccacaacgaaaatccttctatggcagtggtactattgatgccctgtctaatccaatcctgaataaggcttgttcaaagaccgaggataacggacctaaggaagatagctccttgcctacgtttaagactgccaaggaacagctttgggtggaccagcagaaaaaatatcaccaaccccagcgcgcctccggatcgtcatatggcggcgtcaagaaatccttgggcgcaagccggtcacgtggaatcctggggaagtttgttcctcccattcctaaacaggatggcggagaacaaaatggtgggatgcaatgtaagccttatggcgcaggccccacagagcctgctcaccccgtcgatgagcggctgaaaaacctcgagcccaagatgatagagttgataatgaacgagatcatggaccatgggcctccggtgaactgggaagacattgccggggtggagtttgcaaaagccacaatcaaagagatcgtcgtctggcccatgcttagacctgacattttcaccggcctacgggggccccccaaaggcatcctgctgtttggtccacccgggactggcaagacattgattggcaagtgtattgcctctcagtctggcgctacctttttcagcatctccgcctcgtctttaacttctaaatgggtgggggaaggggaaaagatggtccgcgccttgttcgccgtggctcgatgccagcagccagccgtgatattcattgacgagatcgatagcctgctcagtcagcgaggcgatggtgaacacgagagctcacgaaggattaagacagagttcctagtacagttggacggggccactacaagttccgaggaccggatccttgtggttggggctacaaacagacctcaggagatcgacgaggccgccagacgacgcctcgttaaacgcttgtacatacctctacctgaagcatctgcaagaaagcagatagtcatcaacctgatgtccaaagagcagtgctgtctcagcgaagaggagattgagcagatcgtccagcagtcagatgcgttctccggcgccgatatgacacagctgtgtcgcgaagcaagcctgggcccaatcagatcccttcagacagcggacattgctacgattaccccggaccaggtcaggcccatcgcttatatcgactttgagaatgcttttcgcactgtgaggccctctgtctcgcccaaggatttggaattatatgaaaactggaataagacgttcggttgtggcaagtag

SEQ ID NO: 25429 - DNA, 1923 bp, synthetic construct
  source 1..1923: mol_type = other DNA; note = Synthetic coding sequence
atggagaaccagctggccaagagcaccgaggagcggaccttccagtatcaagactccttgccgtctctgcccgtccctagtctggaggagtctctgaagaagtatctggagtcagtgacaaggacatgctatcaaatccgaggactagatccagacgccaagcggggctttttggatttgacacgagagggtattcaggtcaagccttttgcaaaccaagaagaatataaaaagacagaggagatagtgcaaaaattccagtcgggcattggtgagaagctgcatcagaagctgctcgaacgcgcaaagggcaagaggaactggctggaggagtggtggttaaatgtagcttatttagacgtgaggataccatcacaactgaacgtaaacttcgcagggccagcagcccacttcgaacactattggccacccaaagagggaacccaactggaaagaggctctatcaccttatggcataatctcaattactggcaactgctgcgcaaggaaaaagtgccagtccacaaagttggtaatactcctctcgacatgaaccagtttagaatgttattctccacctgcaaagttcctggtattacgagggactcaataatgaactacttccgtaccgagagcgaaggacggagccccaatcacatagttgttctctgccgcggccgggcattcgtcttcgacgtcattcatgaggggtgtctggtgaccccccctgaactgctccgtcaattgacttacatccacaagaaatgccactctgaacctgacgggcccggaatagctgctctgaccagtgaagaacggaccagatgggctaaggctcgcgagtaccttattggactcgaccctgaaaacctggcactactcgaaaagatacagtcttccttactggtctacagtatggaggattctagccctcatgtgacccccgaggactacagtgagattatagcagcgattctgataggcgaccctaccgtaagatggggcgacaaatcatacaatctgatcagcttttcaaatggggtttttggctgcaattgcgaccatgcaccttttgacgccatgatcatggtgaatatctcttattacgtggacgagaagatttttcaaaacgaggggcggtggaaaggcagtgaaaaagttcgcgatattccattgcctgaggagctgattttcattgtggatgaaaaggtgctgaatgacatcaaccaagcaaaagcccaatacctgcgcgaggcctctgatctgcaaatcgccgcttatgctttcacatcatttgggaaaaagctcacgaagaacaagatgctgcacccggatacattcattcagctcgctcttcagctggcctattacagattacatgggcacccaggctgctgttacgaaaccgctatgacgcgccatttctaccatggccgcacagagaccatgcggtcatgtaccgtggaggcagtgagatggtgtcagagtatgcaggatccctcagtcaacctgagagaaaggcagcaaaaaatgttacaggctttcgcaaaacacaataaaatgatgaaagattgtagcgccggaaaaggattcgacagacatctgctgggactcttgctaattgcaaaggaggagggacttcccgttcctgaactatttaccgatcccctttttagtaagtccggtggaggtgggaattttgttcttagcactagcctggtaggatatcttcgggtgcagggcgtcgtggtgccgatggtgcacaacgggtacggcttcttctatcacataagagatgatcggtttgttgtggcgtgttccgcgtggaaatcttgcccggagactgatgctgagaagcttgtccagctgacgttttgtgcctttcatgatatgatccaattaatgaatagcacacacctctag

SEQ ID NO: 25430 - DNA, 474 bp, synthetic construct
  source 1..474: mol_type = other DNA; note = Synthetic coding sequence
atggccaccagcgcccccctgcggagcctggaggaggaggtgacctgttcaatatgcttggactatctgagggatcctgtcacgattgattgcgggcatgtgttctgcagatcatgtactacagacgtgcggcctatttccgggtcgagacctgtttgccctctgtgtaaaaaacccttcaaaaaggaaaatatcaggcccgtttggcagctggctagcctggtcgaaaacattgagcgactgaaggttgacaaggggaggcagcccggcgaggtcacaagagaacagcaggatgctaaactgtgcgaaaggcaccgcgaaaagttacattattactgcgaagatgacggtaagctcttgtgtgtcatgtgcagagagtcaagagaacatagaccgcataccgcagtgttgatggaaaaggcagctcagcctcatagagaaaagatcttgaatcacctgtccaccctgcggtag

SEQ ID NO: 25431 - DNA, 432 bp, synthetic construct
  source 1..432: mol_type = other DNA; note = Synthetic coding sequence
tgaacccggcacttcaaggagagcatcaagttcatccacgagtgcaggctgcgaggcgaaagctgccttgtccactgcctggctggagttagtcgatctgtgacattggtgatcgcctatatcatgacagtaactgatttcggatgggaggatgccctccacactgttagagccggacgttcttgcgcaaaccctaacgtggggtttcagcgccaactgcaggagttcgaaaagcatgaggttcatcagtaccgtcagtggctgaaagaagagtacggcgagtcgccgcttcaggatgcagaggaagccaagaatatcctgggaaaatataaggaacagggccggaccgagccccagcccggcgccagacgttggtcctcattcccagccctggcaccgctgacctacgataattatacaacggagacctag

SEQ ID NO: 25432 - DNA, 495 bp, synthetic construct
  source 1..495: mol_type = other DNA; note = Synthetic coding sequence
atggtgaacagcgtgatcttcttcgacatcaccgtggacggcaagccattagggcgcatttccattaaacaattcgcagataagatcccaaagacagcagaaaactttcgggcactctcaactggagagaagggttttagatataaaggatcttgtttccaccgtattattcctggctttatgtgtcagggcggtgactttactcaccccaatgggacgggcgataagagcatatacggtgagaagttcgatgatgagaatctgattaggaagcatacaggttccgggatactctctatggccaatgccggcccaaacactaacggctcacaattcttcatttgcacagcgaagacagaatggctagacgggaagcacgtcgcttttgggaaagtgaaagagcgagtgaatattgttgaagccatggaacactttggttatcgcaatagcaaaacatcgaaaaagattacaattgctgactgcggtcagttttag

SEQ ID NO: 25433 - DNA, 468 bp, synthetic construct
  source 1..468: mol_type = other DNA; note = Synthetic coding sequence
atgagcgagggcgagagccagaccgtgctgagcagcggcagcgacccgaaggtggaatcatccagcagtgcccccggcctcacctccgtgagcccacccgtgacctctacaacaagtgcagcttccccagaggaggaagaggaaagtgaagatgaatcagaaattctggaggagtctccctgcggaaggtggcagaagaggagagaagaggttaatcagaggaacgtccctggaatcgattccgcctacttggccatggatacagaagagggagtagaggtggtatggaacgaggtgcagttttccgaacggaaaaattacaagctgcaggaagagaaagttagagccgtttttgataatttgatccagctcgagcacctgaacatcgtaaaattccacaagtactgggcagacatcaaagagaataaggctcgggtaattttcatcaccgagtatatgagttcatag

SEQ ID NO: 25434 - DNA, 837 bp, synthetic construct
  source 1..837: mol_type = other DNA; note = Synthetic coding sequence
atgtggcccttccccagccggagcctgttccccccccccacccaggcttggctgcaaactgtcagttctgaccctgaagctcagggatggggagcgtggaacgaaactaaagaaatactgggcccagaagggggcgagggtaaggaagaaaaggaggaagaagaagatgccgaggaggatcaagatggagacgctgggttcttactatcattgctcgagcaggagaacctggcagaatgtcccctccctgaccaggagctggaggctatcaagatgaaagtgtgtgcgatggagcaagccgagggcaccccccgcccaccgggtgtgcaacaacaggccgaagaagaagaaggtactgctgctggccaattactctctccagaaaccgtgggttgcccactttcgggcacgcccgaggaaaaggtggaagccgatcaccggtccgtgtacgtaggaaatgtcgattatggaggatctgcggaggaattagaagctcactttagccgctgtggcgaagtgcatagggtaaccatcctgtgcgacaagttctccgggcatccgaaggggtatgcctacatcgaatttgcaaccaagggctctgtccaggctgccgtcgagctggaccagtccctgttccgaggacgcgttattaaggtcctaccgaaaagaacaaattttccaggcattagctctaccgatcgtggaggactgagaggacatcccgggtccaggggcgcgcccttcccacattcagggctgcagggaaggccgcggctgaggccccagggacaaaatcgggcaagggggaaattctccccttggttttcaccatactag

SEQ ID NO: 25435 - DNA, 132 bp, synthetic construct
  source 1..132: mol_type = other DNA; note = Synthetic coding sequence
atgagcgagcagggcgacctgaaccaggccatcgccgaggagggcggcaccgagcaagaaacagcaacccccgaaaacggaatagtcaagtccgaatctctggacgaggaggaaaagctggagctgcagtag

SEQ ID NO: 25436 - DNA, 390 bp, synthetic construct
  source 1..390: mol_type = other DNA; note = Synthetic coding sequence
atggccgacgaggagctggaggccctgcggcggcagcggctggccgagttgcaagcaaaacatggcgaccccggggacgctgcccagcaggaagcaaaacacagggaggcggagatgcggaacagcattcttgctcaggtcctggaccagagcgcccgcgcgcgactgagtaaccttgcccttgttaaacccgagaagaccaaagccgtagagaattatttgatacagatggcgcgctatggccagctgtccgagaaggtttcacttgattcgttggaagaactctactgctatttgctctatcaaaatatggcttccaagggacagctgcacctgcactggattaccgagttcctgctgaccctgagaagaaactgttggcgggaatag

SEQ ID NO: 25437 - DNA, 2286 bp, synthetic construct
  source 1..2286: mol_type = other DNA; note = Synthetic coding sequence
atgcggaagcaggaggtgcggaccggccgggaggccggccagggccacgggaccggctcccccgccgagcaggtgaaggcactgatggacctgttagctggaaagggctcccaggggtcgcaagcaccacaggcccttgaccgtactcctgacgctccactgggaccttgctccaacgattcccgcatacagaggcataggaaagcccttcttagcaaggtgggggggggcccagaactggggggcccttggcacaggctggcaagcttgctattggtggaagggctgaccgatttacaattacgggaacacgatttcacgcaggtagaagcgactaggggaggaggccatcctgcacggactgtcgctctcgacaggctatttctgccgctgtctcgtgtgagtgtcccaccacgtgtgtctattacaattggggttgcagggatgggtaagaccacccttgtacgccatttcgtcagattgtgggcgcatgggcaagtagggaaggatttcagcctggtgctccccttaaccttcagggacctcaacacccacgagaagctttgcgccgaccgattaatctgttcagtattcccccatgttggagagcccagcctggccgtggctgtgccagccagggctctgctcatcctggacggtctagatgaatgcaggaccccacttgatttcagtaataccgtcgcatgtacagaccctaagaaagaaattccagttgatcacctaattacaaatatcattcggggtaatctgtttcctgaggtgtctatttggatcacctcccgtcccagcgcctccggacagataccaggaggtcttgttgatagaatgaccgaaatcaggggcttcaatgaggaggagatcaaagtgtgtcttgaacagatgtttcctgaagaccaagccttgcttggatggatgctgagtcaggtgcaggcagaccgtgctctgtatttaatgtgtacagtgccagcattttgcaggctcacagggatggccctggggcacctgtggcgcagcagaaccggccctcaagacgccgagctgtggcctccacggaccttgtgcgagttgtattcatggtattttcgaatggcactttccggagagggccaagagaagggaaaagctagcccacgcatcgagcaagtcgcccatggaggcagaaagatggtgggtacgctgggtaggctcgcctttcatggcctcctgaagaaaaaatatgtcttctacgagcaggacatgaaggcctttggggtggatctggctctgcttcagggagctccctgtagctgtttccttcagcgcgaggagacacttgccagctctgtagcctactgtttcacacatctgagcctccaggagttcgtggccgcagcttattattatggagcttcacggcgggccattttcgacctgtttacggagagcggtgtgagctggccgcgccttggctttcttactcattttcgcagcgccgctcagagggctatgcaagccgaggacggaagactggatgtatttttgcgcttcctgagcggtctgcttagtccaagggtgaatgcattgctggcaggatccctcctggcccagggcgagcaccaagcgtaccgaacgcaggtggccgagctgttacagggctgcctccggccggatgcggcagtttgtgcccgggcaatcaacgtgttgcactgtctccatgaactgcagcataccgagcttgcccggagcgtagaggaagctatggagtccggcgcgctggcccggctaacaggacctgcccaccgggctgccctggcctacctgctgcaggtgtctgatgcctgtgcacaggaggccaatctttccctgagtctatcgcagggcgtccttcaatcgctacttccacagctgctttattgccgcaagcttcggcttgacacaaatcagttccaagaccctgtcatggagctcctgggaagcgtacttagtggtaaagactgcaggatccagaaaatctcactggccgagaaccaaattagtaacaagggcgccaaagccctggcccgctccttactggtcaataggtccttgacctccctggacttacgtgggaacagcattggaccccagggagcgaaggctctggccgacgcccttaagatcaataggacacttactagcctgagagttaagtttatgtatcacaaaatcgattgtttccgccgcgtgcctgaggctgatgcttgcaaccctagcacgctagggggccagggaagatggatcacttag

SEQ ID NO: 25438 - DNA, 474 bp, synthetic construct
  source 1..474: mol_type = other DNA; note = Synthetic coding sequence
atggccaccagcgcccccctgcggagcctggaggaggaggtgacctgctccatctgtttggattaccttagggaccctgttactattgattgcgggcatgttttttgtcggagctgtacaaccgatgtccgccctatttccgggtcacggcctgtttgccctctctgtaagaagccctttaaaaaggagaacattcggcctgtgtggcagctggcttccttagtggagaacattgagagattgaaagtggacaaaggaagacagcccggtgaggttacaagagaacagcaagacgccaagctttgtgaaaggcatcgcgagaagctgcattactactgcgaggatgatggcaagctattgtgcgtgatgtgccgggaatccagagaacaccgtccacacactgccgtcctaatggaaaaggccgcccagccccatagagagaagattctcaatcacctgtctaccttgagatag

SEQ ID NO: 25439 - DNA, 1473 bp, synthetic construct
  source 1..1473: mol_type = other DNA; note = Synthetic coding sequence
atgaccatcggccggatggagaacgtggaggtgttcaccgccgaggggaaagggcgaggtctaaaggccacaaaagaattctgggccgccgatatcatatttgccgaaagagcatatagcgcagtcgtgttcgactctctcgtgaactttgtgtgccacacctgcttcaaacggcaggagaaactgcacagatgcgggcagtgtaagtttgcccactactgcgatagaacctgtcagaaggatgcttggctgaatcacaagaatgagtgttctgcgattaagcgctacggaaaggtgcccaacgaaaacatccggttggcggcacggatcatgtggagagtcgaaagggaagggacagggttaaccgaggggtgtctggtatcagttgatgacctccagaaccatgtggagcattttggggaggaggagcaaaaagatctgcgagtcgatgtcgacaccttccttcagtactggccaccccagagccaacaattctctatgcagtatatcagtcacatctttggcgtgattaactgtaacggatttacccttagcgaccagcgcggtttgcaggccgtgggcgtcgggatctttcccaacttgggcttagtgaatcatgactgctggcccaattgcacggttatctttaacaacgggaaccacgaggcggttaaatctatgttccatacgcagatgcgtattgaactacgtgccctaggcaaaatcagcgaaggtgaggagctaacagtctcgtacatcgacttcttgaatgttagtgaagagaggaagagacagctgaagaagcagtactattttgactgtacctgtgaacattgccaaaagaaactgaaagatgacctgttcttgggtgtgaaggataatcctaaacctagccaagaagtagtgaaggagatgattcagttctccaaagatactttggaaaaaattgataaagccaggtccgaaggcctctatcacgaggtggtgaagctttgtagggagtgtctggagaagcaggaacccgtcttcgccgacactaacatttacatgctgagaatgttgtccatcgtttctgaagtcctcagctacctccaggcatttgaagaagcgtctttctacgcacggcgcatggtagatggctacatgaaattataccacccaaacaatgcccagctgggtatggcagttatgcgcgccgggcttaccaactggcacgcagggaacatcgaggtcggtcatggaatgatttgcaaggcctatgctatcctcctggtgactcacggcccttcacacccaataaccaaggatctggaggcaatgagggttcagaccgaaatggagctgcggatgttcagacagaacgagttcatgtactacaaaatgagggaggccgctttgaacaaccagccgatgcaggtgatggcggagcctagtaatgagccatcaccggcgctcttccacaaaaagcagtag

SEQ ID NO: 25440 - DNA, 1491 bp, synthetic construct
  source 1..1491: mol_type = other DNA; note = Synthetic coding sequence
atgtggggccggttcctggcccccgaggccagcggccgggacagcccagggggagctaggagcttccccgcaggcccagactattcctccgcctggctaccggccaatgagagcctctggcaggcaaccacggtgccttctaatcacaggaacaatcacatcagaaggcacagtatagcttctgatagtggcgacaccgggatcggaacaagctgttccgattctgtagaggaccattccacatcttcaggtacattatctttcaaacctagccagagcctgattactcttcctactgcccacgtgatgccaagtaattccagcgcaagtattagcaagctgagagaatctctcacacccgacggttccaagtggagcacatctcttatgcagacgctgggcaaccattcacgaggcgagcaagactcttcactggacatgaaagacttcaggccccttcgcaaatggagcagcttgtccaagctgactgccccggacaactgcgggcagggaggcacggtgtgtcgcgaggagagccgaaacggcctcgaaaagatcggcaaagctaaagctcttacgagccagcttaggaccatcggaccttcctgcctgcatgacagtatggaaatgcttaggttggaagacaaagagattaataaaaagcgatcctctaccctcgattgtaaatacaagttcgaatcttgttctaaggaggatttcagagccagtagctcaaccctgcgaaggcagccagtggacatgacatattcggcgcttcctgagtccaaacccatcatgactagtagcgaggcttttgaacctcctaagtacttgatgctgggtcagcaggcagtaggcggagtccccatccagccctccgttcgtacccaaatgtggctcacagagcaactgcggactaatcccctggaaggaagaaacaccgaggactcttatagcttggcaccctggcagcagcagcaaattgaagatttccgtcagggatctgaaacacctatgcaggtgctcactggatcatcccgtcagagctactctcctggctaccaggatttttccaagtgggagagcatgttgaagatcaaggaaggcctcctgcggcaaaaagaaattgtaatcgatcggcaaaagcaacagattacccacctgcacgagaggatccgagacaacgagctccgggcccagcatgccatgctgggccattacgtgaactgcgaggactcttatgtggcaagcctgcaaccccagtacgagaacacctctctccagacgcccttctctgaagagagcgtctctcactcacagcaaggggagtttgagcagaagctggcctctaccgaaaaggaagtgctccaactcaacgaatttcttaagcagcggctatcactgttctcagaggagaaaaagaaactggaggagaaagttggtttttctaataaagtagaactcggccaacagcactttctctccatatag

SEQ ID NO: 25441 - DNA, 1083 bp, synthetic construct
  source 1..1083: mol_type = other DNA; note = Synthetic coding sequence
atggccgagctgcagcagctgcaggagttcgagatccccaccggccgggaggccttaaggggcaaccactccgctctcctgcgcgttgccgattactgcgaggacaactatgtgcaagcaacggataaacggaaggccttagaagagactatggctttcaccacacaagccctggcttcagtggcttatcaggtgggcaacttagctggtcacacactgaggatgttggacctacagggggcagctctaaggcaggtggaagctcggatggtgaatatgcacatggagaaagtggcccgaagagaaatcggaactctcgcaaccgtgcagcgcttgccacctgggcaaaaagtgatcgcccctgaaaacctgcctcctttaactccatattgccgacgccccttgaatttcgggtgtctggatgatattggccacggaataaaggacctgtccacgcagctcagccgcacaggcacactaagcagaaagagcatcaaggcccccgccactccagcttcagccacactgggccgccccccacgcataccagagcccgtccacctgcctgttgtccctgacggtcgcctttccgcagctagctccgcattcagcctcgcctctgccggaagcgcagagggggtaggtggagcccctactcctaagggacaagccgctcctcctgcccccccccttcctagctcactcgatccacccccacccccagctgcagtcgaagtgtttcagcggccacctacccttgaagaactatcccctcctccccctgatgaggagttgcccctgcctctggatctgccgccgccccctccccttgatggggatgaactcgggttgcctcctccaccgcccgggttcggacccgatgaaccctcctgggtccctgcttcctacttagaaaaggtggtaacgctgtatccctatacgtcccagaaagataacgagctgtccttctccgagggcacagttatttgcgtgactcgtcggtacagcgatggatggtgcgagggcgtatcatctgagggaactggcttctttccaggaaattatgtcgagccatcctgttag

SEQ ID NO: 25442 - DNA, 201 bp, synthetic construct
  source 1..201: mol_type = other DNA; note = Synthetic coding sequence
atgctgcggtgcggccagatgatcttcgcccaggccctggtgtgccgacacctggggcgcgactggaggtggacgcagcgaaaacgacagcctgattcttatttctcggtattgaatgcttttatagatagaaaagactcctattatagcatacatcagatcgcccaaatgggagtgggtgaaggtaagagtatcggctag

SEQ ID NO: 25443 - DNA, 1476 bp, synthetic construct
  source 1..1476: mol_type = other DNA; note = Synthetic coding sequence
atggagcagccccccgcccccaagagcaagctgaagaagctgagcgaggatagcctgacaaaacagcccgaagaagtgttcgacgttctcgaaaaactgggagagggaagttatggatctgtgttcaaggctatccacaaggagtctgggcaagtcgtagcaatcaagcaggtccccgtggaatctgatctgcaggaaataatcaaggaaattagtataatgcagcaatgcgacagcccctatgttgtgaagtactacggatcctacttcaagaatactgatctgtggattgtaatggaatactgcggcgcgggatccgtgtccgacatcattagactgcgcaataagactttaatcgaagacgagattgcgactatcctgaagagcaccctgaaggggttggagtacttgcatttcatgaggaaaatccacagggacatcaaagcgggcaatattctactgaacactgagggtcacgctaagctcgcggattttggagtggccggtcaactgacggataccatggcaaagcgaaataccgttatcgggacccctttctggatggcacctgaggttatccaagaaatcggctacaattgtgttgccgatatttggagcctgggaattacctccattgagatggcggagggcaaacctccttacgctgatattcatcctatgcgcgctatctttatgataccaaccaatccaccgccaacctttcgtaagcctgaactatggtctgatgattttacagactttgtgaaaaagtgtctggtcaaaaaccctgaacagcgggcgactgcaactcagcttcttcagcatcctttcatcaagaacgccaagcctgtctccatcctgcgcgacctcataaccgaagccatggaaataaaagctaaaaggcatgaagagcaacagagggaactggaggaagaagaggaaaatagtgatgaagacgagctcgattcccatactatggtgaagacatccgtggaatctgtcgggactatgcgagccacgtcaaccatgtctgaaggggctcaaacgatgattgagcataatagtactatgctcgagtcagatctaggcactatggtgatcaattccgaggacgaagaagaggaagacggcactatgaaacgcaatgcaacctccccccaagtccagcgtcccagtttcatggactatttcgacaaacaagactttaagaacaagtcccatgaaaactgcaatcaaaacatgcacgaaccctttccaatgtctaagaacgtgttcccagacaattggaaggtcccccaggatggtgacttcgactttctgaaaaatttaagcctcgaagagcttcaaatgcgtctgaaggcactggacccaatgatggaacgggaaatcgaggagctgagacaaagatatactgccaagcgacaacctattttagacgccatggacgcgaaaaaacggcgtcaacagaacttttag

SEQ ID NO: 25444 - DNA, 126 bp, synthetic construct
  source 1..126: mol_type = other DNA; note = Synthetic coding sequence
atgagcagcaagggcagcagcaccgacggccggaccgacctggccaacggcagtctaagttcttcaccggaggagatgtcaggcgctgaggaaggtagggagacatcgtctgggatcgaggtgtag

SEQ ID NO: 25445 - DNA, 945 bp, synthetic construct
  source 1..945: mol_type = other DNA; note = Synthetic coding sequence
atgcccaacgtggccgagaccgagcggagcaacgacagcggcaacggggagcataagagcgaacggaagtctcctgaagagaacctgcagggcgccgtgaagtctttctgcacgtcagcctcaggtgcccctctcggtcccaagggggatggacactacccatggtcctgtcctgtgactcacactcgtgagaagatctatgccatctgctcggactatgcctttctaaatcaggcaacttccatatataagacaccaaacccctctagatcaccctgtctccctgacagtacgtccctgagcgccggaaataatagtagcaggtacatagggatccccacatcaacgtcagagattatctataacgaggagaactccctcgaaaatctgtcgaactcccttggaaagctgccacttgcctgggaaatcgacaaatctgagtttgacggagttacaacgaactctaaacataaaagcggtaatgccaaaaagcaggtcagcaagcgcaaaacttccgacaagaaaggccgctatcagaaggagtgtccccagcattctccacttgaagatattaaacagcggaaagtcctggacctccggagatggtattgtatcagtcgtcctcagtacaagacatcttgtgggattagcagcctcatctcatgctggaactttctgtattccactatgggcgcgggtaacctgccgccgataacccaagaggaggccttgcatattctgggctttcaacctccctttgaggacatccggtttggacctttcactggcaacactactttgatgaggtggtttagacagataaacgatcactttcacgtaaagggctgctcttacgtgctttataagccccacgggaaaaacaaaaccgctggggaaaccgctggtgacctgtctcatcaccggaagcttaacatagggtcatag

SEQ ID NO: 25446 - DNA, 1500 bp, synthetic construct
  source 1..1500: mol_type = other DNA; note = Synthetic coding sequence
atgcccgagatccgggtgacccccctgggcgccggccaggacgtgggcaggtcatgcatactggtgagtattgccgggaagaatgtgatgctcgattgtggcatgcacatgggattcaatgacgacgtggatgacgagctggaaatcaaagcatactatgccggccacgtgttaggcgccgcaatgttccaaatcaaagtaggctcagagagtgtcgtgtatacaggtgactacaatatgacacccgataggcacctcggagccgcctggattgataagtgtcgaccaaacctactgatcactgaatccacatatgcgaccaccatccgggatagcaagcgctgtcgggagagggacttcctgaagaaagtgcatgagaccgtggaacggggcggaaaagtgctcataccagtcttcgcccttggacgagcccaggaattgtgcattctcctcgaaactttttgggaaaggatgaatctgaaggtaccaatatactttagcacgggtctcaccgaaaaagccaaccactattacaagttgttcatcccatggaccaaccaaaaaattcggaaaaccttcgtgcagagaaacatgttcgagtttaagcacatcaaagcgttcgaccgggcttttgccgacaaccccggaccaatggtagtcttcgccacacccggcatgttgcatgctggccagtctctgcagatttttaggaagtgggcaggaaatgagaagaatatggtaataatgccaggctactgcgtgcagggtacggttggccataaaatcttgtcagggcagagaaaactcgaaatggagggtagacaggtgcttgaggtgaaaatgcaggtggagtatatgtccttctccgcccacgctgatgccaagggcatcatgcagttagttgggcaagctgagcctgagagtgtcttactggtccacggggaggccaagaagatggagttcttaaagcagaaaattgagcaagagctgcgcgtgaattgttatatgcctgcgaatggagaaacagtaactctgcccactagtcccagtatccctgtgggaatctctctaggactgcttaagcgggaaatggctcagggtctgctacccgaggcaaagaagcccaggctcctgcacgggacgcttattatgaaagattccaatttcagactcgtgtccagtgagcaagcactgaaggagcttggcctggccgagcaccagttaaggtttacttgtcgcgtccacctccatgacacccgcaaggaacaggaaaccgcactgcgggtctactcacacctaaagtcggtactgaaggatcactgtgtccagcacctcccagacggctccgtaaccgtcgagagcgttctgctgcaagcagcagcgcccagtgaagaccctggaaccaaggtcttgctggtgtcttggacctatcaggacgaggagctgggatctttcctgacttctctgctcaagaaggggctgccccaggcgccgagctag

SEQ ID NO: 25447 - DNA, 396 bp, synthetic construct
  source 1..396: mol_type = other DNA; note = Synthetic coding sequence
ggcaccatcagctgcagcaccggcaccctgcagcggcggaacctgggcccagagcggcagacaggtctgctgctgttaggtatgaaggagaaccaggagctgaagacgatccaggcaaacctgtcacggcagcgcgtggaacatcagtgcctgtcttcagaagagctcaaacagagattcccaaacatccgcctccctaggggcgaggtaggcctgcttgataattctgggggagtgatttacgcgtacaaagccctgagagcgctccaggatgctatccggcagttgggtggaatcgtgcgggatggcgaaaaagtcgtagagatcaacccaggtttgctggtcaccgtgaagacaaccagccggtcctaccaggcaaaatcactcgtcatctag

SEQ ID NO: 25448 - DNA, 687 bp, synthetic construct
  source 1..687: mol_type = other DNA; note = Synthetic coding sequence
atgagccgggagcggggcagccggagcgaggagcccggcgccggcaacagggaatcggggagccgcgagccaggtctggccgccgcggcaatgtccactgtggacttagccagggtgggcgcgtgcattctgaaacacgcggtgaccggggaggcggttgagctgcggtccctgtggcgggagcatgcctgtgttgttgccgggctgcgtaggtttggttgcgttgtgtgcaggtggatcgcccaggatttaagctctctcgccggcctgcttgatcagcatggagttaggctagttggcgtcggccccgaggcactcggactgcaggagttcctggacggcgactactttgcaggcgagctgtacttggacgaaagtaaacagctgtacaaggaactaggatttaagcggtacaattcactgtcgattttgcctgcagcactgggaaaacccgtgcgcgacgtcgccgctaaggctaaagcggtcgggatccaagggaatctgagtggggacctgttgcagagtggtggcctgctagtcgtgtctaagggaggcgataaagttcttctccatttcgttcagaaatctccgggagactatgtgccaaaggaacatattctccaggttctcgggatttccgctgaggtgtgcgcttccgacccgcctcagtgtgaccgggaagtgtag

SEQ ID NO: 25449 - DNA, 654 bp, synthetic construct
  source 1..654: mol_type = other DNA; note = Synthetic coding sequence
atgaacttcagcgaggtgttcaagctgagcagcctgctgtgcaagttctcccctgatggaaaatacctagcctcttgtgtgcagtatcgtttggtcgtccgagacgttaatacacttcagatactgcaactatacacctgtctggaccagatccagcatattgagtggtccgccgactccctcttcatactatgtgccatgtacaagcgagggcttgtgcaggtgtggagcttggaacaacccgaatggcactgcaagattgatgagggttccgccggcctggtcgcttcctgttggtcacctgatggccgacatatcctgaataccacagagttccacttaaggattacggtctggtccctgtgcacaaagtccgtgagttatataaagtaccccaaggcatgcctgcagggcataacctttacacgggacggccgatatatggcattggccgagcgtcgagattgcaaggactacgtcagcatctttgtgtgtagcgactggcagcttctcaggtacaagattctgctctacagcttggacggtcggctgctgagcacttattccgcttacgaatggtctcttggtataaaatcagttgcatggagcccctcatctcaatttctggcggtgggctcatacgatggtaagtag

SEQ ID NO: 25450 - DNA, 483 bp, synthetic construct
  source 1..483: mol_type = other DNA; note = Synthetic coding sequence
atggaggccgagcggccccaggaggaggaggacggcgagcagggccctccacaggacgaagagggctggccaccgccaaacagtactacccgaccttggcgcagtgcccctccatcaccacctcctccgggcacacggcacacagcgttaggaccccggtcggcctcactgctgtcgcttcagaccgagctccttttggacctggtcgcagaagctcaaagcaggagacttgaagagcagcgcgctacattctacaccccacagaacccctctagtttggcgccggctcctctcaggcctctggaagaccgggaacagctctactcaaccattctttcccatcagtgccaaagaatggaggctcaacgtagcgaaccacccctgccacccggagggcaggaattactggagctcctgttacgcgtccaaggaggcggccgaatggaggaacagcggagtagacctcccactcatacttgctag

SEQ ID NO: 25451 - DNA, 951 bp, synthetic construct
  source 1..951: mol_type = other DNA; note = Synthetic coding sequence
atggaggagaacaacctgcagtgcagcagcgtggtggacggcaactttgaagaagtgcctcgtgagactgccattcagtttaaaccacccctgtacaggcagaggtaccagttcgtgaagaatttggtggatcaacacgaaccgaaaaaggtggctgatctgggctgcggagatacctctctgttgaggctgcttaaggtgaatccatgtatcgagctgctggtcggagtggacataaacgaggataaactccgctggcgcggcgacagcctggccccctttctgggtgacttcctgaaaccaagagatctgaatttgaccatcaccctgtatcacggctctgttgtggagcgagatagcaggcttctggggttcgatctgattacttgtatcgagttgatcgagcatctggacagtggagatctggctcgattcccagaggtggtgttcggctatctgagcccttctatgatcgttatttccactcctaactccgaattcaaccctctgtttccaagtgtcaccttaagagattcagaccataagttcgagtggacgcggatggagttccaaacttgggcactgtatgtggcgaatcgctacgattactcagtggagttcaccggcgtgggcgagccaccagccggagctgaaaacgtgggttactgtacccagattgggattttccgaaaaaacggaggtaaggccaccgaaagttgtttaagcgagcaacacgaccagcatgtgtacaaggctgtattcaccacgtcctatccttcactgcaacaagagagattctttaaactcgttttagtcaacgaagtatcacagcaagttgagtctctgcgagtttcacatctgcccaggcggaaggaacaagcaggcgagcggggtgacaaacccaaagacattggcggatccaaagcccccgtcccttgtttcgggccctag

SEQ ID NO: 25452 - DNA, 1056 bp, synthetic construct
  source 1..1056: mol_type = other DNA; note = Synthetic coding sequence
atgtggaccccccggcccgccctgcacgtgcacgtgatcctgtactctcccatccaccgctgctacgctcgagcagaccctactatgggccgcatctgggtggatgcagccgtgccctgcctcgaagagtgtggttttctgttacacttccgtgatggctgttaccatcttgagacaagtacccaccatttccttagtcatgttgacaggctcttctcccagccatccagtcagaccgcctttcacatgcaagtgcggcccggcggcctcgtcgctctgtgcgacggagagggtggcatgctctacccccagggaacccacttgttactcggtatgggctgcaaccctatgcgtggggaagagtggttcattctacagcactgccccacctgggttagcctccgcagcaagaccggccggttcattagcgtgatttacgatggcgaggtgagggctgcgtctgagaggctgaacaggatgtcgctctttcagtttgaatgtgactccgagagccccaccgtgcagcttaggtccgccaatggatactacctgtcacagcgaagacacagggctgtgatggctgacgggcaccccctagagtctgataccttctttcgcatgcattggaattgcggccgaatcatcttgcagtcttgtaggggaaggttcttaggtattgctcctaattcccttttaatggccaatgtgatcctacctggaccgaacgaggaatttgggatcctttttgcgaatagaagctttttggtgttacgaggccgatacggctacgtcggctcctcctccgggcacgacctgatccagtgcaaccaggaccagcccgaccggattcatcttctgccgtgtcgccctgggatctaccatttccaaggaggtatacttctcgtaaacaatattctgtggcatctaagcccactcggacaggtgtgtccacagctgctgtatagagctagtggtgagcaattgacccactgtacagggccgcaatggctcctccatgcaagcaggccaaaatggcacccggtcggcaggcagtag

SEQ ID NO: 25453 - DNA, 333 bp, synthetic construct
  source 1..333: mol_type = other DNA; note = Synthetic coding sequence
atgcagatcagcagcgagaaggaggaggacgacaacgagaagcggcaggaccccggtgataactgggaggaaggagggggggggggtggggggatggagaagtcaagcggtccctggaacaagaccgcccccgtgcaggctcccccagcccccgttatcgttactgaaactcctgaacctgctatgacatccggcgtgtatcgacctcctggagctcggttaaccaccactcgtaaaactccacagggccctcctgagatatacagcgatactcagttcccctctctgcaaagcacagctaagcacgtagagagccgcaagtacctgaaatag

SEQ ID NO: 25454 - DNA, 972 bp, synthetic construct
  source 1..972: mol_type = other DNA; note = Synthetic coding sequence
atggagggccacgaccccaaggagcccgagcagctgcggaagctgtttattggtggcctgtcattcgagaccacagacgactccctacgtgagcacttcgagaaatggggcactctgaccgactgcgtagttatgcgggaccctcaaaccaaaaggagtcgcggttttggattcgtgacctacagctgcgttgaagaggtggatgctgccatgtgcgccagaccccataaagtggacgggcgggtcgttgagcccaaacgcgcagtcagcagagaggattctgttaaacctggagcccatctgaccgtcaagaagattttcgtgggcggtattaaggaagatacagaggaatataatctcagagactactttgagaaatacggcaaaatagagactatcgaggtgatggaagatagacaatccgggaagaagcgaggattcgccttcgtgacgttcgatgaccatgacaccgtcgacaaaattgtggtgcagaagtaccatactattaatggccacaactgcgaggtgaaaaaagccctgtctaagcaggagatgcagtcggctggctcacagcgtgggcggggggggggatccggcaatttcatgggtaggggtggcaattttggcgggggtggcggcaacttcggcagaggcgggggtaattatgggggcggacctggttacagttcacggggaggctacggaggaggcgggccaggctacggcaaccaggggggcggttacggggggggcgggggttacgacgggtacaacgaaggaggtaattttggagggggcaattacggcggtggcggtaattataatgatttcggaaactacagcggtcagcagcagtctaactacgggcctatgaaagggggatcttttggcgggcgatccagtggatcaccctacgggggaggatacggatctgggggtggatcaggggggtacggctcacgcaggttctag

SEQ ID NO: 25455 - DNA, 291 bp, synthetic construct
  source 1..291: mol_type = other DNA; note = Synthetic coding sequence
aacatccagctggtggccgacggctgctgcaacctgcagaagcagatacagataactcaactcttcggcgtgccagtagttgtagcactaaacgtgtttaagaccgatacaagggcagaaatagaccttgtatgcgagctggctaaaagagctggggcatttgatgctgtgccttgctatcattggtccgttgggggaaaaggcagtgtcgacctagcacgggcggtgcgggaagccgcatccaagcgctcccggttccagtttctttacgacgtgcagcccttcagttag

SEQ ID NO: 25456 - DNA, 483 bp, synthetic construct
  source 1..483: mol_type = other DNA; note = Synthetic coding sequence
atgaccgacgtgcccgccaccttcacccaggccgagtgcaacggcgataaacctccagagaatggccagcagaccatcactaagatttccgaagaactcactgatgtagattctcccttgcctcattacagagttgaaccgagtctggagggcgccctgaccaagggctcccaagaagaacggcggaagcttcagggaaatatgctcttgaactcctccatggaggacaagatgctgaaagagaacccagaagagaagctgttcatcgtacacaaggctatcacggacctgagcctgcaggagacttcagccgacgagatgacttttagggagggccaccaatgggagaagatccccttatctggcagcaatcaggagattcgaaggcaaaaagagcggatcacagaacaacctttgaaggaggaagaagacgaagatcggaagaataaaggtcaccaagctgcagaaatcgagtggctctag

SEQ ID NO: 25457 - DNA, 480 bp, synthetic construct
  source 1..480: mol_type = other DNA; note = Synthetic coding sequence
atggccaccagcgcccccctgcggagcctggaggaggaggtgacctgttcaatctgcctggattatctgcgcgatcccgtgaccattgattgcggccatgttttttgcagatcctgcactactgacgtccgacctatcagcggatctagacctgtctgtcccttatgcaagaaacctttcaagaaggagaatatcagacccgtctggcaattagagaaaattctcaatcacctttcaaccttgcggcgtgaccgcgataagattcagggcttccaggctaagggcgaggccgatattttggccgcgctgaaaaaactgcaagaccaacgacagtatattgttgctgaatttgaacaagggcatcagttcttgcgagaacgcgaagagcacctgcttgagcagctcgccaagcttgaacaggaactaactgagggcagggagaagtttaagagtaggggcgtcggggagttggctcgctag

SEQ ID NO: 25458 - DNA, 432 bp, synthetic construct
  source 1..432: mol_type = other DNA; note = Synthetic coding sequence
atggacagcagccagcagaagaccttccggggccacgacgcccccgtgttgagcttatcctttgatcccaaggatatcttcttagcgagcgccagttgcgatgggtctgtgcgcgtttggcagatatccgaccagacatgtgcgatcagctggcccctgttgcaaaagtgcaatgatgttattaacgcaaagtctatctgccgcctcgcctggcagccaaagtccggtaagttgctagccatacctgtcgagaagtctgtcaagctgtaccgccgcgagagttggtctcaccagttcgatctgtctgacaacttcattagccaaacgctgaacatagtgacatggagtccatgtggacagtacctggcagctggctctattaatgggctgattatcgtgtggaacgtcgagactaaagattgcatggagtag

SEQ ID NO: 25459 - DNA, 2109 bp, synthetic construct
  source 1..2109: mol_type = other DNA; note = Synthetic coding sequence
atgaccgagcggtgcagcctgtggagcgccctgagcgccgccgcctgctgcttctatcgcgggtctttcgtccaggttcagttttcaaaggagaaatacatcctggattcctcacctgaaaaattacataaggagctcgaggaagagcttaaactgagcagcacggatttgcgttcccatgcctggtatcatggtcgaattcctcgagaagtgagcgaaaccttggttcaaagaaatggggattttctgattcgggatagtctgacctccttaggtgattacgtgcttacctgccgctggagaaaccaggcacttcattttaaaatcaacaaagttgttgtgaaggcaggggagtcttacactcacatccagtatcttttcgagcaggagagtttcgaccacgtgcctgccctcgttcgctatcatgtggggtcccggaaggccgtgtccgaacagtccggggctattatatattgtccagttaataggacatttcctctccgataccttgaagctagctacggccttggccagggcagcagcaaaccagcctccccggtctcacctagcggacctaagggctcacatatgaagcgacgctctgttactatgaccgacggactgacagcagataaggtaacccgcagtgatggctgccccacctcgacaagccttccaagaccacgcgactccatcaggagctgcgcactctctatggaccaaatccctgacctgcactctccgatgtcacctatttccgaatcgccttctagcccggcctattctactgtcaccagagtgcacgcagctccagccgcgccaagtgctaccgctcttccagcgtccccagtagccaggcggagttctgagccccagctgtgccccgggtcagccccgaaaactcatggcgagtccgacaagggcccgcatacgagcccaagtcatacactaggcaaagctagtccaagcccgtcactctctagctactccgacccagattccgggcattattgtcagctgcagccacctgtaagaggatcacgggagtgggccgcaaccgagacaagctcccaacaggcgagatcctatggcgagcgcctgaaagaactttctgaaaacggcgcacctgaaggagactggggcaagaccttcaccgtcccaattgtagaagtcaccagctcgtttaatcctgccacatttcagtccctcttgattcctcgcgacaatagacctctcgaggtaggactgttgcggaaggtgaaggaactgctcgcggaggtcgatgctcgcaccttggctcgccatgtcaccaaggtagactgcctggtggcccggattctcggagtgaccaaggaaatgcagacactcatgggtgtgaggtggggtatggagttactgacgcttccccacggccgtcagctgaggctggacctcctcgagcggttccatacaatgtccattatgttagctgttgatatcctaggctgcacaggttcggccgaggagagggcagcactgctgcataaaaccatccagctcgcggcagagctgagaggcactatgggcaatatgttttcgttcgctgccgtgatgggagccttggatatggcgcaaataagcaggcttgagcagacatgggtgactctccgacaacgacacaccgagggagcaatactctacgaaaaaaagctgaagccattcctaaagagtttgaacgaaggcaaggagggaccaccgctgtccaacacaacgtttccacatgtgctgccactgattactctgttggagtgtgactcggccccacccgagggacctgagccctggggttccaccgagcacggtgtcgaagtcgtgttggcacacttagaagccgcccgcaccgtggctcaccacggcggcctatatcataccaacgctgaagtgaagcttcagggcttccaagcccgtcctgaactcttagaggtgttttccaccgagttccaaatgcgactgttgtggggaagccaaggtgcatcgagttctcaagctcggcgctatgagaaattcgataaggttctgaccgctctgtctcacaaactagagccagccgtcagatcatcagagctttag

SEQ ID NO: 25460 - DNA, 585 bp, synthetic construct
  source 1..585: mol_type = other DNA; note = Synthetic coding sequence
atgaccgaggacagccagcggaacttccggagcgtgtactacgagaaggtgggattccgaggtgtagaagagaaaaagagcctggaaatcctccttaaggatgatcgtctgggcatcctcccacctcaccacgaatcccacgctaaagtgatgatgtatcgtaaggaacagtatcttgatgtcttacatgctctgaaggtcgtcagatttgtttccgacgccaccccacaggccgaagtctacctgcgtatgtaccaactcgagtctgggaaactccctcgctccccttccttcccccttgagccagacgacgaagttttcctggcaattgccaaggccatggaagagatggtcgaagatagcgtcgattgctactggattaccagacgattcgtgaatcagctcaacactaagtaccgggactctcttcctcagctgcctaaggcctttgagcagtaccttaacctggaggacgggagactcttaacacatctgaggatgtgttcagccgccccaaagcttccatacgatctttggttcaagcgatgcttcgctggatgtttaccagaatcatcactgcagtag

SEQ ID NO: 25461 - DNA, 2334 bp, synthetic construct
  source 1..2334: mol_type = other DNA; note = Synthetic coding sequence
atggagcccaaggaggccaccggcaaggagaacatggtgaccaagaagaagaacctggcgtttctcagaagcagactatatatgctggaacgccgcaagactgacactgtggtcgaaagtagcgtgtcgggtgaccacagcgggaccctgcggcgctcacagtcagacaggactgagtataaccaaaaactccaggagaagatgacaccacaaggcgaatgtagcgtggcagaaacacttacgcctgaggaagagcatcatatgaaaagaatgatggccaagcgggaaaaaatcataaaggaactgattcaaactgagaaagattacctcaatgatcttgagctgtgtgtcagagaggtagtacaaccactccgaaataaaaaaacggatcgcctagacgttgacagcttgttctccaatattgagagcgttcaccagatcagtgctaagctgctgagtctgctggaggaagccactactgatgtagaacctgccatgcaagtcatcggggaggtgtttttgcaaattaagggacctctcgaggacatctataagatttactgctaccaccatgacgaagcgcatagcattctcgaatcatatgaaaaggaagaagagctcaaggaacatctgtcccactgtattcaatctctcaagaagatctatatgcaggaaggaaagccaaacctcctcgatatgggttccttaatgataaaaccaatccagagggtgatgaaatacccactgctgctttgcgaattgaggaattcaacccctcctagccatcccgattaccgggctctggatgacgctttcgccgccgtcaaagacattaatgttaatatcaacgaactcaaaaggagaaaggatctggtcttgaagtataaaaagaacgacgaggacgagagccttaaggataagctgtctaaactgaatatccactccatctcaaagaagtcaaaacgcgttactaaccacctaaaaatactgacacgaggggaatcacaggtcaaagacaacacgtttaacagagaggagaaactgttcagagccctagagaaaacggtccgcctttgcgtcaagaacatctcactctgtttacagcacattcaggatgccatgcctttggcactacaatctgtgatggatcttcaagagatatcttacaacaaagatgatgagatggactactcggaaactctgagcaacgctctgaactcatgccatgacttcgcctctcatctgcagagattaattctgacgcccctgagcgccttgctttcgttgttccctggccctcacaagctgatccagaaacgctatgacaaactgttggactgcaattcttacctccaaagatccaccggggaggaaagcgacctggccaagaaggaatatgaagctctgaacgcccaattggtggaagaactgcaagccttcaaccaggctgcacgtaaaatcctgctcaattgcctgtgcagttttataactctgctacgcgatctgatgctcgtcgcgcagcaggcctactccacactggtcccaatgcccctgctagtgtcttcgatctctgagatccaaaatcaagtgcttgaggaaatccagaatcttaattgtgtgaaggagaacagcgccacctttattgagcgcaaattgtcgttcgagaaaaagaagcccgtccagatccttccagaaatgccacaccagactgatatccatcgctcaaagttgttatccacgtattcagctgaggagctgtaccaggctaaaagaaaatgcaacgctacgcaggagtacgatattaatttactggaaggcgatctcgtggcagttatcgagcaaaaggaccctttaggttccacaagtcggtggctggtagatacaggaaacgtgaaagggtacgtatattccagcttcttgaaaccgtataatcccgccaaaatgcaaaaggtcgacgcagagaacaggttctgtgacgacgattttgagaatatcagcctgtttgtaagttccaggcctgccagcgattccgttaccggaactagtgaatcaagtataggggattctagttcctcgctttcagggacctgtggcaagttcgagactaacggaaccgacgttgacagcttccaggaggtagacgaacagatcttctatgcagtgcacgcatttcaagctagaagcgatcacgagctgagcttacaggagtatcagagggtgcatatcctgcgcttttgtgatctctctggcaataaggagtggtggcttgctgaggctcagggacaaaagggctacgtgccggcaaactacttgggcaagatgacctatgcttag

SEQ ID NO: 25462 - DNA, 543 bp, synthetic construct
  source 1..543: mol_type = other DNA; note = Synthetic coding sequence
tgaagccagcccaagagcttcgagaacagccccggcgacctgggcaattcctctctgccaacagccggatataagagggcacaaacttctggcatagaggaggagaccgttaaagagaagaagaggaagggcaataagcaaagcaagcatgggccaggaagaccaaaagggaacaagaatcaagagaatgtctcacacttatccgtgagttctgcttccccgacgagctcggtagcttccgctgccggcagtatcactagctcgagcctgcagaaaagccccaccttgctcaggaacggcagtcttcagtcactcagcgtgggctcatctcctgtcgggtcagagatctccatgcagtaccgtcacgacggagcctgtcctactacatcaatctataattccaatgacgtggccgtgtcgtttcccaatgtggtgagtggttctggcagctcaactccagtgtccagctctcatctgccacagcagtcatcgggtcacctgcagcaagtgggggcattatcaccaagcgctgtctcatcctag

SEQ ID NO: 25463 - DNA, 384 bp, synthetic construct
  source 1..384: mol_type = other DNA; note = Synthetic coding sequence
atgaccaccaagaacctggagaccaaggtgaccgtgaccagcagccctattcgcggcgccggtgacggaatggaaaccgaggagcctcctaagtccgtcgaggttaccagtggcgtacaaagtcgcaaacaccattctctgcagagcccttggaaaaaagccgtgccatcggagtccccgggcgtcctgcagcttgggaaaatgctgactgaaaaggctatggaggtgaaagcagtgaggattttagttcctaaagccgccatcacacacgacattcctaacaagaacactaaggtgaaaagtttgggacatcacaagggagaatttctgggccagtcagaaggggtgatcgaaccgaataaagaactgagcgaggtgaagtag

SEQ ID NO: 25464 - DNA, 1683 bp, synthetic construct
  source 1..1683: mol_type = other DNA; note = Synthetic coding sequence
atgagcgagcacagccggaacagcgaccaggaggagctgctggacgaggagatcaacgaggatgagatccttgcaaacctatctgcagaggagctgaaagagctgcagagtgaaatggaggtgatggcgcctgatccttccctacccgtgggaatgatccagaaggaccagaccgacaaacctccgacaggtaatttcaatcacaagtccctggtggattatatgtattgggagaaggcaagcaggcgcatgctggaagaagaacgagttccggtgacattcgttaagtctgaggagaagactcaagaagaacatgaagagatagaaaagaggaataagaacatggcccagtacttaaaagagaaacttaataacgaaattgtggctaacaaaagggagagcaaaggaagttccaatatccaggagaccgatgaggaagatgaggaagaggaggacgacgatgacgatgatgaaggggaagacgatggggaggaaagcgaggaaaccaaccgtgaggaagaaggtaaagcaaaggagcagatcaggaattgcgagaacaactgccaacaggttacggacaaggcctttaaggaacaaagggaccggccagaggcccaggaacagtccgaaaagaagattagtaaattggaccctaagaagctggccctcgacacatcttttctgaaggtgtccacccggccctccggcaatcagactgacctagacggttcgctgcgtcgggtccggaaaaatgacccagacatgaaggaactcaacttgaataatatcgaaaatatccccaaagagatgctactggattttgtcaatgctatgaaaaaaaacaagcacattaaaaccttctctctcgccaatgtcggcgccgacgaaaatgtggccttcgcgttggccaacatgttgcgcgaaaacagaagtatcaccaccctgaatatcgagtccaattttatcactggcaaaggtatcgtcgccattatgagatgtctgcagttcaacgaaacgctgaccgagcttcgcttccacaaccaaagacacatgctgggccatcatgccgagatggaaatcgcacgactgttgaaagcgaataacactctcctaaaaatgggttatcactttgaattgccaggcccaaggatggtcgtgaccaatctcttgaccaggaatcaagataaacagcggcagaagaggcaggaagaacagaaacagcagcagctgaaagagcagaaaaaactgattgccatgcttgagaatgggctggggctaccacctggaatgtgggaactgctgggcggtccaaaaccagatagccgtatgcaggagttttttcagcctccaccacctcgccctcccaacccacagaatgttccatttagccagagaagtgaaatgatgaaaaagccttctcaagcccccaagtatagaactgaccctgactccttcagggtcgtgaagctgaaaaggattcagcgaaaatcaagaatgcctgaagcgcgggaacctcccgaaaaaaccaatttaaaggacgtgattaagacccttaagccagtaccacgcaatcgcccacctccgcttgtggagattacaccaagagatcaacttttgaacgatatcagacattctagtgtcgcctacctgaagcctgtccagctgcctaaggagctggcgtag

SEQ ID NO: 25465 - DNA, 51 bp, synthetic construct
  source 1..51: mol_type = other DNA; note = Synthetic coding sequence
atgtgcaccagcgagaccttccaggccctggacaccttcgaggcccgctag

SEQ ID NO: 25466 - DNA, 513 bp, synthetic construct
  source 1..513: mol_type = other DNA; note = Synthetic coding sequence
atgcccatcctgctgttcctgatcgacaccagcgccagcatgaaccagagatcgcatttaggtactacttatctggacacagccaagggagccgtggaaacgtttatgaaattgcgggctagagatcccgctagtagaggcgaccggtacatgctggttacgttcgaggaacctccatatgccatcaaggcaggctggaaggaaaaccacgccactttcatgaacgaattgaagaaccttcaggccgaagggcttacaactctggggcagtctttgagaacagcatttgatctgctcaacttaaacaggctggtgactgggattgataactacggccagggtcggaacccatttttcctcgaacccgctatcatcatcacaattaccgacggatcgaaactgactaccaccagtggtgtccaagacgaagcggtccatatactatgcgtcttgcaagaatgcttgatctccgtttggtccccttggtgccgcaagtacaaagtggggtggtag

SEQ ID NO: 25467 - DNA, 204 bp, synthetic construct
  source 1..204: mol_type = other DNA; note = Synthetic coding sequence
atgagccggcggcggttcgactgccggagcatcagcggcctgctgacaaccacaccgcaaatacccattaaaatggagaacttcaataatttttatattctgacatccaaggagctcgggcgcgggaagtttgctgtggtgaggcaatgtatctcaaaaagtaccgggcaggaatacgctgccaagtttctgaaaaagcgttag

SEQ ID NO: 25468 - DNA, 1107 bp, synthetic construct
  source 1..1107: mol_type = other DNA; note = Synthetic coding sequence
atgctgagcaagcggggctgccacgcccggatctacgccgacttccccatccgcaggttgatctcccagcggagttccctggagaccctggaagatatcgaagagaacgctcctctccggcgatgtcggactctgtccggatccccaagacccaagaactttaagaagattcattttattaagaacatgcgccaacacgacactcgcaacggtaggattgtgcttatttctggcaggaggtctttttgcagtatcttctcagtactgccttacagggattctacccaggtcggagatctgaaactggacggcggtagacaaagcactggagcagtctccctcaaggagataatcgggctggagggggtggagctaggggcagatggcaagaccgtcagctacacccagtttctgctccctaccaacgcatttggcgcgcggcgcaataccatagatagcacatcatccttcagtcagttccgaaatctatcccatcgttcactgagcattgggagggcaagcggcacccagggaagtttggataccgggagcgatctcggagactttatggactacgaccctaacctactggatgacccacagtggccatgcggaaagcacaagcgcgtcctgatcttcccatcttacatgacaacagtcatcgattacgtgaagcccagcgatctgaagaaggacatgaatgaaacctttaaggaaaaattcccgcacatcaagctcacactgagcaagataagatcacttaagagggagatgcgcaagctcgctcaggaagattgtggtctcgaagagcctaccgtggcgatggcgttcgtgtatttcgagaagttggccctgaagggaaagctgaataaacaaaacagaaagctgtgcgcgggcgcctgtgtcctgctggcagctaagatcggctcagacttaaagaaacatgaagtgaaacatcttattgacaaactggaagagaagtttcgcctgaatcggagggagttaatagcctttgagttcccagtgctagtggcgttagagtttgcactccaccttcccgagcatgaggtgatgcctcactatagacggctcgtgcagagcagctag

SEQ ID NO: 25469 - DNA, 795 bp, synthetic construct
  source 1..795: mol_type = other DNA; note = Synthetic coding sequence
atgaccgacgtgcccgccaccttcacccaggccgagtgcaacggcgataagcctccggagaatggccagcagaccattactaaaataagtgaagaactcaccgacgtggacagcccacttccacattatagggtggaaccatctctcgagggagcactcaccaagggctcacaagaggagaggagaaaactgcagggcaacatgttactgaactccagtatggaggataagatgcttaaagagacaagtgcggacgagatgacctttcgtgagggccaccagtgggagaaaatccccctgtccggctctaaccaagagattagacgccaaaaggagcggatcaccgaacagccactgaaggaagaagaggacgaggatagaaagaacaaaggtcatcaggctgctgagatcgaatggctgggatttcgcaaacccagccaggcggacatgttgcactccaagcacgatgaagagcagaaggtgtgggacgaggagatcgacgacgacgatgatgataactgtaataatgatgaggacgaggtgagagtaattgagttcaaaaagaagcacgaggaggtaagtcagttcaaggaggaaggagatgcaagcgaggattctccactgtcatccgcgagcagtcaggcagtaacccccgatgaacagccaactctgggtaagaagagcgacatcagcaggaacgcttattctcgctataatacaataagctaccgaaagatccgtaagggtaatactaaacagcggattgatgaatttgagagtatgatgcatctctag

SEQ ID NO: 25470 - DNA, 4302 bp, synthetic construct
  source 1..4302: mol_type = other DNA; note = Synthetic coding sequence
atgtggagcctgaccgccagcgagggcgagagcaccaccgcccacttcttcctgggcgccggagacgaaggtttaggcacccgcggcataggcatgagacccgaggaatctgacagcgaactgttagaggatgaggaagacgaggtacctcccgaacctcagatcatcgtggggatatgcgccatgacaaaaaaatctaagtctaagccaatgacccagatcctggaaaggctgtgtcgctttgattacctgaccgtggtgattctgggcgaggacgttatcttaaatgagccagtggaaaactggccttcttgtcattgtctcattagttttcatagtaaaggttttcctctcgataaagcagtcgcttactccaagctgcggaaccctttcttgatcaacgacctcgccatgcagtactacatccaggacaggagggaagtttaccgcattctgcaggaagaaggcatagatctgcctaggtacgctgtattgaaccgcgatcccgcccggcccgaggagtgcaacctgatcgaaggtgaggaccaggttgaggtgaacggagcagtgttccccaaacctttcgttgagaagccagttagtgctgaagaccataacgtgtatatttactaccctagttccgctggtggagggtcccagcgtctcttccgaaaaattggatctcggtcatctgtgtattcccctgaatcatctgtccgaaagaccggtagctatatctacgaagagttcatgcccacggacggcaccgacgtaaaagtctacaccgtgggcccggactatgctcacgccgaggctaggaagagccccgccctggatggcaaagtcgagcgggattctgagggcaaggagatccgataccctgttatgttgaccgccatggagaaactggtcgcgcgcaaggtgtgtgtggcttttaagcagaccgtctgtggtttcgaccttctcagggctaacgggcacagtttcgtgtgtgacgttaacggcttctcattcgtaaagaactcaatgaaatactatgacgattgtgccaagatactgggcaatactattatgcgtgagcttgcaccacagttccagataccctggagcatcccaacggaggccgaagacatcccgattgtgcctacaacttctgggacaatgatggaactgcgctgtgtaatcgcaatcattagacacggagatcggacgcccaaacagaaaatgaagatggaagtaaaacaccctagattctttgccttgtttgagaaacatggcggctataaaaccggaaagctcaagctgaaacgccccgaacagctccaggaggtactggacatcacgaggctgctcctggctgagttggaaaaagaaccaggaggcgagatagaggagaagacaggcaaactcgaacagctgaaaagcgtgctggaaatgtacggccattttagtgggattaacaggaaggtgcaactcacctattacccacacggagtgaaagcctctaacgaagggcaagaccctcagagagagaccctcgccccttccttgttgcttgtgctgaagtgggggggagagcttacccctgcgggaagggttcaggctgaggaactcgggagggctttccggtgcatgtatccaggcggccagggcgactacgctggatttcccgggtgcggcctgctgcgcctgcatagcacatttcggcatgacttaaaaatttacgcctctgacgagggccgtgtccaaatgacagccgccgccttcgccaagggcctcctggcactggagggcgagctgactcctattttagtccaaatggttaaatctgcaaacatgaacgggctgttagattctgacggcgactccctgtcgagttgtcaacatcgcgtgaaggcccgcctccaccacatcctgcagcaggatgccccctttggccctgaagactatgatcagttagctcccacccggtctacttcgttactgaatagcatgaccataattcaaaaccctgtcaaagtctgcgatcaagtgttcgccttgatcgagaatctcacccaccagattcgagagagaatgcaggacccaagaagtgtagacctacagttgtaccactcagagactctagaactgatgctccaacggtggagtaaactggaacgagacttccgacagaagtcaggaaggtatgacatcagtaaaatcccagacatatatgactgtgtgaaatacgacgttcagcataacggctcactgggacttcagggaacagccgagcttcttcgtctgtccaaggccctggctgatgtcgttattccccaggaatatggaatttcgagagaagaaaaactggaaatcgccgtggggttttgcctcccactcctccgtaagattctgctggacctgcaaaggacccatgaagacgaaagcgtaaacaagctgcaccctctgtgctacctccgttacagcagaggtgtactctctccagggagacacgtgcgcaccaggctgtatttcacatctgagagccacgtgcactctctcttgagtgtgttccgatatggcggtctgttggacgagacacaggacgcccagtggcagagagcactggactatctcagtgcaatcagtgagctgaattacatgacacaaatcgtcattatgctttacgaagacaacacccaggaccccctgtcggaggagcgctttcatgtggagttacacttttcgccgggcgtgaaaggcgttgaggaggaaggctctgctcctgccggctgtggctttaggcctgcctccagcgagaacgaggaaatgaagacaaaccaaggctccatggaaaatctgtgccccggtaaagccagcgacgaacctgatcgagctctccagacctcaccccagcctcctgaaggacccggccttccgcggagatcgcctttgatcagaaaccgtaaggcaggcagcatggaagtgctctccgagacttctagcagccgaccagggggatacaggctgttctcaagcagcagaccacctacagaaatgaaacagtcaggactggggtctcagtgtaccggccttttcagcaccaccgtcttaggagggtcttcctccgcaccgaatctgcaggactatgcaagatcacacgggaaaaagttgccacccgcttccctcaagcaccgggatgagctgctgtttgtgcccgcagtaaagcggttctccgtttcctttgccaagcaccctaccaatgggtttgagggctgctcaatggtccccaccatatatcccctcgagaccctgcacaacgcattgtccctgcggcaagtgagcgaatttcttagccgcgtttgccagaggcacacagatgctcaggcacaagcttcggccgctctcttcgattctatgcatagctctcaagcatcagacaacccgttcagcccaccccgcacacttcactcgcctccccttcagttacaacagagatctgaaaagcccccatggtattcaagtgggccaagctctactgtttctagcgccggtcctagttctccgactaccgtcgacggcaactcccaatttggctttagcgaccagccgtccttgaattcccacgttgctgaggaacaccaggggctcggcctcctccaggagacaccgggcagtggagcacaggagctgtcaatcgaaggcgagcaagagttattcgagccaaaccagtctccacaagtccccccaatggagacatcccaaccgtacgaagaggtgtcccagccttgccaagaggtgcctgatattagccagccctgtcaagatatctcagaggcactgtctcagccctgccaaaaggtgccggatatcagccagcagtgccaggagaatcatgataacggcaatcatacgtgtcaggaagtcccacatatttcacagccctgtcaaaagtcttctcagctttgccagaaggtatctgaagaagtgtgtcagctgtgcctggagaactccgaagaggtcagccagccctgtcagggcgtgtctgtcgaagtcggcaaactcgttcacaagttccacgttggtgtgggctctttagtgcaggaaacattggtggaggtgggttcccccgcagaagagattccagaggaagtaatacagccctatcaggaattctctgtggaagtgggcagactcgctcaggaaacatcagctataaacctgctctcccaaggtataccggagatcgacaagccctcccaggagtttccagaggagattgatctacaggcacaagaagtgccggaagaaattaactag

SEQ ID NO: 25471 - DNA, 810 bp, synthetic construct
  source 1..810: mol_type = other DNA; note = Synthetic coding sequence
atgttccccgccctggagacccacctgaagcagaccatccccgacccttatgaggattttatgtacagacacttgcagtactatggttactttaaagcccagcgcggctctcttcctaactcagccacccaccagcacgtccgcaagaacaacccccaatgtcttctgaatggctcgttgggagagaaggacgacctaattcccgatacactccaaaaagaaaaactgctgtactcgcatatgttgtcactgcctcatctacggtcacgccagctcctctacgatgagctggatgaggtgaatcccaggctgagagagcctcaggaattgttttctattctgtccaccaaaaggccactacaggcccctagatggcccatcgagtgcgaggtcatcaaagaaaacattcaccatattgagtgggctccaccacagcctgagtatttctatcagccaaagggaaacgaaaaggtccccgaaatcgttggggagaagaagggtacagtcgtgtaccagctcgattcagtgccaatcgaaggttcgtattttacaagtagtcgggttgggggaaagaggggaattgtcaaggaactggccgtcacgctgcaagggcccgaagacaacaccctgctgttcgagtctcggttcgagtccgggaacttgcaaaaagctgttcgcgtggaccccatgtcaatgaattccccctgcgagctgacctccacattgaccaacacactgtctggattcatcttcgtcttccggaccccagagaagatgctgccgatagccagtcccctttccacctgctag

SEQ ID NO: 25472 - DNA, 975 bp, synthetic construct
  source 1..975: mol_type = other DNA; note = Synthetic coding sequence
atgcccctgcaggtgagcgactacagctggcagcagaccaagaccgctgtatttctctccttgccccttaagggtgtgtgcgtcagagatacagacgtgttctgtaccgaaaactatttaaaagtgaacttcccgccatttctgtttgaggcttttctatatgcaccaattgatgacgagagctctaaagccaaaattggcaacgatacaattgtttttacgttgtacaaaaaagaggctgctatgtgggaaactttatcagtcacaggcgtcgacaaggaaatgatgcaacgtattcgcgagaaaagcatcttgcaggcgcaggagcgcgctaaagaagcaactgaggctaaagccgccgcgaagcgagaggaccagaaatatgcactgtctgtgatgatgaagatcgaggaagaagagcgaaagaaaatcgaagacatgaaagaaaacgaaaggatcaaagctaccaaagctttagaggcctggaaggagtatcagcgcaaggcagaggagcagaagaagatccagcgagaggagaagctttgccagaaggagaaacagattaaagaggagcggaagaagatcaagtacaagagcctgacgcgtaatctggctagccgcaacctggcccctaagggtcgtaacagcgaaaacatctttaccgaaaaattaaaggaagatagcatccctgccccgagaagcgtgggatctatcaagattaattttaccccccgggtctttccaaccgctctccgtgagtcccaggtggcagaagaagaggagtggcttcataaacaggcggaagctcggagggctatgaacacagatattgccgagttatgcgacctgaaagaagaggaaaaaaaccctgagtggctcaaagataaaggcaaacccgaacggtgcctgaagattcctgttaccgtcatccacctggttgttgggctgagcagtgtaatgcgcggtcagatatag

SEQ ID NO: 25473 - DNA, 162 bp, synthetic construct
  source 1..162: mol_type = other DNA; note = Synthetic coding sequence
atgcagaccagcagcagccggagcgtgcacctgagcgagtggcagaagaattatttcgctattactagtggaatctgtacggggcctaaggccgatgcctaccgagcgcagattcttcgcattcagtatgcctgggcaaatagcgaaataagccaggtatag

SEQ ID NO: 25474 - DNA, 2079 bp, synthetic construct
  source 1..2079: mol_type = other DNA; note = Synthetic coding sequence
atggtgaccaccctgggccccaagatggccgccgagtggggcggcggggtgggttatagcggctcaggccctggccggtccagatggagatggagcggaagcgtatgggttaggtctgttctgctgttgttagggggactccgagcttccgctacatctaccccagtttctctgggaagctctccgccctgtaggcatcacgtgccatctgatacggaagtcatcaacaaggttcacctgaaggccaaccacgtggtgaagagggacgtggacgagcacctgaggatcaaaaccgtgtacgataagagtgtggaagaacttctgccagaaaagaaaaaccttgtaaagaacaaactctttccccaggctatctcttacttggaaaagaccttccaggtcagacggccagccggtaccatcctgctctcccggcaatgtgccacgaaccagtatttaaggaaagaaaatgatccacaccggtattgcaccggcgagtgtgcagctcataccaagtgcggacccgtcatcgtgcccgaggaacacttgcagcagtgtagagtatacaggggaggcaagtggccacacggcgcagtgggagttccagaccaggaaggcatttccgacgcagattttgtcctatatgtgggcgctctggctactgagagatgtagtcacgagaatatcatctcatatgcggcctattgccagcaggaggcaaacatggatcgcccgatcgcaggttacgccaatttatgccctaacatgatatcaacacaacctcaggaattcgtcggaatgctttcgacagtaaagcatgaggtgatccatgccttgggcttcagcgctggtttatttgcgttttaccatgataaagacggcaatcccctgacgagtaggtttgccgatggtctgccacctttcaactactctttgggcctttaccagtggagtgataaggtggtgagaaaagtggagagactgtgggatgtacgggacaataaaatagtgcgacacactgtgtacctcctcgtgaccccaagggtagttgaggaggctcgcaagcacttcgactgtcctgtgcttgagggaatggaactcgagaaccagggcggtgtgggcacagaacttaaccattgggaaaaacggctgcttgaaaatgaagcaatgactggatcacatactcagaatcgcgtcctgtctagaatcacccttgcactcatggaagacaccggatggtataaggcaaattattcgatggctgaaaagctggattggggccgtggcatggggtgcgatttcgtccgtaagtcttgtaagttttggatcgaccaacaaagacagaagaggcagatgttgtctccatactgtgatacacttaggtccaatcctttacagctgacctgtagacaggatcagcgagcagtcgccgtatgcaacctgcagaagtttccaaagccgctaccacaggagtaccagtactttgacgaattgtctggaattcctgcagaggatcttccttattacggaggttctgtggagatcgcagactactgcccattcagccaggaattctcatggcatctatctggcgagtaccagcgctcatctgactgccggatactggaaaaccagcctgaaattttcaagaattacggagctgagaaatatggccctcattctgtgtgtttaatacagaagtcagccttcgtgatggagaagtgtgagcgcaagctcagttatcctgattggggaagtgggtgttaccaggtgtcatgctccccccaaggactgaaagtgtgggtgcaggatacaagctacctctgttcccgggctggacaggtcctgcctgtgtctattcagatgaatggttggatccacgacggaaatctcctctgccccagctgctgggacttttgtgaactttgcccgccagaaacagatccacctgcaaccaacctgacacgcgctctccctcttgacctatgttcatgcagcagctcccttgttgtcaccctgtggctgcttctgggcaatctgttcccattactggccggattcctgttgtgcatctggcactag

SEQ ID NO: 25475 - DNA, 3021 bp, synthetic construct
  source 1..3021: mol_type = other DNA; note = Synthetic coding sequence
atggacagcagccagcagaagaccttccggggccacgacgcccccgtactctcacttagctttgatcctaaggatatctttctcgcctctgcctcttgtgatgggagtgtacgcgtgtggcagattagcgaccagacctgcgccatctcctggcctttacttcagaaatgcaacgatgtgattaatgcgaaaagcatatgtcgactggcatggcagcctaagagcggtaagctgctggcaattcctgttgaaaaaagcgtgaagttgtacaggagagagtcttggtcccaccagtttgatctttccgacaattttatttcccagacccttaatatcgtcacttggagcccttgcgggcagtatctggccgcaggcagcatcaatggtctgatcatagtgtggaacgtcgagaccaaggactgtatggaacgagtgaaacatgagaagggatacgctatttgtggcctggcatggcatccgacctgcggtcgcatcagctacacggacgccgaggggaaccttggtctgctggaaaacgtctgtgatcctagcggtaaaacaagttcttccaaggtatctagcagagtggagaaagattacaacgacttattcgatggggatgacatgagcaatgccggagactttctgaatgacaatgctgtggagatcccatcattctctaagggcatcataaacgacgatgaagatgacgaggatctgatgatggcaagcgggaggcctcgccaaaggtcccacattctggaggacgacgaaaattcagtggatattagcatgctgaaaacagggtcctcacttttgaaggaggaggaagaagacggacaagaaggatcaatccataatctcccattggtgactagtcagcgacccttctatgacggcccaatgccaaccccaaggcagaaaccattccagagtggctctacccccctccatttgactcatcggtttatggtttggaatagcatcggcatcatccgttgttacaacgatgagcaggacaatgccatagacgtggagtttcacgacacaagcattcaccatgctacccacctgagcaatactctcaattacacaatcgctgacctcagccatgaagccattctgcttgcctgtgagagcacggacgagctcgcctcaaagttacattgcctgcattttagctcctgggacagctcaaaagagtggatcattgacctgccgcagaacgaggacattgaggccatatgcctgggacagggatgggccgccgcagccacaagtgccctgctactgcgcctattcacaattggtggggtgcaaaaggaggtcttttccctcgccggacccgtggtgagtatggctggccacggagagcagcttttcatagtatatcatcgagggactggattcgacggcgatcagtgcctgggtgtccagctgctggagctgggtaagaaaaagaagcagatccttcacggcgaccctttgcccctgaccagaaaaagctacctggcttggatcggcttttcagctgagggcactccttgctacgtggattcagagggcatcgttagaatgctgaaccgggggctaggaaatacgtggacgccgatttgtaacacgagggaacattgcaagggcaaatcagaccattattgggtcgtcgggattcatgagaacccccagcagctgagatgcatcccatgcaagggcagtcgcttcccccctaccctgccacgccctgcagtcgctatcctaagtttcaaactgccctactgccagatcgcaacagagaaaggacaaatggaggagcaattctggaggagcgttatctttcacaaccatttggattatttagccaaaaacgggtacgagtatgaggagtccactaaaaatcaggccactaaagagcagcaggagttacttatgaaaatgctggccctaagttgcaaactggaaagggaattccgttgcgtggagctcgctgatttgatgacccagaatgccgtcaatctcgcaatcaaatacgcttctcggtcccgaaagctgatcctggcccaaaagctgtcggaactggccgtggaaaaggcagctgagttgactgctactcaagtggaagaggaagaggaggaagaggatttccgcaagaaactgaatgctggatactccaacacagctaccgaatggtctcaacctaggtttcgaaatcaggtcgaagaagacgcagaagattcgggagaagctgatgatgaggaaaaaccggagattcacaaaccaggacagaattccttttctaagtcaaccaactcctcagatgtttccgcaaagtcaggggctgtgaccttttcaagccagggccgggtgaatccctttaaagtgtctgcttcaagcaaagagcctgcgatgagtatgaattcagcgcggtccacgaatatcctagacaatatgggaaagtcatcaaagaagagcactgcccttagccgcaccacaaataatgagaaatcacccatcattaagcccctgatacctaagcctaaacctaagcaagcctcagcagcaagctacttccagaagaggaattcccagacaaacaagaccgaagaagtgaaggaggagaacctgaagaacgtactgagcgagaccccagccatatgtcctccccaaaacactgaaaaccaacgtcccaagacaggatttcagatgtggcttgaagaaaacagatctaacattttgtccgataatcccgatttcagcgacgaggcagacataattaaggaggggatgattcggttcagggtgctttccacagaagagagaaaagtctgggcaaacaaggcaaagggggagacggcctccgagggaacggaagccaagaagcgcaaacgcgtggtcgacgaatccgatgagaccgagaaccaggaagaaaaagccaaagagaaccttaatctgtctaagaagcagaagcccttggatttcagtactaatcaaaagttatcggcatttgcattcaagcaggaatag

SEQ ID NO: 25476 - DNA, 540 bp, synthetic construct
  source 1..540: mol_type = other DNA; note = Synthetic coding sequence
atgaccgaggacagccagcggaacttccggagcgtgtactacgagaaagtggggttccggggagtggaggagaagaagtccttggagattctactgaaagacgaccggctggacaccgagaagctgtgcacctttagtcagaggttcccactgccttctatgtatcgcgccttggtatggaaggtacttttgggaattctgcccccccaccacgaatctcacgcaaaggtgatgatgtaccgcaaggagcagtacctggacgtcctgcatgccctgaaggtggttagattcgtttcagacgccactccccaggctgaagtctacttgcggatgtatcagctcgagagcgggaagttaccgcgctcaccctcctttccactagaacctgatgacgaggtgttcctcgcaatcgctaaagcaatggaggaaatggtggaggattccgtggattgctactggatcacaaggagattcgtaaatcaactgaatacaaaatatagagactccttaccacagttagagggcatcaacgtggggtag

SEQ ID NO: 25477 - DNA, 3189 bp, synthetic construct
  source 1..3189: mol_type = other DNA; note = Synthetic coding sequence
atgatcagcaagggcggcagcgaggccctgctgcagaccctggtggataccgcacggactgcaccccctgattatgatatcttgctcccactgtttagactcctggccaaggtgggacttagagacaagaaaatcgggaggaaggcacttgagttagaggcacttgatgtgaccctaatccttgcgcgtaagaacctgtcccacggtcagaatctgttacactgcctgtgggccctacgcgttttcgctagcagcgttagtatgggcgcgatgcttggcatcaatggagcgatggaactgctgtttaaagtgattactccatacactagaaaacgaacacaggcgattagagccgctacggaggtcctggccgcactgctgaagagcaagtcaaatgggcgtagagcggtgaatcggggttatgtgacctcgctgctgggcttacaccaggactggcacagccatgacacggccaacgcgtatgttcaaatcaggagaggcttgctcctctgcctgagacacatcgccgcactgagaagcggaagggaggcttttttggctgcgcaaggtatggagattctattcagcacaacacagaattgccttgatgataagtctatggagcccgttatcagcgtggtgctacagatccttcggcaatgctaccctacaagtccactgccacttgtgactgctagttcggcctacgcgttcccggtgcccgggtgcataactacggagcctcctcacgatctccctgaagaggatttcgaggacgatggtgatgatgaagtcgacaaggacagcgacaccgaagacggaaaagttgaagatgacgatctggagaccgacgttaataagttgtcttcgaagcccgggctcgaccgcccagaagaggagttaatgcaatacgaggtgatgtgtttggaactttcttattcttttgaagaactgcagagtaaactgggagacgatctcaattccgagaaaacacagtacgccaatcaccaccacattccggcagccgcgtcgagtaagcagcattgctatagcaaggatcagagtagttgcggccaggagagagagtatgccgttcagacatctctgctttgtagggtcaaaacagggcgctctaccgtgcatctgggatccaagaagaatccaggggtcaacctctaccagaacgtgcagagtaactccctgagaagggattcatcagagtctgaaataccagacatacaggcttccccaaaagccgatgcatgggacgtggatgcaattttttgtcctcgcatgagcgcgtccttctccaacagcacacggactcgcgaagtcgtgaaagttatcgacaaattgttgcagactcatctaaagcgggtcccatttcatgacccttacctgtacatggctaaagcgcggaggacctccagtgttgtcgactttaagatgatggctttcccagacgtatggggacattgcccgccgccaacaacccagccaatgcttgagcgtaaatgcggcgttcagagaatacggatatttgaagacataagaaggctaattcagcctagcgacgtcatcaataaggtggtgttctctctggacgaaccttggcctctgcaagacaatgccagcaattgcctgcgttttttttctaaattcgagtccgggaacttacggaaggcgatccaggtcagggagtttgagtatgatctcctggttaatgcagacgtgaactcgacccagcaccagcagtggttctatttcaaagtgtccggcatgcaggctgctattccttaccacttcaacataatcaattgtgagaagcccaacagccagttcaattacggcatgcagccgacactgtattctgtaaaggaggcacttttaggaaagcccacctggataaggacaggacatgagatttgttactacaagaatcattaccgccagagcacagccgttgccgggggggcatctggaaagtgttactacactttaaccttcgccgtgacctttccccattccgaagatgtatgttatctcgcatatcattacccgtatacctacaccgccctgatgacgcatctcgacatcttagaaaaatcagtgaacctgaaggaggtctactttcgacaggatgtgctgtgtcaaacgctgggcgggaacccctgcccgctggtgactattaccgctatgcccgagagcaactccgatgaacatctggaacagtttcgccacagaccctaccaggtgatcactgcacgggtacatcccggagagtcaaatgcgtcctgggtgatgaagggcacgctggagttcctggtgtcttctgacccagttgccagactgctgcgtgagaatttcatatttaagataatacctatgctaaatcccgatggagtaatcaacgggaaccatcggtgttcactctccggcgaagatctcaacaggcaatggctgtccccatctgcacacctacagccaacgatctaccatgctaaaggcttgttgtaccacctgtcgtcgattggccggagccccgtagttttttgcgattttcacggccactctcaaaagaagaatgttttcctatacggatgctctatcaaagagacactgtggcaagcagcctgcaccgtcgggacatccacaatactggaagaggtgaattaccgtactctgccaaagatcttagacaagctcgcgcccgccttcacaatgtcctcttgctcttttctagtggagaaatcacgtgcctctacagcccgcgtcgtggtgtggcgagagatgggcgtatccagatcctatacaatggagagtagctattgtggctgcaatcaaggcccataccagtgcacacagagattgcttgaaagaaccaagaatgagcgagctcatcccgtggacggcctgcaggggctgcagtttggaacgcgcgagcttgaggagatgggcgcgatgttctgtttgggactactgatcctggaactcaaatctgcgtcatgctcccatcagctcctcgctcaggctgcaaccctgctcagtgctgaagaagacgctctggatcagcacctccagcggctcaagtcctcgaatttcctgcccaagcatatctggttcgcatatcattttttcgctattactaattttttcaagatgaatctactgctccacgtatctccctag

SEQ ID NO: 25478 - DNA, 738 bp, synthetic construct
  source 1..738: mol_type = other DNA; note = Synthetic coding sequence
atggccgccgccccccccagctactgcttcgtggccttcccccccagagctaaagacggattggtggtgtttggaaagaactccgctaggccccgcgatgaggtgcaagaggtggtttatttctccgcagctgatcatgaacccgagtctaaggtggagtgtacctatatttccattgatcaggtgccgcggacttacgcaatcatgatcagcaggccagcttggctttggggtgctgagatgggggctaatgagcatggggtttgcattgcgaacgaagcaatcaacaccagggagccagccgctgaaattgaggccttgctggggatggatctagtgcgattaggactcgaaagaggcgagactgctaaggaagccctggatgtcattgtatctttgctcgaggagcatggtcagggagggaattactttgaagacgcaaattcctgccactcgtttcagagtgcatacctgattgttgaccgagacgaggcttgggtgctggagaccatcggaaagtactgggctgcagaaaaagtgaccgagggtgtaagatgcatctgctcacagctgtctcttaccactaagatggatgctgagcatccagagctgcgctcctacgcccagtcacagggatggtggacaggtgaaggcgagttcaactttagtgaggtgttttcaccagtcgaagatcatcttgattgcggggcgggcaaagattcactggagaaacagtag

SEQ ID NO: 25479 - DNA, 99 bp, synthetic construct
  source 1..99: mol_type = other DNA; note = Synthetic coding sequence
atgagcgagcagggcgacctgaaccaggccatcgccgaggagggcggaaccgagcaggaaacagcaacaccagagaatggaatcgttaagtcggagtag

SEQ ID NO: 25480 - DNA, 132 bp, synthetic construct
  source 1..132: mol_type = other DNA; note = Synthetic coding sequence
tgagtgctgggcagccccaagcccgaggagatccccctgacctggatacagccaggcaccacagtcctcaactgttctcacgactttttgtccgagtctctgataatcatccgccgaatggctatcttctag

SEQ ID NO: 25481 - DNA, 339 bp, synthetic construct
  source 1..339: mol_type = other DNA; note = Synthetic coding sequence
atgttcgccaagctgaagaagaagatcgccgaggagaccgccgtggcacaacgcccaggaggagccaccagaatcccacgttccgtgtctaaggaatcagtcgcgtccatgggggcagactccggagacgatttcgccagcgacggatctagcagtcgggaggatctgtcttcccaactgctgcggcggaacgagcagattaggaagctcgaggcacgcctcagcgactacgccgagcaggtaagaaacttgcaaaagatcaaggagaagttggaaatagccctggagaagcatcaggatagctcgatgagaaagtttcaggaacagaatgagacgtag

SEQ ID NO: 25482 - DNA, 579 bp, synthetic construct
  source 1..579: mol_type = other DNA; note = Synthetic coding sequence
atgggcaagggctgcaaggtggtggtgtgcggcctgctgagcgtgggaaagactgccattctggagcagctcctttacgggaatcacactatcggaatggaggattgcgaaactatggaagacgtttatatggcttccgttgaaactgatcgaggcgtcaaagagcagctgcacctttacgatacacggggactccaggaaggcgtagagctgcccaagcattatttttcttttgctgacggctttgtgttggtatacagtgtgaacaatcttgagtcattccagagagtcgaattgcttaagaaagaaattgacaaatttaaagacaaaaaagaggtcgccatagtggtgctcggcaacaagatcgatctgagtgagcagcggcaggttgacgccgaagtggctcagcaatgggcaaaaagtgagaaggttcggctgtgggaagtgacagtgactgatcgcaaaactctaatagagccatttacactgctcgcctctaagctcagccaaccccaaagcaaaagctcctttccactgccgggacggaaaaataaggggaacagcaattctgagaactag

SEQ ID NO: 25483 - DNA, 1458 bp, synthetic construct
  source 1..1458: mol_type = other DNA; note = Synthetic coding sequence
atggccccccggctgcagctggagaaggccgcctggcggtgggccgaaaccgtcaggccggaggaggtttcacaggaacatattgaaaccgcttaccgcatttggctggaaccctgtattcgtggggtatgtaggcgaaactgcaagggcaaccccaattgtcttgttgggatcggggagcacatttggttaggtgagatagacgaaaatagcttccacaatatcgacgatcctaactgcgaacgccgaaaaaaaaacagttttgttgggctaacaaacctgggggctacctgctatgtcaacaccttcctccaggtgtggtttctgaatctggagttacggcaggcgctgtacttatgcccttctacttgcagcgactacatgcttggtgatgggatccaggaagaaaaggattacgaaccccagactatctgtgagcatctccagtatctgtttgcacttctgcagaatagtaacaggcgatatattgaccctagtgggttcgtcaaagcgttgggtctggatacaggacagcagcaagacgctcaagagttttccaaactgttcatgtctctcctggaagacaccctcagcaaacaaaagaatcccgacgtccggaatatcgtccagcagcagttctgtggtgagtatgcctatgtcaccgtgtgcaatcagtgtggccgggaatctaagctcctgtcgaagttctacgagctggagttgaatattcagggccacaagcagctgaccgactgcattagtgagtttctgaaggaggaaaaactggagggggacaaccgatatttttgcgagaactgccagagcaagcagaatgcgacacggaagatcaggctgctgtctttaccatgtactcttaacctccaacttatgaggtttgtcttcgatagacagacagggcacaagaaaaagctgaacacatacatcggcttctccgaaatcttggatatggaaccttatgtagagcataaaggcggctcgtacgtctatgagctctccgctgtcttgatacacaggggggtgagcgcttatagtgggcattacatcgcccatgtcaaagatccccaatcgggggagtggtacaaattcaacgacgaagacatcgaaaaaatggaaggtaagaagctgcagttgggcatagaagaggatctggccgagccctccaaatcccagacccgtaagccaaagtgtgggaaaggcacccattgctcacgaaatgcttacatgttggtgtatcgattgcaaacgcaggagaaaccgaacacgaccgtgcaagttcccgcctttctccaggaactcgttgatagggataatagcaagtttgaagagtggtgtatcgagatggcagaaatgaggaaacaatccgtagacaagggcaaggctaaacacgaagaagtcaaagaactgtaccagaggttacccgccggcgccggtctttag

SEQ ID NO: 25484 - DNA, 1119 bp, synthetic construct
  source 1..1119: mol_type = other DNA; note = Synthetic coding sequence
atggacgtgctgagccccctgagcttcatcaaggtgagccacgtgaggatgcaggggatcctgttactggtgttcgcgaaataccagcacttaccctacattcaaatcttgtctactaagtccacccccaccggactgttcgggtactgggggaataaaggtggcgtgaacatttgcctgaaattgtacgggtactatgtgtcgatcatcaactgccacctgcccccccatattagtaataactatcagcgactggagcacttcgaccgtatattagaaatgcagaactgtgagggcagggatatccccaacattctcgaccacgacttgattatttggtttggagatatgaatttcagaattgaggatttcgggctgcattttgtaagggaatcaatcaagaacaggtgctatggcggactatgggaaaaagaccagctgagtatcgccaaaaaacacgatcctttgttgcgagagtttcaggagggaagactgctgtttcctccaacgtataaattcgacaggaacagcaacgattacgacaccagcgagaaaaagaggaaacccgcatggacagaccgcattctttggaggctgaagcggcagccttgcgctggacccgatactcccatacctccggcctcccacttctctctgtccctccgcgggtacagttcacatatgacctacggaatcagtgatcacaagcctgttagtggaacattcgaccttgaactcaaacccctggttagtgcccccctcatcgtgttaatgccagaggatttgtggacagtcgagaatgatatgatggtaagctatagctccacatctgattttccatcgtcaccatgggattggatcgggctctacaaagtcggcttgcgggatgtgaatgactatgtgtcctatgcctgggttggggattctaaggtctcctgtagcgataatttgaaccaagtatatatagacatcagcaatattccaaccactgaagatgaatttctgctctgttattattctaatagtctgcgatccgtcgtggggataagcagaccgttccagattcctcctggcagtctgcgggaggacccacttggcgaggcccagccacagatctag

SEQ ID NO: 25485 - DNA, 1548 bp, synthetic construct
  source 1..1548: mol_type = other DNA; note = Synthetic coding sequence
atgagcgagggcgagagccagaccagcgtgagcccccccgtgacctcgaccacatccgccgcttccccggaggaggaagaagagtctgaggatgagtccgaaatactggaggaaagcccttgcggcaggtggcagaaacggcgggaggaagttaatcaaaggaatgttcctggaattgactcggcatatcttgcgatggatactgaggaaggcgttgaagtcgtgtggaacgaggtgcagttcagcgaacggaaaaattataaattacaggaggagaaagtgagggccgtctttgacaatctcatccagctggagcacctgaacattgtaaagttccataagtactgggccgatattaaggaaaataaggctcgagtcattttcatcacagagtacatgagttctggtagccttaagcagttccttaaaaagacaaagaagaaccataagaccatgaacgagaaggcatggaaaagatggtgcacgcagattctctccgctctgagttacctccattcatgtgacccacctattatccatgggaacttgacctgcgacacgatattcatacagcacaacggactgatcaaaatcggcagcgtcgctcctgatactatcaataaccatgtgaaaacctgccgggaggaacagaaaaacttacacttttttgcacctgaatacggggaggttacaaacgtgaccaccgccgtggacatctattctttcggcatgtgtgcgctggagatggctgtgcttgagattcagggcaacggggagagctcttacgtacctcaggaagctatctcaagcgctatccagcttctggaggatccacttcagcgggaatttatccagaagtgcttgcagtcagaacctgctcgaagaccgacggcacgtgaactgctgttccatccagccctatttgaagtgccctcactaaagttgctggcagcccattgcatcgttggccaccagcacatgataccggagaatgctctggaagagattacaaagaatatggacacctctgctgtcctggcagagatacctgccggcccaggccgggaaccggttcaaaccctgtactcccagagccccgcgctagagttggacaagtttcttgaggacgttaggaatggcatctatcctcttacagcgtttggcctacctcgccctcaacaaccacagcaggaagaggtcactagccccgttgtgcccccctccgtgaaaactcccacaccagagccagccgaagtcgagactagaaaggtcgtgctgatgcagtgtaatattgagagcgtggaggagggcgtcaaacatcaccttacgctcctattaaaactggaggataagctgaaccggcatctctcctgtgacttaatgcccaacgaaaacattcctgaactggctgcagaattggtgcagctgggattcatttccgaggccgaccagtcccgactgacatcactcctggaagagacgctgaataagtttaattttgcacgcaattcaaccctgaactcagctgcagtcactgtgagttcctag

SEQ ID NO: 25486 - DNA, 435 bp, synthetic construct
  source 1..435: mol_type = other DNA; note = Synthetic coding sequence
atgagcagccccctggccagcctgagcaagacccggaaggtgcccctgccctcagaacccatgaacccaggcaggcgcggaatacgaatctacggtgatgaggatgaagtagatatgctcagtgatgggtgtggaagtgaagaaaaaatcagtgttccttcctgttatggcggaatcggggctcccgttagtcgtcaagtgcctgcatcacacgattcagaacttatggcttttatgactcggaagctatgggacctggagcaacaagtgaaggctcaaacggatgagattctgagtaaagaccagaaaattgccgcccttgaggatctggtacaaaccctccgcccacaccctgctgaagccaccctgcagcggcaggaagaactcgaaacaatgtgtgtgcagttacagcgtcaggtgagggaaatggagtag

SEQ ID NO: 25487 - DNA, 1047 bp, synthetic construct
  source 1..1047: mol_type = other DNA; note = Synthetic coding sequence
atgcccgcccccccctgcgccagctgccacgccgcccgggccgccttgcggaggcctctgagcggacaggccctgtgtggggcatgtttttgtgctgcattcgaggcagaagtgttacacactgtgcttgccggcaggctcctgccacccggcgcagtagtggccgtaggcgcctctgggggcaaggactccacagtgttggctcatgtcttacgggctctagccccccgcttaggcatcagcttgcagctggtcgccgtggacgaaggaatcggcggttatagggatgccgcactcgcagccgtccgccggcaggccgccaggtgggagctcccacttactgttgtcgcctacgaagatctctttggggggtggactatggatgccgtggccagaagcaccgccgggtccggccgatcaagatcctgttgtacattctgcggggtacttagaagaagggcacttgaggagggcgccaggcgggtgggcgcaactcacatagtgaccggccacaacgccgatgacatggctgagacagtattgatgaattttctaagaggggatgccggccgccttgcaagaggagggggtctcggctccccaggggaaggaggagccttacccagatgccggccattgcaatttgcttctcagaaagaagtggtgctttatgcccactttagacggcttgattatttcagcgaagagtgtgtgtacgctccggaggcttttaggggacacgcccgagacctcctgaagcggctggaagccgctcgacccagcgccgtactggatctggttcacagcgccgaaaggctggcactggcgcccgccgcaaggcctccccggcctggggcatgttcacgctgcggcgccttagcctcaagggccctctgccaggcctgcgccctgctagacggccttaatcgcggcaggcccagattagcgatcggcaagggcagaagaggactcgatgaggaggccacccctggaaccccaggagatcccgcacggcctcctgcatccaaagctgttccaactttctag

SEQ ID NO: 25488 - DNA, 321 bp, synthetic construct
  source 1..321: mol_type = other DNA; note = Synthetic coding sequence
atgcccgaggaccaggtgggcaagctggaggccaccgagaacaccatatccgctatggccgccgctgctgcggagcaacaacagttttacctgctcttgggcaatctgctcagtcccgataatgttgtgaggaagcaagctgaggagacatacgagaatattccaggacagagcaaaattacattcctcctccaggccattcgaaatacgacagctgctgaagaagctcgtcaaatggctgcagtactgctacggcgactactttcatcagccttcgatgaggtatacccggcgctcccctctgacgttcagacggcatag

SEQ ID NO: 25489 - DNA, 198 bp, synthetic construct
  source 1..198: mol_type = other DNA; note = Synthetic coding sequence
atggagctgcggtgcggcggcctgctgttcagcagccggttcgacagtggcaacttggcccacgtggagaaagtggagtcactgtcttcagatggagaaggggtaggaggtggcgcctctgctctgacctccggcattgcttcgtctcccgactacgagtttaacgtgtggacccggcccgattgcgccgagacctag

SEQ ID NO: 25490 - DNA, 1371 bp, synthetic construct
  source 1..1371: mol_type = other DNA; note = Synthetic coding sequence
atggccgacagcctggagagcacccccctgcccagccccgaggaccggctggctaagctgcacccaagcaaagaactgttagaatattatcagaaaaagatggccgagtgcgaagccgagaatgaagatctacttaaaaagctagaactgtacaaggaagcttgcgagggacagcacaagctggaatgtgatttgcaacagcgggaagaggagattgccgagctccagaaagcattatcagacatgcaggtttgcctgttccaggaaagggagcacgtcctgcgcctgtattctgagaatgatcggttgcgtataagagagctggaggacaagaagaaaatccagaatctgctagcactggtcggcacagacgctggtgaggtcacatacttctgcaaggaacccccacataaggtgacgattctacagaaaaccattcaggccgtgggtgagtgtgaacagagtgaatcttccgcatttaaggcggacccgaagatcagcaagaggagaccttcgcgtgagcgcaaagaaagctctgagcactaccagagggatatccagactctgatcctgcaagtggaagccctgcaggcacagctgggggagcaaaccaaattgagtcgggaacagattgagggtctgattgaggaccgcagaattcacctcgaagagattcaagtccagcatcagcggaatcaaaacaagataaaagaacttacaaaaaacctgcatcacacacaggagctactttacgagagcacaaaggactttttacagctgcgaagcgaaaaccagaacaaggagaagtcttggatgctagagaaagacaacctgatgagcaagataaaacagtaccgcgtgcagtgtaagaaaaaggaagacaagattggaaaggtgctgccagttatgcatgagtctcaccatgcccagtcagaatatataaagagccttaaagataagcttgtccaagaaaagaagttatccaacatgtaccaagaacagtgtatctcactggaagaagaactcgctaggatccgtgaggaagaaggcatgagacgcgagatattcaaggaccgcacaaacaagatgggaaaaagactccagattatgacaaagcgatatgaggcactggagcgcaggcgcattttggaggttgagggatttaagacagacattaaggtactgcgacagaagcttaaagacttggaacagatgctgtacaaggccacggtgaatgctcgcgctaaccaggacctcgcactcctgtgcgaagtccgagactctaacaggagagctcacaaaattcaaggagagttaaagaacctgaagtctaaggtgttcggcctagaaaacgagctgcgcctctgctag

SEQ ID NO: 25491 - DNA, 1275 bp, synthetic construct
  source 1..1275: mol_type = other DNA; note = Synthetic coding sequence
atggaccagcccagcggccggagcttcatgcaggtgctgtgcgagaaatactccccggagaacttcccgtacaggcggggacccggcatgggggtgcatgtgcccgctacgccacagggcagtcctatgaaggaccgcctgaatctgccatccgtcttagttcttaactcatgtgggattacgtgcgccggcgacgaaaaagagattgctgctttttgcgctcacgtatccgagcttgatctctctgataataagttggaggattggcatgaagtgtcgaaaatcgtctccaacgtaccacagctcgagtttcttaaccttagtagcaatccgctcaatctgtctgtactggaaagaacatgtgcagggtccttctccggcgtgcgtaaactggtgctaaacaactccaaggccagctgggaaacagttcatatgattctgcaggagctccctgatctggaggagttgtttctgtgcctcaacgactacgagaccgtgagttgccccagcatctgttgtcactctcttaaactcctacacattacagataataaccttcaggactggactgagattagaaaactcggcgtgatgttcccatctctagacacgctagtgttggccaacaaccacttgaatgccatcgaagagccagatgatagcttagccaggctgtttcccaacttaagaagtatctcactgcacaaatcagggttacaatcttgggaagacattgacaaacttaatagttttccgaaactcgaagaggtgcgcctgctcggtattccgcttttgcaaccatacaccaccgaagaaaggagaaagcttgttattgctcgcttacccagtgtgtccaagctgaatggcagcgttgtcacagacggcgaaagggaggattccgagagattctttatcagatattatgtggatgtgccccaagaggaggttccgtttcgttaccacgagctaattactaagtatgggaagcttgaacctttggctgaggtggacctgcgcccccaaagtagtgcaaaggtcgaagtgcatttcaatgatcaggtcgaagagatgagtattcgactggaccaaacagtggccgaactcaagaaacagctgaaaacactggtccagctcccaacaagcaacatgcttctctactatttcgaccacgaggcaccttttggccctgaggaaatgaaatattcttccagagccctgcattcttttggtatccgggatggtgacaaaatctacgtggagtctaagacgaagtag

SEQ ID NO: 25492 - DNA, 264 bp, synthetic construct
  source 1..264: mol_type = other DNA; note = Synthetic coding sequence
atgagcatcagcagcgacgaggtgaacttcctggtgtaccggtacctgcaggagagcggcttttctcattcggctttcacttttggaatagagagccatatatctcaatcaaacatcaacggagcattggtgccccccgctgccctgatctcaatcatacagaagggacttcagtacgtggaggcagaagttagcatcaacgaggacggtaccctgtttgacggaaggccaatcgagtccttaagcctgatcgacgcggtatag

SEQ ID NO: 25493 - DNA, 360 bp, synthetic construct
  source 1..360: mol_type = other DNA; note = Synthetic coding sequence
atggtgcggaccaagacctggaccctgaagaagcacttcgtgggctatcctactaatagcgatttcgagctcaagacagccgagctgccgcccctcaaaaacggtgaagtgctgctcgaggccctcttcctcacagtggacccgtacatgcgggtggtcgaatctaaaaatgtcgctctcccgaaagggaccattgttcttgctagccccggctggacaacgcattccatcagcgatggtaaggatcttgaaaaattgttgacggagtggccagatactattccccttagtttggcactgggtactgtcgggatgccgggcctcaccgcttatttcggactgctagagatctgtgggtag

SEQ ID NO: 25494 - DNA, 23907 bp, synthetic construct
  source 1..23907: mol_type = other DNA; note = Synthetic coding sequence
atggaccagccccagttcagcggcgccccccggttcctgacccggccgaaagcttttgttgtgtctgtgggcaaggacgccaccctcagctgccagatcgtgggcaacccaactccccaggtctcatgggaaaaggatcagcagccagtcgcggctggagcccgttttcgactcgcacaagacggtgacctgtataggctgaccattctcgacctggccctcggggatagcggacaatacgtctgccgcgcccggaatgccattggagaggccttcgcagctgtagggctgcaggtggatgctgaagcagcgtgcgcagagcaggccccccactttctgctaaggcccaccagtatccgcgtaagagaaggctctgaagccacctttcgatgcagggtgggtggcagtcctcgccccgctgtcagttggtccaaagacggtaggcgactcggggaaccagatggacccagagttagggtggaggagctaggcgaggcctccgccctgcgcataagagccgccaggcctagagacggcggcacatatgaagtgcgggctgaaaacccactgggggcggcttcggctgccgcggctctggtggtcgacagcgacgccgctgatactgcgagtcgccctggaacatctactgctgcactcctggctcacctgcagaggagacgagaggctatgcgagccgaaggcgcaccggcctcacccccttctacaggcacccggacttgcacagtcactgagggaaaacatgcaaggctgtcttgttacgtgaccggagagcctaaacctgagaccgtgtggaaaaaggatggccagctggtgaccgagggacgtagacatgtggtatatgaagatgcccaggagaatttcgtcctgaagatcctgttctgcaagcagtccgaccgcggcctgtacacatgcacagctagcaatcttgtcggacagacttactctagtgtgctggtcgtggtcagggaaccagcagtaccctttaagaagaggctccaggacttggaggtcagagaaaaggagtctgctacatttctttgtgaagtgccacaaccatcaacagaagccgcctggtttaaggaggaaacaagactgtgggcctctgcaaagtacgggatcgaggaggaggggacagagcgtagattaaccgttagaaacgtctcagccgacgatgatgccgtttatatctgcgaaactcccgagggctctagaacagtggcggagctcgcagtgcaaggaaacctcctccgcaagctccctagaaagaccgcggtccgagtgggcgacaccgcaatgttctgtgtagaactggctgtcccagtcgggcccgtacattggctgcgcaatcaggaggaggtagtcgccggcggcagggtggctattagcgccgagggtactcggcataccctgactatctcacagtgttgtttggaggacgtcggccaagtggccttcatggccggggattgtcagacctccacccagttttgtgtgtccgcaccaagaaaaccgcctctgcagccacccgtcgaccccgtggtgaaagcccggatggagtcaagtgttatcctgtcctggagcccacccccccatggggagaggccagtcaccattgatgggtatttggtggagaagaaaaaactcggcacatacacctggatacgttgtcacgaagccgagtgggtggcaacacctgagttgaccgttgccgatgttgctgaagaggggaatttccagtttagggtgtctgcacttaactcatttggccagtccccctatcttgaatttcctggcactgtgcatctcgcacctaagctggcggtacgtacccccctgaaagctgtgcaggcagtcgaaggaggagaggtgacattttcagtcgacctgactgtcgcctccgcgggagagtggtttctggatggacaagcactgaaagcatcatctgtgtatgaaattcactgtgatagaactaggcacaccttgacaattagggaagtgccagcctcgcttcatggcgcgcagctgaagttcgtggctaacggaatcgaaagttctatccgcatggaggttcgcgccgccccaggcttaaccgctaataagcctccagcagccgccgcacgagaagtgctagcccggctacacgaagaagcccagttactcgctgaattatcagaccaggctgcggcggtcacttggctcaaggacgggagaaccttgtctcctggcccaaagtatgaagtccaggcatccgccggcagacgcgtgcttctggttcgcgatgtggcccgcgacgacgccggcctgtatgagtgcgtctctcgaggggggaggattgcctatcaactctccgtccagggcctagccaggtttctgcataaggatatggccggtagttgtgtggacgccgtggccggcgggccggcccagtttgaatgtgagacaagcgaagcccacgtgcacgtccactggtacaaggacggcatggagcttggccacagcggagaacgatttttacaagaggacgtgggaactcggcaccgactggtggcggccaccgtgacacgacaagatgagggcacttattcatgccgggtgggtgaagattccgtggatttccgcttaagagtgagtgagccgaaagttgtgtttgccaaggagcagctggctcgcagaaaattacaagccgaggcaggtgcatcggccaccctgtcttgcgaagtagctcaggcgcagaccgaggtgacctggtacaaggacggcaagaagctgagttccagctccaaagtctgcatggaagcaaccggctgcacccgccgactggtggttcagcaagcgggtcaggccgatgccggagagtactcatgtgaggctgggggccagcgcttgagcttccatctcgatgtaaaggagccgaaagtagttttcgccaaagaccaggttgcacattccgaggtgcaggccgaagcaggcgcctccgccacgttaagctgtgaagtagcccaggctcagactgaggtgatgtggtataaggacggaaagaagctaagctccagtctgaaagttcacgtggaggcgaaagggtgtaggcgtcgcctggtggtccaacaagcaggaaagactgacgctggagactatagctgcgaggcccgcgggcagcgagtatcatttaggctgcacattacagaacccaagatgatgtttgcaaaggagcagagtgtgcacaatgaggtccaggcagaagcaggcgcctctgcaatgctctcgtgcgaggttgcccaggcccaaactgaagtcacttggtacaaagatggcaaaaagctgtcaagctcctccaaagtgggtatggaggttaagggctgcacccggagactggtcttacctcaggccggaaaagccgatgcaggcgagtatagctgcgaggctggtggccagagagtgagcttccacctccatatcaccgagcctaaaggagtgtttgcaaaggagcagtcggttcacaatgaagtacaggccgaggctggcacaaccgcaatgctgagctgtgaagtcgctcagccacagactgaggtgacatggtataaggacggaaagaagctctcgtccagctccaaagttaggatggaggtgaaaggctgcactagaaggctcgttgttcagcaggtgggcaaagccgatgcaggcgagtactcttgcgaagccggggggcagagagtgtcgtttcagctccacatcaccgagcctaaagccgtctttgctaaggagcagcttgttcacaacgaagtgagaacggaagcaggtgccagcgcaacattgtcctgtgaagtcgcgcaggctcagacagaggtgacatggtacaaggacggaaaaaagctctccagcagctctaaagtccgaattgaagccgcagggtgcatgcgacagcttgttgttcagcaggcgggccaagccgacgccggggaatatacctgcgaggccggaggccaacgactgtcgtttcatcttgatgtcagtgaaccaaaggccgtgttcgcgaaggaacagctcgctcaccgtaaggtccaggctgaagcgggagccatcgctaccctctcatgtgaggtggcccaggcccagacggaggtcacgtggtataaagatggcaaaaaactgagctcatcttcaaaggttaggatggaagccgtgggctgtacccggcgcctcgtcgtacaacaagcctgccaggctgatactggagagtactcatgcgaagcagggggtcagagactgtctttcagtctcgacgtggctgaacctaaggtcgtcttcgccaaagagcagccagtacatcgggaggtgcaagctcaggcaggggcctccaccaccctgtcctgtgaggtagcccaggcacagaccgaggtcatgtggtataaggacggcaagaaattatccttttcctcaaaggtgagaatggaagcagtgggctgcacacggcgtctggttgttcaacaggcgggacaggctgttgcaggagagtactcatgcgaagcgggttcgcaaagactgagctttcacctgcacgttgccgagcctaaggccgtgtttgctaaggaacagccagcctccagagaggttcaggccgaagccggaaccagcgcgactttatcctgtgaggtggcccaggcgcagacagaggtgacatggtataaggatggaaaaaaactttcctcatcgagcaaggtccgcatggaggccgtcggctgtactaggaggctagtggtacaggaggctgggcaggcagatgctggtgagtatagctgcaaagccggcgaccagcggttgagcttccatctacatgttgcagagcctaaggtggtctttgctaaggagcagcctgcccacagggaggtccaggcagaggcgggggccagtgcaaccctgagctgcgaggtggctcaggcgcagacggaggttacgtggtataaggacggcaaaaagttatcaagcagcagcaaggtccgtgtggaagccgtgggttgcacgcgcagattggttgttcaacaggctggtcaggcggaggccggtgagtactcatgtgaagcgggcggccagcaactcagtttccgcctccaggtggccgaacttgagcctcagatcagtgaacgcccatgtaggagggagcccctggtcgtgaaagagcacgaggacataatactgaccgcgacgctagcaaccccatccgccgccacggtgacctggcttaaggatggggtagagattaggagaagcaagcgtcacgagacggcgtctcagggagacacccacacactgacagttcacggggctcaggtcctggacagcgccatttattcttgcagggtgggtgcagagggccaagacttccccgtacaggtcgaggaggtagcagcaaaattctgcagactcctggaacctgtgtgcggcgagcttggcggcactgttaccctggcttgcgagctgagccccgcttgcgccgaggtagtgtggagatgtggaaacactcagctgcgggtcggcaagaggttccaaatggtcgcggagggaccagtccggagtctaaccgtgttgggccttcgggccgaggacgcgggagagtacgtttgtgagagtcgagatgatcacactagtgcccagctgaccgtgagcgttcccagggtcgtgaagtttatgtctggactctccactgtggtggccgaagagggcggcgaggccactttccagtgtgtagtctctccatcggatgtggcggtcgtatggtttcgtgatggcgcccttctacagcccagtgaaaagtttgccatctcacaaagcggagcgtctcattccctgaccatctcagatttagtgctggaggatgccggacaaatcactgtggaagcggagggggctagctctagtgccgccctccgcgtaagagaagcacctgttctgttcaagaagaaactggaaccacagactgttgaagaaagatcttctgttaccctggaagtagaactgacaaggccctggcctgaattaagatggacacggaacgcaacggctctcgcccccgggaaaaatgtggagattcacgctgagggagcacggcaccgcctggtccttcataacgttggctttgcggatagaggttttttcggctgcgaaacccccgacgataagacccaggccaagctcactgttgagatgaggcaagtgcgactcgtacgggggcttcaggccgtcgaggctagagagcaagggactgctactatggaggtacaactctcacatgccgacgtggacggtagctggacaagagatggtctgaggtttcagcagggccctacctgccatctggcagttcgggggcccatgcacactctcaccctgtcgggtctccggcccgaggatagcgggctgatggtattcaaagctgaaggggtgcacacatccgcccgacttgttgtcactgaactgcccgtgagcttcagtcgacctctccaggacgtagtcactacggagaaagaaaaggtaacacttgagtgtgaattaagtcggccaaacgttgacgttaggtggcttaaagatggcgtggaactgcgggccggtaagactatggccatcgctgctcagggggcatgccgctccttgacaatttatcggtgtgagtttgccgatcaaggagtatatgtctgcgatgcccacgacgcacagtcctcagctagcgttaaagtccagggccgtacatacaccctgatctatagaagggtgctcgccgaagacgcgggagaaatccaatttgtggccgagaacgccgagtctcgggctcagctgcgagttaaggagctccctgtgaccttagttcgaccactgcgtgataagatcgccatggaaaaacatcgcggcgtcttagaatgccaggtgagtagagctagcgcacaagttaggtggttcaaagggtcacaggagctccagccaggacccaagtacgagctggtgtcagacgggctgtaccgaaaactaattattagtgacgtacacgccgaagacgaggacacttacacgtgcgacgctggagacgtgaaaactagcgcccagtttttcgtggaggagcaaagtataactattgtgagagggctgcaggatgtgaccgtcatggaacccgctcccgcatggtttgaatgcgagacatccatccccagcgtgagaccacccaagtggttactgggtaagaccgtcctgcaggcgggaggtaacgtgggtttggagcaggaaggcacagtacacagactgatgctgagacgcacatgcagcactatgacgggaccagtgcactttacagtcgggaaatcccggagcagtgcccgtttggtggtcagtgatattccggtcgtcctgacacgccccctagagccaaagaccggcagagaacttcagtctgtggtgctctcctgcgactttagaccagcgcctaaagcagtgcaatggtataaggatgatacccccctcagtcctagcgagaaatttaagatgtcactagagggacagatggcagagctacgcatcctccgactgatgccagccgacgcaggcgtgtatcggtgccaggctggcagcgcccattccagcaccgaggtgacagtagaagcccgcgaagtgacagtaactggtcctcttcaggatgcggaggctacggaagagggctgggcgtcattcagttgtgaactgtcccatgaagacgaggaggttgagtggtcactgaatggcatgccactctacaacgactcttttcacgagataagccacaaagggcgtcgtcataccctcgtgctcaagtctatccagagggctgatgctggcatcgtgcgcgcgtcatcgttgaaggtctcaacaagcgcccgcttagaggtcagggtcaagccggtggtttttctgaaggccctggacgatcttagtgcagaggagcgcggcacactggcactccagtgcgaggtttccgacccggaagcgcatgttgtgtggaggaaggatggcgtgcagctgggaccatcagacaagtacgacttccttcacaccgccgggacacgcggtttagtggttcatgatgtgtctcccgaggacgctggcctgtatacatgccacgttggctccgaagagactagagccagagttagagtgcatgatttgcatgtgggcatcacgaagcggcttaaaacgatggaagtgttagagggagaaagctgcagttttgagtgcgtgctgtcccacgagtctgcaagcgatcccgccatgtggaccgtgggaggtaagaccgttggctcttcatctaggttccaggcgactagacaaggaaggaagtacattctagtggtgcgtgaggcagccccttcagacgctggagaggtggtattcagcgtgaggggactgacaagcaaggcgagtctcatagtgcgagagaggccagccgcaatcattaaaccattagaagatcaatgggtcgctccgggtgaggacgtggaattacgctgtgagcttagccgcgctggaacccctgtgcattggctcaaggatcggaaggctatcaggaaaagtcagaagtatgacgttgtatgtgaaggcacgatggcaatgctggtgatacggggagcttcccttaaagatgcaggagagtatacctgtgaagtggaggctagcaaaagtaccgcaagtctgcacgttgaggaaaaggcaaattgtttcacagaggagctgaccaatttgcaagtggaggagaaaggaacggctgtgttcacctgtaagactgagcaccctgcggcgaccgtcacctggagaaagggcctgctcgagctgcgggcttctgggaaacatcagccctctcaagaaggccttacgctcagactgacgatttccgcgctcgagaaggcggattctgatacctacacatgcgatattgggcaggctcagtctcgcgcccagcttctcgtgcaaggaaggagggtccacatcatcgaagatcttgaagacgtggacgtgcaggaaggtagctccgcaaccttcagatgcagaataagtccagcaaactacgagcctgtccactggtttctagacaagaccccccttcacgccaacgaactaaacgagatcgacgcccagcctggaggctaccacgtattaacactgaggcagctggcactcaaagattctggcactatctatttcgaggcgggcgaccaacgcgcctctgccgctctccgcgttactgagaaaccatcagtgttctctcgcgagctgacggatgctaccataaccgaaggggaggacttaacgctggtttgtgaaacttccacctgtgatattccagtgtgctggaccaaagatggcaagaccctgcgggggagtgcacgatgtcagttgtcccacgaaggacatagggcccagctgctgattactggggctacgctgcaggacagcggacgttataagtgtgaggcaggcggagcctgcagttcatccatcgttagggttcatgctaggcccgtcagattccaagaagcactgaaggacctggaagtcctcgagggaggggctgctacgctgaggtgtgtgttgagctctgtggccgctcctgtgaagtggtgctatggaaacaatgtactgcgccccggcgacaagtactccctgcgccaagagggagcgatgcttgaactggtagtccgtaatctcaggccacaggacagtggaaggtactcttgctccttcggcgaccaaaccacgtccgctactctgactgtaaccgccctccccgctcaatttatcggcaagctaaggaacaaggaggccaccgaaggggccacagccacgctgcgctgcgagttgagtaaggcagcgcctgtcgagtggagaaagggatcagaaacactgcgagacggagatcgctattgtctaagacaggatggcgcaatgtgtgagctgcagattcgcgggctcgctatggtggatgctgccgagtatagctgtgtttgtggcgaagagagaacctcggcaagtctgaccataagacctatgcccgcccacttcatcgggcggcttcgccaccaggagtccatcgaaggtgcaacagccaccttacgctgtgaactctctaaggcagcacccgtggagtggaggaagggccgcgaatcactccgggacggtgatcggcatagcttaagacaagacggcgccgtctgcgaactccagatatgtggattggctgtagccgatgctggcgagtactcctgtgtctgcggagaggagagaactagtgccacgctcactgtgaaagccctcccagcaaagttcactgaaggattacggaatgaggaggccgtggaaggcgcgacggctatgctttggtgcgaactgtccaaagtggcccctgtcgaatggcgtaaagggcctgaaaatcttcgcgacggggaccgctacatcctgaggcaggaaggtacacggtgtgagctgcagatttgtggcttggccatggctgacgccggggaatacctttgcgtgtgcggccaggagaggacatcggccacgctcacgataagagccctccccgctcggttcattgaagatgtgaaaaatcaggaggcaagagaaggggctaccgcggtgctccaatgcgagttgaacagcgccgcaccagtggagtggagaaaaggctcagagacacttcgcgatggtgatagatacagtctccgccaggacggtacaaaatgtgagcttcagatcagggggttggctatggccgacaccggagaatactcctgcgtctgcggccaagaacgcacgtctgcgatgctcacagtgagagccttgcctattaaatttactgagggacttcgcaatgaagaagcaacggagggggccactgccgtcctgcggtgcgagctctcgaaaatggcccccgttgaatggtggaaaggccacgagaccctgcgagatggtgatcgccattctctccggcaggatggcgctcggtgcgaactccagatcagaggcttggttgctgaggatgccggtgaatacctttgtatgtgcggtaaagagcgtacaagcgccatgctcacagtccgagcaatgccttccaaattcatcgaggggctgcgcaatgaagaagctacggaaggcgacacagccacactctggtgcgagctaagcaaggccgcgccagtcgagtggcgcaagggacatgagactttaagagatggcgaccgccactccttgaggcaggacggttccagatgcgaactccagattcgggggctggcagtggtggatgccggggaatattcatgtgtgtgcggccaagagcggacttccgccacactgaccgtgagagctttgcccgcccgttttatcgaagacgtgaagaaccaggaggctagagagggggcaactgccgtccttcagtgtgaactgtcaaaggcagctcccgtggagtggagaaaaggtagtgaaactctgagagggggcgaccggtattctctgcggcaggatggaacaaggtgcgagttgcagatacacggcttaagcgtcgcagatacaggcgagtatagctgtgtatgcggccaagaacgtactagcgctacactcactgtccgagctccccagccagtttttagggagcctctgcagagtctgcaggcagaggaaggctctacagctaccctgcagtgcgaactgtcagagcccacagcgaccgttgtctggagcaaaggcgggcttcagttgcaagctaatggtagacgcgagcctaggctccaggggtgtaccgctgaactcgtgctgcaggatctgcagagggaggacacaggcgaatatacatgcacatgtggtagccaggctacttctgccacgctaaccgtgaccgccgcacctgtcagattcctccgtgaactccaacaccaagaggtggacgagggcggcaccgctcacctgtgttgcgagctttcccgcgccggggccagcgtcgaatggcgtaaaggttccttacaattgtttccgtgcgccaagtaccaaatggtccaggacggggctgctgccgagctgcttgttaggggggtggagcaggaggacgccggggactatacctgcgatactggacatactcagagcatggcctcccttagtgtgagggtccctcgtcctaaattcaagaccaggctgcagtcccttgagcaagagactggggacattgcccgcctgtgctgtcagctgtcagacgccgagtccggcgccgtcgtgcagtggcttaaagagggtgttgaactccacgctggcccgaagtacgagatgcggtctcagggagcaaccagggagctgcttattcatcagctggaggcaaaagacacaggggagtacgcttgtgtgaccggcggacagaagactgccgccagcttaagggtaaccgaacccgaggtgacaatcgtccggggactcgtagacgccgaagtcacagctgatgaggacgttgaatttagctgtgaggtcagtagggctggcgcaactggcgtgcagtggtgtctgcaaggcctgcctctacagagcaacgaggtgactgaagtcgctgtgcgcgacgggcgtatccatacactccgcctgaaaggcgttaccccggaggacgcaggcaccgtgagttttcacctggggaatcatgctagctcagcccagctgactgtgcgcgctccagaagtaacaatccttgagcccctgcaggatgtacagttgtccgagggtcaggacgcatcctttcaatgcagactctcacgcgcttctggccaggaggcaagatgggcccttggaggtgtgcccttgcaggcaaacgagatgaacgatatcaccgtagaacagggaactttgcacctgctcacgttgcataaggtgaccttagaggacgctggcaccgtttcgttccatgtgggaacttgttcatcggaggcacagctgaaggtcactgcaaagaatactgtggtacgtggactggagaatgtcgaagccctggagggcggcgaagcactcttcgaatgtcagctatcccagcctgaagtggcagcacatacctggttgctggacgacgaaccagtccacacctcggaaaatgccgaagtcgtgttctttgagaacggtttaagacatctgctcctgctgaagaacttgaggccacaagatagctgccgggtaacttttctggcaggcgacatggtaacttccgcctttctgacagtgaggggctggagactggagatcttagaaccattgaagaatgcagccgttagagctggtgcgcaggcttgtttcacttgtacactcagcgaggcagttcctgtcggggaggcttcgtggtatattaatggggctgctgtgcaaccagatgacagcgactggactgtgaccgccgatggttcccaccatgctttgctacttcggagcgcccagccacatcatgctggagaagtcaccttcgcgtgtagagacgccgtagcctccgcccgcctaacagttttgggcctgcctgatccaccagaggacgcggaggttgtggctagatcaagccacaccgtgactctttcctgggcggccccaatgtcagatggaggtgggggactgtgtggataccgagtggaggtaaaggagggagcaaccggccaatggcgcctctgtcacgagctcgtcccaggacccgagtgtgtggtagacgggctcgcaccaggggaaacataccggttccgagtcgccgccgtgggtccagtgggagctggtgagcccgtccatctgcctcaaacagtgaggctcgctgagccacctaaaccagtgccccctcagccaagtgcacccgaatctcggcaggtggctgctggagaggatgtgtctctggaactggaggtcgtggcagaggcaggcgaggtgatatggcataaaggtatggaaagaatccaacccggaggtcggttcgaagttgtatcacagggacggcagcaaatgctggtgattaagggtttcacagccgaggatcagggtgagtaccactgcgggttggcccaaggatcgatctgtcccgccgctgcgacttttcaagtggccctgagtcccgcatccgtggatgaagctccacagcccagcctgccgccagaggctgctcaggagggcgacctgcacttgctctgggaagccttagccaggaagaggcgcatgtcccgagaaccaactctcgactccatcagcgagctcccagaggaggacggacgcagtcagcgcctacctcaagaggccgaggaggttgctccagatctgtcagagggttatagcacagctgacgaactggctagaacgggtgatgctgatctttcccacacttcctctgacgacgagagtagagctggcacacccagtctggttacatacctgaaaaaagccggcagaccaggtaccagtccacttgcctccaaagtgggcgcccctgccgcaccttcggtgaagccccaacaacagcaggaaccactggcagccgtgaggccacctctaggagaccttagcacaaaagacctgggagatccttcgatggacaaggctgccgtaaagattcaagcggcctttaaaggatataaggtgcggaaggaaatgaagcagcaggaaggcccaatgttttcccacacatttggtgacactgaagcgcaggtgggagatgcattaaggctagaatgtgtggtggctagcaaggccgatgtgcgcgccagatggctcaaagacggggtcgagttgacagatggacggcatcaccatattgaccagcttggagacgggacttgttctcttctgattaccggactggaccgtgcagatgctgggtgttatacatgccaggtgtctaacaaattcggtcaagtaactcactccgcatgcgtcgttgtcagtggcagcgagtcggaggccgaaagctcatcaggaggcgagctggacgatgcatttcggcgcgccgcccgaagattgcaccgcttatttcgcacaaagtctccggccgaagtctccgacgaggagctgtttctgtccgccgacgaagggcccgcggagcctgaagagccagcagattggcaaacttatagggaagatgagcatttcatttgcattaggttcgaggcgctgacggaagctaggcaggctgtcacaaggttccaggaaatgtttgccactctaggcattggtgtggagatcaaacttgttgaacaagggccacgaagagtcgaaatgtgtatctccaaagagaccccagcgcccgtagtccctcccgagccattgcctagcctgttgactagcgacgcagcaccagtgttcctgacagaactccagaatcaggaggttcaggatggctatcctgtaagctttgattgcgtggtaaccggccagcccatgccctccgtgagatggttcaaggacggaaagctgctcgaggaggatgatcattatatgatcaatgaggaccagcaggggggccatcaacttatcattacagcggtcgtccctgctgacatgggggtgtacaggtgtcttgccgaaaattccatgggagttagctctaccaaggctgaactgcgagtggatttaacctccacggattacgacaccgctgctgatgcaacggaaagctcatcatatttctccgcgcaaggctacctgtcttctcgagagcaggaggggaccgagtctaccacagacgaggggcagttgcctcaggtcgtggaagagttgagggatctccaggtagctcctggcactcgcctcgctaagtttcagttgaaagtgaaaggatacccggctccacggctctattggttcaaagatggacagcctctgacagcatccgctcacatcaggatgacagacaagaagatcttgcacactctcgagattatcagcgtaactcgagaggatagcggacagtacgccgcctatatcagcaatgccatgggcgcagcctactcaagtgcccggcttctggtcagagggccagacgaacccgaagagaaacccgcctctgacgttcatgagcaacttgtgcctccaagaatgctggaacgattcacccccaagaaggtgaagaaagggtctagcattactttttcagtcaaggtggagggcagacccgttcccacagttcattggctgcgcgaggaggcggaaaggggcgtgttatggatagggcctgacaccccaggctatacagttgcctcctcagcccagcagcactccctggtcctgcttgatgtgggtagacagcatcaggggacgtacacctgtattgcctcgaatgctgctgggcaggccctttgttccgctagcttacatgtgtccggcctccccaaggtagaggaacaagagaaggttaaagaagctttaatatccactttcttacagggcaccactcaggcgataagcgcccagggcctggaaactgctagcttcgctgaccttggcggacagcgcaaagaagagccccttgcagcgaaagaggccctagggcatctctctctcgcagaagtgggtaccgaagagtttttgcagaaactcacctctcagatcaccgagatggtatcagctaaaatcacgcaagccaaactgcaggtgcctgggggcgactccgatgaagacagcaagacacccagtgcctcaccccgccacggcaggtctcggccgagctcttctatccaggagtcctcatccgagtctgaagacggcgacgctagaggagagatctttgacatctacgttgtgactgcggattatctgcccttgggtgcagaacaggacgcgatcactctgcgcgagggacagtatgttgaagtcctcgacgccgcccacccccttaggtggctagttaggactaagcccacaaagtcatcgcccagcaggcaaggctgggtgtctcccgcatatctagacagacggctaaagctgtctccagaatggggagccgcggaagcccccgagtttccaggagaagctgtttctgaggatgagtacaaagcccgcttgtcgagcgtcattcaggaactcctcagctccgagcaggcatttgtggaagagctgcagttcctccagagccaccacctgcaacacctggaaagatgcccgcatgttccaatcgctgtggcggggcagaaggcagtcattttcaggaatgtgcgtgacattgggcggttccacagttcattcctccaagaactccaacagtgtgatacagacgacgacgtcgcgatgtgtttcatcaaaaatcaggctgcatttgagcaatatcttgaattccttgtaggccgagtccaagcagaatctgtggtcgtaagcacggctatccaggaattctacaaaaagtacgcagaggaggcacttctggctggcgacccttctcagcctccaccaccccccctgcagcattacctggagcagccagtcgaaagggtacagaggtatcaggccctcctcaaagaattgatccggaataaagcacggaatagacagaattgtgcgctgttagagcaagcctacgctgtggtgagcgcgttgccccaacgggcggagaacaagctgcatgtgagcctgatggaaaattatcctggcacactccaggcactaggggagccaattagacaggggcacttcattgtgtgggagggcgcccccggggctcgcatgccctggaaaggtcataatagacacgtgttcctctttcgcaatcacctggtgatctgcaaaccccgtcgcgattcgaggactgatacagtgagctacgttttcaggaatatgatgaagctgtccagcattgatctcaatgatcaagtggaaggagatgaccgggcttttgaggtttggcaggaaagagaagactcagtccggaaatatctgctccaagcgaggacagcgattattaagtcatcctgggtgaaagagatctgtgggatccagcagcggctggcactgccagtatggagacctcctgacttcgaagaagaactggcagactgtacagctgaacttggcgaaacagttaaactagcatgccgggtcactggcacccccaagccagtgattagttggtataaggatggaaaggctgtgcaggtggatccccaccacatcctgatcgaagaccccgacggctcatgcgcgctcatcttggactccctcactggcgtcgactctggccagtacatgtgttttgcagcttccgccgccggcaactgctccacactcggaaagatcctagtgcaggtccccccgcgatttgtgaataaggtgcgggccagtccctttgtagagggagaagatgcgcagttcacttgcacaattgagggcgctccctatccacagattagatggtacaaggacggcgccttgttgaccactggaaataagtttcagacactgtccgagccccgttccggcttgcttgtgctggttattagagcagcgtccaaagaggatctgggcctgtacgagtgcgagctggttaaccggttagggagcgcacgagccagcgccgaactgcggattcaaagcccaatgttacaggcacaggaacaatgccatcgagaacagctggtcgctgcagtcgaagacacaactttggagcgtgccgatcaagaagtaacttctgtactcaaaaggcttcttggacctaaagccccggggccaagcactggagacctgaccggaccaggaccttgccctcggggtgcccctgctttacaggaaaccggctcccagcctccggttaccggtacctccgaagcaccggccgttccacctagagtcccccagccactgctccacgagggaccggagcaggaacccgaagcaatagcgcgcgcgcaggagtggacagttcctataaggatggagggtgctgcatggcccggggctggcacgggcgaattactgtgggatgtgcatagtcacgtcgtgcgggagaccacccagcgtacttatacctatcaggccatagacacacacactgctcgccccccaagcatgcaggtgactattgaagacgtccaggcacagactggcgggacagctcagttcgaagcgataatcgagggcgacccgcaaccatccgtcacttggtacaaggacagcgtccagctggtggattcaacccgcctctcacaacagcaagaaggaaccacctattcacttgtattgagacacgtggcttccaaggacgccggagtctatacctgtttggcccaaaatacggggggccaggtgctctgtaaggctgaactgctggttttgggaggggacaacgagcccgactcagagaagcaatcccatcgacgtaagctacattccttttacgaggtaaaagaggaaatcgggcggggagtcttcgggtttgtgaagcgcgtgcagcacaaaggcaacaagattctctgtgccgcgaaatttattcctctcaggagcaggacccgggcccaggcctaccgtgagagagacattttagcggcactttcacatccgctggtgactggcctgttagaccagttcgagaccagaaagacactgattcttatactggagctttgtagtagtgaggagctgctggataggctttatcgcaagggcgtcgtaaccgaggccgaggtcaaggtgtatattcagcagctggttgaaggactgcactatcttcattcccacggggtcctgcatctcgatatcaaaccttccaacatcctgatggtgcaccccgctagagaagatattaaaatttgcgactttggttttgcccagaacatcacaccagcagaattgcagttcagtcagtatggctcccctgagttcgtgagtcctgaaatcatacagcagaatcccgtaagcgaggcgagtgatatttgggcgatgggcgtaatatcttacctttcgttaacatgctcctccccgttcgcaggtgaatccgacagagcaacgcttctcaacgttctggaaggccgcgtgagctggagttcccccatggccgcccacttgagtgaggacgccaaagactttatcaaggcgactcttcagagagccccacaagcccgaccctctgccgcacaatgcctgagccacccatggtttctgaaatcaatgcctgctgaggaggcccacttcataaataccaaacagctcaaattccttctcgccagaagtcggtggcaacggtctctgatgagctacaagtcgattttggtaatgagatctattcctgagctgctgagaggaccacccgattctccctcactgggagtcgcccggcatctctgtagggatacgggcggatcctcttcctcttcttcctcctccgataacgaactcgctccgttcgcgcgagcaaagagccttcccccgtccccagtcacacactctccgttactgcacccaagaggttttcttcgcccgtccgcatccttgcccgaggaggctgaggccagcgagcgcagcaccgaagctcctgctccacctgcttcccctgaaggcgcaggcccaccagcagctcaagggtgcgtgcctcggcactctgttatccgatctttgttttaccatcaagccggagaatcccctgagcatggggccctggcgcctggctcacgacgccacccagcacggagacgacatcttctgaaaggggggtatatagctggggcccttccaggcctgcgggagccactaatggagcaccgcgtcctggaagaggaggcagcccgggaggagcaggcgactcttcttgcgaaagcaccttcatttgagacagcacttcgtctcccagcttcgggaactcacctcgcccctggccactctcactctttagagcacgatagccccagcactcccagaccttcctctgaggcctgtggagaggctcagaggctgccaagcgccccttcaggcggcgcccccattcgcgacatgggccacccacagggcagtaaacagctgccttcaaccggtggccatcccgggactgcccagccagagcggcctagtcctgacagtccttggggtcaacccgcccccttctgccatcctaagcagggaagtgcaccgcaagagggttgctctccacaccccgccgtagccccctgtccgccaggctctttcccccctggatcttgtaaagaggcacctttggtaccttcttcccctttcctgggacaaccgcaggccccgccagcacctgcaaaagcttccccaccactggatagcaagatgggccccggcgatatatcccttcccggtcgccccaaacctggcccttgctcatcacctggcagtgcgtcacaggcatccagcagtcaggtgagttcattgagagttggaagttcccaggttggtacagagcctggcccgagcttggatgccgaagggtggactcaagaggcagaggatttatctgacagcacgcccacactccagagaccacaagagcaggccactatgcgcaagttctccctcggcggaagggggggatatgccggcgtggcaggatatggaacattcgcgtttggtggtgatgcgggtggaatgttaggacaaggccctatgtgggcacggattgcatgggctgtgagtcaatccgaagaggaagagcaagaggaggcccgtgcagagtcacagtccgaggaacagcaggaagctcgcgccgaatctcctctgcctcaggtgagcgccagaccagttcccgaggtggggagggctcctacccggtccagtcctgagccgacaccctgggaggatattggacaggtcagtctggtacagattcgagaccttagcggagacgctgaggccgccgacaccatatctctggatatctccgaagttgaccctgcgtacctgaacctgtcagatctgtacgatatcaaatatttgccatttgagttcatgatatttcgaaaagtccccaagtccgcgcagcccgagcctccatctcccatggcagaagaggaattagcagaattcccagagcccacttggccatggcccggcgaactcggaccacatgctggactggagattacagaagagagcgaagatgtggacgccctgctggcagaggcagcggtgggtcgcaagcgtaagtggtcatctccctcacggtcactcttccactttccaggtagacatctcccactggacgaacccgctgagctcgggctgcgcgagcgagtgaaagctagcgttgagcacatttcccgcattctcaaaggcagacccgagggcttggaaaaggaaggaccaccccggaaaaagcctggcttagccagcttcaggttatcgggtctgaagagttgggaccgcgcccctacatttctgcgggagctgtctgatgagaccgtggtacttggccagtcggtgacactggcttgtcaagtgagcgcgcagcccgcagcacaggcaacatggtcaaaggacggcgcaccactagaaagcagctccagagttcttatctccgcaactttaaagaacttccagctgcttacaattttggtcgttgtggccgaagatctaggggtctacacctgctctgtaagcaatgccctgggtactgtgaccaccaccggggtgctacgcaaagccgagaggcctagcagcagcccatgtccagatattggtgaagtgtacgcagatggcgtgttactggtttggaaacccgtggagagctatgggcctgtgacttacattgtccaatgctctctcgaggggggctcctggaccactttagctagcgacatctttgattgttgctatttgacaagcaagctatctagaggcggaacttacaccttccgaactgcgtgcgtgagcaaagctggtatgggaccctacagcagcccttcggagcaagtcctcctggggggcccaagccatttggcctcagaggaagagtcccagggacgctcagcccagcccttaccatctacaaagacttttgccttccaaacccaaattcagcggggtcgattctccgtcgtacgtcagtgctgggaaaaagcctcggggcgtgccctggctgcaaaaattataccctatcaccccaaggataagactgcagttctccgagagtacgaggcgctaaaaggattgaggcacccacacctggcccagttgcatgccgcatatcttagtccaagacatctcgtgttaatcctcgagctgtgcagcggacccgagctcctaccctgcttggccgaaagggccagttattctgagtccgaggttaaagattacctttggcaaatgctttccgctacccaataccttcacaaccagcacattctgcacctggatctccggtctgaaaatatgatcatcaccgagtacaaccttctcaaggtggtggacctagggaacgcccagtcactcagccaggagaaggtgctgccctccgataagttcaaagattacctggaaacaatggctccggagcttctggaggggcaaggcgccgttccgcagaccgatatctgggcaatcggggtcacagccttcattatgctgagtgcagaatacccagtgagctcagagggtgctcgtgacctgcagcgcgggctgagaaagggactcgtcagactgagccggtgctacgctggcctgagcggcggggctgtggcgtttctgaggtctacgctttgtgcccagccctggggccggccctgcgcgagctcctgcctgcagtgtccctggctaaccgaagagggacctgcttgctcccggcctgcccccgtgacgtttccgacagccaggctgagagtcttcgtgcggaatagggaaaagagacgcgccctgctttataagcgccataacttagcccaggtgaggtag

SEQ ID NO: 25495 - DNA, 750 bp, synthetic construct
  source 1..750: mol_type = other DNA; note = Synthetic coding sequence
atgaccgaggacagccagcggaacttccggagcgtgtactacgagaaggttggatttcggggcgtcgaggaaaaaaagtccctggagatcctgctgaaggatgacaggcttgacacagagaaactctgtacatttagccagcggttccctttaccttcaatgtacagagcacttgtctggaaagtattacttggcatactgccaccccaccacgagtcacacgccaaggttatgatgtaccgcaaggagcagtacttggatgtgctgcacgcgctgaaggttgtgcgattcgtcagcgacgcgaccccccaggctgaggtgtatttgaggatgtatcaactagagtctggcaagttgccccgcagcccttcttttcctctggagccggacgatgaagtgttcctcgctatcgccaaggcgatggaggaaatggttgaggacagcgtcgactgttattggatcactagacggtttgtgaatcagctaaacactaaatatagggactctctgccccaactcccaaaagcattcgagcaatatctgaatctggaagatggacggctgctgacccatctgagaatgtgcagtgccgcccctaagctcccctatgatctctggttcaagaggtgcttcgccgggtgcttgcctgagtcatcgcttcagcgcgtatgggacaaagtcgttagtggctcctgcaaaatcctggtcttcgtcgctgtcgaaatattgctcacatttaaaattaaatag

SEQ ID NO: 25496 - DNA, 417 bp, synthetic construct
  source 1..417: mol_type = other DNA; note = Synthetic coding sequence
atgagcagcctgggcgccagcttcgtgcagatcaagttcgacgacctgcagtttttcgagaactgcggcggagggtccttcggatctgtgtatagagcaaagtggatttcacaagacaaagaagtcgcggtgaagaaactcctgaagatcgagaaggaagccgagattctgtctgtcctgagtcataggaatatcatccagttctacggcgtgatcctcgagccaccaaattatggtattgttacagagtacgcttcactgggttcactgtacgactacataaacagtaacagatcggaagagatggacatggatcatatcatgacatgggcaaccgacgtcgccaagggcatgcactatctgcacatggaggccccagtgaaggttattcacagagatctgaaatcaagaaactag

SEQ ID NO: 25497 - DNA, 1122 bp, synthetic construct
  source 1..1122: mol_type = other DNA; note = Synthetic coding sequence
atggccagcagcagcgtgccccccgccaccgtgagcgccgccaccgccggtccgggaccggggtttggttttgcttcgaagacaaaaaaaaagcacttcgtccagcagaaggtgaaggtatttagggcagccgatcccctggtgggtgtgtttctctggggggtagcccactctattaacgagctgtcacaggtgcctccccccgtcatgctgctcccggacgacttcaaagccagctcaaagattaaggtgaacaaccacttgtttcatcgggaaaatctgccctctcactttaaatttaaggaatactgcccccaggtcttccgcaacctcagggaccgattcggaatagacgatcaggactacctgtatatcgtgaagtgccatggcaatacgctgctgccccagttcctgggcatgtatagagtgagcgttgacaacgaggattcctacatgctggtcatgcggaacatgttctcacacaggctgcctgtccatcgcaagtatgatctaaagggttctctcgtctctagggaagcaagcgataaagaaaaagtgaaagagctgcctacgctcaaggacatggatttcctcaacaaaaaccagaaagtatatataggcgaggaggaaaagaagatttttcttgagaagcttaaacgggatgtggaatttctcgttcagctgaaaattatggattactcactccttctggggatccacgacatcatccggggctcagaacccgaggaagaggcccccgtcagggaggatgagtctgaggtggacggtgattgctccctcactggccctcccgccctggtggggagctacggcacctcacccgagggaattggagggtacatccatagccatcgcccattaggacccggggagttcgagagttttatcgatgtctatgcaattcgtagcgccgagggcgccccccaaaaggaagtttacttcatgggactcattgacatcttgactcagtacgatgcaaaaaaaaaagcagcacacgccgctaagacagtcaagcacggcgccggcgctgagattagcacagtccacccagagcagtacgccaagcgattcctggatttcattacaaacatattcgcgtag

SEQ ID NO: 25498 - DNA, 549 bp, synthetic construct
  source 1..549: mol_type = other DNA; note = Synthetic coding sequence
atggaggagatccccgcccaggaggccgccggcagcccccgggtgcaatttcagtctctcgagactcagagcgagtgtctctccccagaaccccagtttgtgcaggacacagacatggaacaggggctcactggtggctttcccatatccaaacccgatggtatctcccagctcgaacaggacctccaggtgtttgacctggagacaaaaacacgggaagtgctgagagacgactgttccgatggagagacccgcgaagaaaacaagctcctaatcccgaagcagaaaatctcagaggaggtgcactcatacaaagtccgcgtgggacgtctgaaacacgatatcacacaggtgccggagaccagggaagtatataaatccgaagaccgcctggagcgcctgcaggagattttgcgtaaatttctgtacctagaacgtgaatttagacaaattaccatctccaaagaaacattcacctctgagaaaaacaatgaatgccatgagcctgaaaagagtttttcactggactccactatcgatgccgactag

SEQ ID NO: 25499 - DNA, 2253 bp, synthetic construct
  source 1..2253: mol_type = other DNA; note = Synthetic coding sequence
atgagcctgggcaaggcctacggcgtggagagccacgtgctgagcccggcagaaaccaaaactttatatccactgatgaatgtggacgatctttatgggaccctgtatgtgcctcacgacggtactatggaccctgcgggcacatgcacaacccttgctcgggctgccagtgcacgcggggcccaagtaatagagaactgccctgttactggaattagggtgtggaccgatgatttcggagtgcgtagagtggctggtgtggagacccagcacggatcgatccagaccccttgtgtagtaaactgcgctggtgtgtgggcaagcgctgtcggtagaatggcgggagtgaaagtgcctctggtagcaatgcatcatgcctacgtagttacagaacgcatcgagggcattcagaacatgccgaacgtgcgagaccacgacgcttccgtttacctgcgtctccagggggatgccctgtccgtgggcggatatgaagccaacccaatcttttgggaagaggtgtcagacaaatttgcattcgggttgtttgatctagattgggaagtgtttactcagcatatcgagggcgctattaacagagtgccggtgctggagaaaactggaatcaagtctactgtgtgtggacctgagtcttttacgccagaccacaagcctctgatgggggaggcaccagaactgcgcggcttttttttagggtgcggctttaactcggccgggatgatgttaggtggaggctgtgggcaggagctggcacactggatcatccatggccggcccgagaaagacatgcacggatacgatattaggcgcttccatcactctctcaccgaccacccccgctggatccgagagcgaagtcacgagtcatatgctaagaattattcagtcgtgttcccccacgatgagcctctcgccgggcggaacatgaggcgcgaccctttgcacgaagaactgttgggccagggatgcgtgtttcaggaaagacacggctgggagagacccggttggttccatccaaggggtcctgcgcctgtgcttgaatacgactattacggcgcctacgggagcagggcccacgaggactatgcttacaggcggctcctggctgacgaatacactttcgcatttccgcctcaccatgataccataaagaaggagtgtctggcttgtcgcggagcagccgcagtattcgatatgtcttatttcgggaagttttatcttgtcggcttggatgctcggaaggccgcagattggctcttcagcgccgacgtctccagaccgcctggatccacggtgtatacttgcatgttgaaccacaggggtgggaccgaaagcgacctgactgtgagccggctggcaccaagccatcaggcctcccccttggctccagccttcgagggtgatggctattacctggctatgggcggggcggttgcacagcacaactggagccatataactaccgtccttcaggatcaaaaatcccagtgtcagttaattgacagcagcgaagacctgggcatgatttccatacagggtccagcaagcagggccattctccaggaagtgttagatgccgacctcagcaatgaagcgttccccttctccactcacaagttactcagggccgcgggccacctcgttcgggccatgcggctgtccttcgtcggagagctggggtgggagctgcacattccaaaggcatcatgtgttcccgtatatagagctgttatggccgcgggcgctaagcatggtctaatcaatgctgggtatcgtgccatcgactctctgtctattgaaaagggttaccgtcattggcatgcagaccttcggcccgatgatagccccctggaggcgggccttgcctttacgtgcaaactaaagtctcccgtaccctttctcggacgggaggctctagagcagcagagagccgcgggccttaggcgccgcctcgtgtgttttactatggaggataaggtacctatgttcggactggaagccatctggcgtaacggccaagttgttggccatgtccgacgtgccgacttcggcttcgctatcgacaaaacaattgcttacgggtatattcatgacccatccggaggtcccgtgagccttgatttcgtaaaatctggagattatgcactggagcgcatgggggtgacatatggcgcacaggctcacctgaagagtccattcgaccctaataacaagagggttaaaggcatatactag

SEQ ID NO: 25500 - DNA, 459 bp, synthetic construct
  source 1..459: mol_type = other DNA; note = Synthetic coding sequence
atgagcgtgacctacgacgacagcgtgggcgtggaggtgagcagcgattccttctgggaggtgggcaactataagcgcacagttaagaggatcgacgacggccatcgactctgcagtgacttaatgaattgtttacatgaacgggcccgaatcgaaaaggcgtacgcacaacagctgaccgagtgggcccgacgatggagacagttggttgaaaaaggaccacagtacggcactgttgaaaaggcatggatggcctttatgagcgaggcggaaagagtttccgagttacacctggaggtcaaggcctccctaatgaatgacgactttgagaaaataaagaattggcagaaagaggctttccacaagcagatgatgggtggcttcaaagagacaaaggaggctgaagatggctttagaaaggcacagaagccatgggccaaaaaactaaaggaggtatag

SEQ ID NO: 25501 - DNA, 1620 bp, synthetic construct
  source 1..1620: mol_type = other DNA; note = Synthetic coding sequence
atggccaccagcgcccccctgcggagcctggaggaggaggtgacctgctccatctgtctagactacctgcgagaccctgtcaccatagattgtggacatgtgttttgccggagctgcacgacagacgttcgacccatctcgggcagccgccctgtgtgcccgttgtgtaaaaaaccgtttaaaaaggagaacataagaccggtgtggcagctggcttccttagtcgagaacatcgaaaggttgaaggttgacaaggggaggcaacccggcgaggtaacacgcgaacagcaggacgctaagctatgcgagagacatagggagaagctgcactattattgcgaggacgatggaaagctgctgtgcgtgatgtgccgagaaagccgggaacacaggccgcatacggcagtgctcatggaaaaggccgcgcagccgcatcgggaaaagatcctcaaccatttgtccactctcagacgtgacagggataaaattcaggggttccaggctaagggcgaggcagacatactcgcagcgctgaaaaagctacaggatcagcgccagtatatagtggcagaatttgagcagggacaccaattcctgagggaaagggaggaacatctcctcgagcagttggcgaagctcgagcaggaacttaccgagggaagggagaagttcaagtctcgcggtgtgggggagctggcccgcttagccctcgtaatttccgagcttgagggaaaggcgcagcagcccgctgcagaactgatgcaggatactagggactttctaaaccggtaccctaggaaaaagttttgggtgggaaagcccattgcccgtgttgtaaaaaagaaaacgggcgaattctcagacaagttgctgtccttacagagaggattaagggaattccaggggaagctgcttcgcgacctggagtataagaccgtgtctgtcacactggaccctcagagcgcgagtgggtaccttcaactgtccgaggactggaaatgcgttacctacactagcttatacaagtcagcgtatttacacccacagcaattcgactgtgagccgggggtcttgggatccaaagggttcacttggggtaaagtgtactgggaggtggaggtagaacgcgaagggtggtctgaggacgaggaggagggcgacgaggaagaagagggggaagaagaagaagaggaagaagaggcagggtacggggatggctatgatgattgggagacagacgaggatgaagagagcctcggcgatgaggaggaggaagaggaggaagaggaggaggaggttctcgagtcctgcatggtcggagtggcccgcgattcagtgaagagaaaaggagatctgtcacttcggccagaagacggcgtctgggccctacgactatcctcctcaggtatttgggcaaatacgtcccccgaggccgagttgttccctgccctgcgtccacgccgtgtcggcatcgcacttgattatgaaggtggtacagtgacgtttaccaacgccgagagccaagaacttatctatacttttaccgcgacattcactagaaggctggtacccttcctgtggctgaaatggcccggaacccgcctgctgctgcgcccatag

SEQ ID NO: 25502 - DNA, 1266 bp, synthetic construct
  source 1..1266: mol_type = other DNA; note = Synthetic coding sequence
atgatggaggacaacaagcagctggccctgcggatcgacggcgccgtgcaaagcgctagtcaggaggttacaaacttgcgggccgagttgacagctacgaaccgccgtctcgcagaactctccgggggcgggggccctggtccgggccccggcgccgccgcaagtgcatcagcggctggggactccgcggctaccaacatggagaatccgcaactgggagcccaagtgctgttgcgggaggaggtgtccagactgcaagaagaggtgcacctgctgcggcaaatgaaagagatgttagccaaggaccttgaagaatctcagggcggcaaaagttctgaggtcctctctgctactgaactacgagttcagcttgcacaaaaggaacaagagttagcaagagccaaagaagcacttcaggccatgaaagcggaccgcaagcgtctgaaaggggaaaaaacagacctggtctcccagatgcaacaattgtacgctaccctggagtctcgagaggagcagcttagagatttcatccggaactacgagcagcatcgcaaggaatcagaagatgccgtgaaggctttggccaaggagaaggatttactcgagagagagaagtgggagcttcgccggcaggccaaggaggccactgatcatgctacggcattgcgtagtcagctggatctgaaggataatagaatgaaggagctagaagcagagctggccatggccaaacagtccctggcaacactgaccaaggacgttccaaagcgccactctctggctatgcctggtgagactgtcctaaacggtaaccaggagtgggtcgtccaggctgacctgccacttactgcagccatccggcagagccagcaaaccctctatcacagtcaccccccacatcctgcggacaggcaagccgtgcgcgtatcaccatgccacagcagacagccatccgtgatttcagatgcctctgcagcggagggagaccgtagctccactccttctgacattaactccccacgccaccgcactcactcattatgcaacggggactcaccgggcccagtacaaaaaaatctgcacaacccaatagtccaaagtcttgaggacttggaggatcagaagcgaaagaagaaaaaagaaaaaatgggattcggatctatctcaagagtgttcgcccggggcaagcagagaaaatccctcgaccccggtttgtttgacggtactgccccggattattatatcgaggaagacgccgactggtag

SEQ ID NO: 25503 - DNA, 492 bp, synthetic construct
  source 1..492: mol_type = other DNA; note = Synthetic coding sequence
atggtgggcggcggcggcgtgggcggcggcctgctggagaacgccaacccactaatttatcaaagatccggggaacgcccagtaacagccggcgaagaggacgaacaggtgcccgactccatcgacgctcgagaaatttttgatttgattcggtccattaacgaccccgaacatccccttacccttgaagagctgaatgttgtggagcaggtaagagtgcaggtcagtgacccagaaagtacagtggcagttgcctttacccccacgattccacactgtagcatggcgacactgattgggctgtctataaaggttaaattgcttagaagcctccctcaacgcttcaaaatggatgtacacattacacctggaacccacgctagcgaacacgctgtgaacaagcagctggcggataaggagagggtcgcagccgcgcttgagaacacacatcttcttgaagttgtgaaccaatgcttatctgctagaagctag

SEQ ID NO: 25504 - DNA, 207 bp, synthetic construct
  source 1..207: mol_type = other DNA; note = Synthetic coding sequence
atgagcatcagcagcgacgaggtgaacttcctggtgtaccggtacctgcaagaatctggtttcagccacagtgcattcacattcggcattgaatcacatatttcccaatctaatataaacggcgccctagtgccacctgctgctctgatatcaatcatccaaaaagggctgcaatacgtggaggccgaggtgagcattaacgagtag

SEQ ID NO: 25505 - DNA, 534 bp, synthetic construct
  source 1..534: mol_type = other DNA; note = Synthetic coding sequence
atgagcagcaacgagtgcttcaagtgcggccggagcggccactgggcccgtgagtgtccgactgggggaggtcgggggcggggcatgcgctccaggggtcggggaggatttacgagtgaccgcgggttccagttcgtttcttcaagccttccggacatctgttatcgatgcggcgagagtgggcatctcgcgaaagactgcgatctacaagaagatgcctgttacaactgcgggcggggtggccacatcgctaaagactgcaaggagcctaaaagagaaagagaacagtgttgttataattgcggtaagcctggccatctggctcgggactgtgatcatgccgacgaacagaagtgttattcatgtggcgaatttggccacatacagaaggactgcactaaggtgaaatgttatcggtgcggggaaacgggacacgtcgctatcaactgctccaaaacctcagaagtaaattgctaccggtgtggagaaagcggtcaccttgcaagagaatgtactattgaggccacagcatag

SEQ ID NO: 25506 - DNA, 429 bp, synthetic construct
  source 1..429: mol_type = other DNA; note = Synthetic coding sequence
atgacccagctgcggcaggtgctggagagccggctgcagcggcccttgccggaggaccttgcgagactgtggcctgtggtgatcctgtgccagctggcgaatcagctacgaccccgtagtgtgccatttatccacgtcccttcaccagctgttccaaaactgtcggccctaaaagcacgcaaaaacgtggaatctttcttggaggcctgccggaaaatgggagttcctgaggcagacctgtgctcaccttccgacctgctgcaggggaccgcacgaggcctcaggacagccttggaggccgtcaagcgggtaggtggaaaggccctgcctcccctctggccccccagtgggcttggtggtttcgttgtattctatgtggtcttgatgctacttctgtacgttacttataccaggttgctcgggagctag

SEQ ID NO: 25507 - DNA, 1296 bp, synthetic construct
  source 1..1296: mol_type = other DNA; note = Synthetic coding sequence
atggaggacctgaagggccccaccgtgagcagcttcctgagcggcatgaaaacagaactataccccggggtgaccgcaatcgacatgatgtacaaagaagggcttcacggggtggataatggaatactgatctttgacaaagtgcggatcccaagagagaatctcttagataaattcgggagtgtcgccccagatgggcagtatcactcccctatccggaacaagagcgctagatttaatgcaatgttagccgctttgaccccctccaggctggcggtggcatttcaggccatgggcgccatgaagctgggactgacaatcgccatcagatacagccattcccggcggcagtttggccccaagacgaaagaagaagttaaaatcatagaacatcaaacacagacacttcgccttatgccacatctggccactgcactggctctgacctttgtgtcgaggtatgccggcgcattactggacgaagatgtcttccaagggaaggagctggtgaattctcgcagcctccaggcactagttgccggcctgaaggcttatagtacctgggagaacatcaggtgcctccaggattgcagggaatgtacaggcggaatggtagtgggtcgcgagctcttagctcaatacaccaaacagtatgaagagaaacctctctttggactgctgcagaattgggccgaaagtgtcggagacaaactaagaacatcttttcttgcgttcaacatggacaccgtggacgacctagcattcttgctgaaggccgtgaagttcagagagagggttcttcagagaggtttagttgctcgaatctattacaaagtaaagaccaaaaaagaagattttttccacgcttggaacagttgcctgcatcatgtcgcctccctgtcactggctcatacccatcgggtgacactggagcagttctctctggcggtgaagtcctgtcccgaccaggaggaccagaccttactgatgaagttctgcctcctgtacgggactaagctggtgttccaggagagggcatggtacctggaacataagtaccttacacccatggccagtacccgtattagaaatcagctcttggacctttgcgattccgttaaggacgacgcccgcagagtcatcagcactttcaacataccacacacttacctccacgcacccatcgccgggatatccaaccccagggccgcatgggctttttacccagcccccttgcagccacgacctcgtgaggaagcaagatcacgccggccgaaactgggtgccaaactgtag

SEQ ID NO: 25508 - DNA, 1443 bp, synthetic construct
  source 1..1443: mol_type = other DNA; note = Synthetic coding sequence
atggccgagctgcagatgctgctggaggaggagatccccggcggcagaagagcgctgttcgactcttatactaacttggaacgggtggctgactattgcgaaaataactacatccagagcgctgacaaacagagggcactcgaggagaccaaggcatacaccacccagtctcttgccagcgtggcgtacctgatcaacacgctggctaataacgtcttgcagatgttagatatccaggcttctcagctacggaggatggaatctagcattaaccacatctctcagactgtggacatccataaggagaaggtggcgcgccgcgagattggcatcttgaccaccaataagaatacaagtcggacccataaaatcatcgctccagcaaatttggagcggcctgtcaggtacatcaggaagcccatcgactacaccatcctggacgatatcggacacggcgtaaagtggcttctgcgttttaaagtgagcacacagaacatgaaaatgggcgggcttccccgcacaactcccccaacccagaaaccgccttctccccctatgtctggaaaaggaacattaggccgccattctccttaccggactctggagcctgtaaggccaccagtggtgcctaatgactacgtgccatcccccactcgaaatatggcccctagccagcagtcacccgtgcgtacggcaagcgtcaatcagagaaacaggacatactcgtcaagtgggtcatccggtggcagccatccctcttccagatctagttcgcgcgagaactctggcagcggttccgttggagtaccaatcgcagttcctacaccaagccccccgtccgtgttccctgacgccgcagccgggggtgcacagaccctggccgacgggttcactagtcccacgcctcctgttgtgtcaagtacgccaccaactggacaccccgtccaattctattctatgaacaggccagcctcccgccatacaccccccaccatcggcggctctctcccgtaccgtagacccccatccattacatctcagactagtctgcagaatcagatgaatggtggtcctttctacagtcaaaaccctgtttccgataccccacctccacctccacccgttgaggaaccagtcttcgacgagagcccgcctccaccccctcctcctgaggactacgaggaagaagaagccgccgtggtcgaatacagcgacccatacgccgaagaagacccaccttgggcaccccgatcttacctagagaaagtcgtggccatatatgactacacgaaggacaaggaggatgagcttagcttccaagagggcgcaatcatttacgtgattaaaaagaacgatgacggatggtacgagggcgtgatgaatggtgtgacaggactgttccctggaaattacgtcgagagcattatgcattactctgagtag

SEQ ID NO: 25509 - DNA, 3102 bp, synthetic construct
  source 1..3102: mol_type = other DNA; note = Synthetic coding sequence
atggacgaggaggagaaccactacgtgagccagctgcgggaggtgtacagcagctgcgataccaccggcacgggatttctcgaccgccaggaactgactcagctctgcttgaagttgcacctagagcagcagctaccagtactcctccagactctgctgggaaatgaccacttcgccagggtgaattttgaagagttcaaagaaggcttcgttgcagtcctatcctctaatgcaggcgtgcgtccatccgacgaggattctagcagtctcgaatccgctgcctcctctgcaatcccccccaaatatgtgaatggaagcaaatggtacgggaggcgtagccgcccggagctgtgtgatgccgctacagaggctcgtagagttccagaacagcagacccaagcatcactgaaatcacatttgtggcgctcagcatctctggaaagtgtcgagtcccccaaatcagatgaggaggcagagtccaccaaggaggctcagaatgagctgtttgaggcccagggccaactgcagacctgggatagcgaggatttcggctcgccccagaagtcgtgtagccccagtttcgacacgccagagagccagatcagaggggtgtgggaagagctcggagtcgggagttccggacatttaagcgagcaagagttagcagttgtgtgtcagtcggtaggacttcaagggctggagaaagaagaactggaggatctgtttaataagctggatcaggacggggatggcaaggtgtccctggaggagttccagctggggctcttcagccacgagcctgccctgctcctagagtcctctacacgagttaaaccttcaaaggcttggtctcattatcaggttcccgaggaatccggctgtcacaccacaactacatccagcttggtctctctttgctcctctctgcgtctatttagttctatcgatgacggctctggctttgccttccccgaccaagtactggccatgtggacccaggagggcatccagaacgggcgggagatcctacagagcctggatttttcagtggatgaaaaggtcaacttgctcgaattgacatgggcgctggataatgagctcatgacagtcgattccgccgttcagcaagcggccctggcttgttaccaccaagagctgagttaccagcagggtcaggtcgagcagctcgcaagggaacgtgacaaggcccgacaggatctggagagggctgaaaagagaaatcttgaatttgtaaaggaaatggacgattgccatagcactctggaacaactcaccgaaaaaaaaattaagcatcttgagcaagggtatagagagcgcctgagtctgctacgatccgaggtggaggccgagcgggaactgttctgggagcaggcccatcgccaaagagcagcactcgagtgggatgtcgggcgcctgcaggcagaggaggcaggcctgcgcgagaaactaaccctcgctttgaaggagaattcacgcttacagaaggaaatcgtggaggtggtggagaagctctccgattctgaacgcctggctctgaagctgcaaaaagaccttgaattcgtgctgaaggacaagctagagccacagagcgcagaactgctggcccaggaagaacggtttgctgcagtcctgaaggagtatgagcttaagtgcagggatctgcaagacaggaacgacgagctgcaggccgaactcgagggattgtgggcccggctcccgaagaacagacacagcccctcttggagcccggacggcaggaggcgacagttgccaggattgggtcccgccggaatttcattccttggtaattccgctccagtttccattgagacggaactgatgatggaacaggtaaaagaacactatcaggatctgagaacgcagcttgagacgaaggtcaactactatgagcgggagattgccgccctgaaaaggaactttgaaaaggagcgtaaggatatggaacaggctcgaagaagagaggtctctgtgctggagggccagaaggccgatctggaggagttgcacgaaaagagccaggaagttatttggggactccaagagcagctccaagacacagctcgcggcccagagcctgagcagatggggttagccccctgctgcacacaagcactgtgcgggctcgccttgcgacatcactcccaccttcagcagatacgcctcgaatttcatcggctcagtgaggaaaacacccttcttaagaatgacctgggcagagtcaggcaggagttggaagcagccgagagcacacacgacgcccagcgcaaagagattgaggtcctcaaaaaggataaagagaaagcatgcagtgaaatggaggtgctgaaccgtcagaatcagaattacaaggaccagctctcccaactcaacgtgagggtgttacagctggggcaagaggcgagtactcaccaggcccagaacgaggaacaccgcgtaacaattcaaatgcttacccagtcactggaagaagtcgttagatccggacaacagcagtctgatcagatccagaagcttagagtggaactggagtgcctgaaccaggaacaccaatctcttcagctcccatggtctgagcttacacagaccctagaagagtcccaggatcaggtgcagggcgctcatttgagactgcggcaagcccaggcccagcacctccaggaggttagattggtcccgcaggatagagttgcagagttgcatcgattgttgtcactgcagggagaacaagcccgtaggaggcttgacgctcagagggaagaacacgagaaacagttaaaagcaactgaggagcgggttgaggaagctgaaatgatcctcaaaaacatggagatgctcttgcaagaaaaagtcgacaagctgaaagagcaattcgagaaaaacaccaaaagcgaccttcttcttaaagagctgtatgttgaaaacgctcatctggttcgcgcacttcaggctaccgaggagaaacagcggggagccgagaaacagtcgcgcctgctagaagaaaaagtcagggccttgaataagctggtgtctaggatcgctcctgcagccctcagcgtctag

SEQ ID NO: 25510 - DNA, 627 bp, synthetic construct
  source 1..627: mol_type = other DNA; note = Synthetic coding sequence
tgctgcggctgcagcggcggctgcggcagcggctgcggcggccggggcagtggttgtggaggttgcgggagcggatgcggcggctgcggttctgggtgcgggggttgtggcagcggatgcgggggttgcggggggtgcggttctggttgtgccggttgcggtggatgcaagggtggatgtggatcatgtggcggttcaaaaaggggttgtgtgtcctgtggtgtctcgaagggggcctgcgggagctgtggcggcagtaaaggcggttgcggcagttgcggcggcagtaagggcggttgcgggtcctgtggcggaagcaaaggcggttgtggcagctgtggaggttcgaagggaggatgtggctcatatggctgttcacaatcctcatgctgcaaaccgtgttgctgcagtagcggctgcgggagctcttgctgccagagcagttgttgcaagccctactgctgtcagtcgtcatgctgtaagccttattgttgccaatctagctgttgcaaaccctgttcttgctttagcgggtgcggctcgagctgttgtcaatcaagttgctataaaccttgttgttgccaaagctcctgttgtgtgcccgtctgctgccagtgcaaaatctag

SEQ ID NO: 25511 - DNA, 642 bp, synthetic construct
  source 1..642: mol_type = other DNA; note = Synthetic coding sequence
atggccggcagccccgagctggtggtgctggaccccccctgggacaaagagttggctgccggcacagaatcccaggcgctagtaagtgccacccctcgagaggattttagggtgaggtgcacgagcaagcgggccgtcaccgaaatgctgcagctgtgtggcagattcgttcagaagctaggggatgccttgcctgaggaaatccgcgagccggccctgcgcgacgcacagtggacctttgaatcagctgtgcaggagaatatcagcattaacgggcaggcgtggcaggaggcaagcgacaattgctttatggactctgatatcaaggtgctggaggaccagtttgatgaaatcattgtcgacatcgcgaccaagaggaaacagtatccgaggaagatccttgagtgcgtcattaaaactattaaagctaaacaggaaatcctgaagcagtaccaccccgtggtgcatcctcttgacttaaagtatgatccggacccggtcctcaatggaaatgcttttaattttagcccttttaatatgatgttggcggtggacctttcgtatatggtttttattactagctcaccatcctacggaaaattcgaaatgcagagaggcaattcctctaaaggtgatcagtag

SEQ ID NO: 25512 - DNA, 3720 bp, synthetic construct
  source 1..3720: mol_type = other DNA; note = Synthetic coding sequence
atgaccatctggcagatgcagaagcaggcccagcggggcagccccgcaagaactcattccatgatgtctctcagtgtgcgaccacaacggaggctgcttagcgctcgtgtgaaccggagtcagtccttcgctggagtactgggctcccacgagcgcggaccccgctcatttcctgtgtttagtccccctgggccaccgcgcaaacctcctgcgctttcccgggtgagtaggatgtttagcgttgctcatccagccgctaaagtcccccagccagaacgcttagatttggtgtacaccgcattgaagaggggactgacagcctatctggaagtccaccagcaggaacaagaaaagctgcaggggcagatacgggagagcaagcggaactcccgactgggcttcctgtatgatctggataagcaggtcaaatcaattgagcgctttctccggaggctcgaattccacgcttccaaaatcgacgaactttatgaggcatattgcgtgcagcgtaggcttagagacggcgcgtataacatggttagagcctataccactggcagccctggctcaagagaagcccgcgattctctggcagaagccacccgggggcaccgggagtacacagaaagtatgtgcctgctcgagtctgagctggaggcgcagcttggcgagttccatttgcggatgaaaggattggccggctttgcacgtttgtgcgttggtgaccagtatgagatctgcatgaaatacggccggcagcggtggaagctccgcgggagaatcgagggatctggtaaacaggtttgggacagtgaagagacgatcttcctgcccctcctaaccgaattcctgtccattaaggtcacagagttaaagggcctggccaaccacgtggtggtcggatccgtgagctgcgagaccaaggacctgttcgcagcgctcccccaggtcgtcgcagtagacatcaatgacctaggcaccattaaactgagtctggaggtaacatggtcacccttcgacaaggacgaccagccttctgcagcatcctcagtgaataaagccagtaccgtcaccaagcgcttttcgacatatagtcagtctccccccgacactccctctttacgagagcaggcgttctacaacatgcttagacgtcaggaggaactggaaaatggtacagcctggtctctgtcatcagaatccagtgacgactctagctctccacagttgtctggcactgccagacattcaccagcacccagacctctcgtacagcagccggagcctctccccatacaggtcgcctttagaaggccggagaccccctcttcaggaccccttgacgaggaaggagccgttgcccccgtactggcaaatgggcacgcaccgtactcacggacgttgtctcatatcagcgaggcctcagtcgatgctgcccttgctgaagccagcgtggaggccgtgggcccagagtccctagcgtgggggccaagccccccaacgcatccagcccccacccacggggagcatccctcccccgtgccaccagccctggatccaggacactccgcgacttcgtctacactcgggaccactgggagcgtcccgaccagtaccgacccagcaccgagtgcacacctggactccgtccacaaaagtaccgactctgggccaagtgagctcccgggcccaactcacacaaccacaggtagtacgtactcagcaatcactacaacccattctgctccaagcccgctgacgcacaccaccaccgggtctacccataaacctattatttctacccttacaacaacaggcccaaccttgaatataatcggacctgtgcagaccaccacatccccaacgcatactatgccttcccccacacataccaccgccagccctacccacactagcacatcgcccacccatacccctacctcccctacacacaaaacaagtatgtccccccctacaactacttctcccacaccttccggtatgggcttggtccagacggccactagtcccacccaccccacaacctcacctacacatccgaccacatctccaattctgattaatgtgtcaccttccaccagcctggagttggccacgctgagctccccctctaagcattccgaccccaccctgcccgggaccgattcactcccatgctctcctcccgtgagcaatagctatacccaggccgaccctatggctcctcgtacaccacacccatctcctgcacattcttcccgaaagcctcttacttcccccgcaccagacccctcagagagtaccgtccagtctctttcccccacaccctccccccccactcctgctccccagcatagcgacctttgcttggctatggcagtgcagacacccgtgcccacagctgctggcggctctggagacaggtcgcttgaagaggcacttggggctctgatggccgcacttgatgactatagggggcagtttccggagctgcaggggctagagcaggaagtaaccaggctggaaagcctgctaatgcagcgacagggactaacccgaagccgagccagctccctctcgatcactgtggagcatgctctggagtctttttcattcttgaacgaggatgaagacgaggataatgatgtccccggggaccgtccccctagctcccccgaagcgggggccgaagatagtatcgattccccaagcgccaggcctttgagtactggctgtcccgctctggatgccgccctcgtccgtcacctttaccattgctcccgactgcttctgaaacttggaaccttcggaccacttcgttgtcaggaagcctgggccctggagagacttctgcgggaagccagggtcctggaagccgtgtgtgagttctctagacgctgggaaattccagctagctccgcacaggaagttgtgcagttttctgcctcccggccaggtttcctgacgttttgggaccagtgcacagagcgactaagctgtttcttgtgccctgtagagagagtgctgcttaccttctgcaaccagtacggcgctcgactgagtctgagacaacctggactcgctgaagcagtttgcgtgaagttcttagaggatgcactcggtcaaaagcttccacgccggccacagccggggcccggcgaacaattgactgtgtttcagttttggtcctttgtggaaacactcgactccccgacgatggaggcctacgtgacagagaccgccgaagaagtcttgttagtccgcaacctaaactccgatgatcaggccgtagttctcaaggccctgcgcctggcacccgaagggagactccggagggacgggctgcgggccctgtcgagtttattggttcacggaaacaataaagtgatggccgcagtgagcacccagctgagatccctctcccttggccccacctttagagagagagcgctgctttgctttttagaccaattggaggatgaggacgttcagacgcgggtggcaggctgcctggctctcgggtgtatcaaagcacccgaggggatcgaacctcttgtctatctgtgccagacagacactgaagccgtgagagaagccgccagacagtcactccagcaatgtggagaagaggggcagtcggctcaccggcgcctggaggagtccctagacgccttgcccagaatttttggccccggttccatggcgtcaacagccttctag

SEQ ID NO: 25513 - DNA, 732 bp, synthetic construct
  source 1..732: mol_type = other DNA; note = Synthetic coding sequence
atggtgaccgactacggcgccttcatcaagatccccggctgccggaagcaggggctggtgcaccggacgcacatgagctcctgccgcgtggacaaaccgtccgagattgtagatgtgggggacaaagtttgggttaagttaatcgggcgtgaaatgaaaaacgaccggattaaggtgtcattgtctatgaaggtggtgaaccagggcacagggaaagatctcgatccaaacaacgtgattatagagcaagaagagcggcgcagaagatcatttcaggactacaccgggcaaaagattaccctcgaagcagtgctgaacactacgtgcaagaagtgcgggtgtaaaggaagagtcaagccacttcctttcccgaggtttagcccctgtggttggacgctgttttggaagaaggaggccgcacagtgccactttgctaaggactgctttatgcaacccgggggcacgaagtacagtctgattccggatgaggaggaggagaaggaagaggcaaagtcagcagaatttgaaaaacctgacccgaccagaaaccctagtcgtaaaagaaagaaggaaaagaagaagaagaaacatcgtgacagaaaatcatccgactctgatagcagcgactcagagagtgacacgggcaaacgagcacgccatacttctaaagattcaaaggcggctaaaaagaagaagaaaaaaaagaagcataaaaagaaacacaaagagtag

SEQ ID NO: 25514 - DNA, 330 bp, synthetic construct
  source 1..330: mol_type = other DNA; note = Synthetic coding sequence
atggaggagatccccgcccaggaggccgccggcagcccccgggtgcagtttcagagccttgagacacaatcagaatgtctgtcccccgagcctcagttcgtccaggatacagatatggaacagggcctgacagggggatttccgatcagtaagcctgacgggatcagtcagctcgaacaggacctgcaggtgtttgaccttgagacaaagacgcgtgaagtgctgagagacgactgtagtgatggggaaacacgagaagagaataaactcttaatccctaagcagaagatctctgaggaggttcactcatacaaggtgagggtggggtag

SEQ ID NO: 25515 - DNA, 4134 bp, synthetic construct
  source 1..4134: mol_type = other DNA; note = Synthetic coding sequence
atgagcctggagcgggagctgcggcagctgagcaaggccaaggccaaagctcagagagcgggccaaagacgggaagaagcagccctgtgccatcaacttggcgagttacttgcagggcacggcaggtacgccgaagcccttgagcagcactggcaagagctgcagcttagggagagggcagacgacccgttggggtgcgctgtggcccaccgtaaaattggagaacgtctcgccgagatggaagactacccagccgccttgcagcatcagcaccagtatttagaattagcgcatagtctccggaatcatactgaacttcagagagcctgggccaccatcgggagaacacatctggatatttatgaccactgtcagtcaagggatgcgctccttcaggcccaggctgccttcgagaaaagtctcgccatcgtggacgaagagctggaaggcactctggcgcaaggtgaactgaatgaaatgcgtacacggctctatctcaatctgggcctgacctttgagagcctccagcagacagcactgtgcaacgattacttcaggaaaagcatcttcctggctgagcagaatcacctgtacgaagacctatttcgggcacgatataacctaggaacgatccactggagggcaggtcagcacagccaggctatgcgttgcttggagggggccagggaatgcgctcacaccatgcgtaaaaggttcatggaatccgaatgttgcgtcgtgattgcccaggtgttacaagatcttggcgacttcttggccgccaaacgcgctctgaagaaggcttacaggcttggatcccagaagccagtgcagagggccgctatctgtcaaaatctccagcatgtgcttgccgttgtgcgactgcagcagcagctcgaagaggccgagggacgggatccgcaaggggccatggttatctgcgaacaactcggagatcttttctcaaaggcaggagactttccaagagctgcggaggcttaccaaaagcaattgcgcttcgcggaacttctcgaccgccccggggccgagcgagccattatacacgtgagtctcgcaacaacgctgggggacatgaaagaccaccacggtgcggtccgccattatgaggaagagttacggcttcggagtggcaacgttctggaagaggccaagacatggttaaatatcgccctgtctcgcgaagaagcaggagatgcatacgaactgctggcaccctgtttccagaaagccctctcttgtgcgcagcaggcccaaaggcctcagcttcagcggcaagttttacagcacctccacactgtgcagttgcgactccagcctcaagaagcaccagagaccgaaacaaggcttcgggaactctctgtcgctgaggacgaggatgaagaggaggaagcggaggaagccgccgccacggccgaatctgaggcactggaggcgggcgaggtggagttgtctgagggagaagacgatacagacggtctcaccccccagttggaggaggacgaggaactgcaggggcatcttggtcgcagaaagggatctaagtggaataggcggaatgacatgggtgagacactgctccatcgagcctgcattgagggccagctccgccgggtgcaggaccttgttcggcagggccaccccctgaacccacgcgattattgtgggtggacacctttgcatgaggcctgcaattatggccacctggagattgtcaggtttctcttggaccacggagcagccgtggatgacccaggtgggcaaggatgcgaaggaatcacccccttgcatgacgctttaaactgtggccattttgaagtcgcggagctgctgcttgagagaggtgcatccgtgaccctacggactcggaaggcgagcgctcgatggcggaggtgcagctctggcaagctttatcgccgcgatttggatctggaaacacgccagaaggctagagccatggaaatgctgctgcaggccgccgcctccggccaagacccccactctagtcaggcctttcacactccctcctccctgctgtttgacccagaaacaagtcctccattgtctccctgcccagaaccccccagcaactcaacgagactgcctgaggcttctcaagctcatgtgcgggtgagccccggacaagcagcccctgccatggctagaccccgtcgttcacgtcacggcccagctagcagcagtagcagctcagaaggagaagatagtgctggaccagcccgcccatcacaaaaaaggccacggtgcagcgcaacagcacagagagtggccgcatggacaccaggaccagccagtaaccgggaggccgccacagccagtactagcagggcagcttatcaggccgctattaggggcgtgggcagcgctcagtccagactgggaccggggccgccccgagggcattccaaggccctcgccccacaggcggctctgatcccagaagaagagtgcctggccggcgattggttggagttggacatgcccctcaccaggtcacgccgacctcgcccccgcggcacgggtgataacagacggccttcttctaccagcggttccgactcagaggaatcacgcccccgcgcgcgcgcaaaacaggtgagattgacttgtatgcaaagttgctccgcccctgtgaatgccgggccaagttcactcgcgtccgaaccccctggttcaccctccacacctagagtgtccgaaccctcgggggactcatctgcagcgggacagcccctcggcccagctccccctccacccattcgcgtgcgagtacaggtgcaagatcaccttttcctcattcccgtgcctcacagttctgacacacactccgtcgcatggctggcagaacaggccgcccagagatactaccaaacttgtggcttgttgccgcgcttgacacttcggaaggagggggcgttgctggctccacaggatctgataccagatgttcttcagagcaatgatgaagtcttggcagaggttacatcttgggacctgccacccctcacagacagataccgtcgggcttgccagtccttagggcaaggcgaacatcaacaggtgctccaagctgtggaattacagggcctgggcttgtcattcagcgcctgctccctcgccctggatcaggctcagctgacccctctgctacgggcactaaagcttcatacagccctgcgtgaactgcgactggctggcaaccggctgggcgacaaatgtgtcgccgaattagttgccgccctagggaccatgcctagtctcgcgctgctcgatttgagctcaaaccatctcggacctgaaggcctccgacagctggcgatgggcctgcctggacaggctactctgcaaagtctggaggagttggacctcagtatgaaccctctaggagatggttgcggacagtccttggcctcattgctccatgcttgtcctttgctgtccaccctgcgcttacaggcctgcggcttcggcccttcttttttcctcagtcaccagaccgccctgggatccgcattccaggatgccgaacatctcaaaaccctatctctcagttacaatgcgctgggcgcgcccgctctagccaggacgctccagagtctcccggccgggaccctcctgcacctggaacttagctcagtggctgcagggaagggcgacagtgacctcatggagccagtattcaggtacctggccaaggagggatgcgccctggcgcacctgaccctgagcgccaaccacctgggcgacaaggctgtgagggacctgtgtcgctgcctttctctgtgtccttcactgatatctcttgatctgtccgcaaaccccgaaatttcctgtgcctccttagaagaactcctgtccacactgcagaagcggccacaggggttaagctttctgggactgagcggatgtgctgtgcaaggacctctagggctaggcttgtgggacaagattgccgcacagttgagggagcttcagctttgcagccgacgtctatgtgccgaggaccgagatgcactgcgtcagctccaaccctcccggcccggacccggcgagtgcacactcgaccacgggagcaagctgtttttcaggagactgtag

SEQ ID NO: 25516 - DNA, 675 bp, synthetic construct
  source 1..675: mol_type = other DNA; note = Synthetic coding sequence
atgcccaccctgttcaagggcgtgtggggcgtggtggagcacagcagggctctcggtaggttttgtccggcatgtctaccctccgggccgcacctacacactcagcctgcactcggaacagcagaaatgactctattgtctagccagagtagttctttagtggccccatcgggcagtgtaagcgctgaaaatcccgagcaaaggatgctagaaaagagggccaaagtcattgaagagctcttgcagacagaacgcgattatataagagacttagaaatgtgtatagagagaataatggtgccgatgcagcaggcccaggtccctaacatcgatttcgaaggactgttcggaaacatgcagatggtgatcaaggtgtctaagcaactgctcgccgcactagagatttccgatgccgtgggcccagtgtttctggggcacagagatgagctggaaggaacctataagatatactgtcaaaatcacgacgaggctattgcgctccttgagatttacgaaaaggacgagaaaattcagaaacaccttcaggactcacttgcggatctcaagtccctctataacgagtggggatgtacgaattacatcaacctggggagttttctcataaagccagtgcaacgcgtcatgcgctaccctctgctgcttatggagctgtag

SEQ ID NO: 25517 - DNA, 354 bp, synthetic construct
  source 1..354: mol_type = other DNA; note = Synthetic coding sequence
gtgtgcggcgactacctgctgagccggatggacgtgaccagctgcatctcatacaggaactttgcgtcttgcatgggcgactcaagactactgaacaaggtggacgcgtatattcaagagcatctcctacaaattagcgaagaggaagaatttctaaaactgccccgtctgaaactagaagtaatgttggaggacaatgtgtgtctaccttccaatggtaaactgtatactaaggtgatcaattgggtccagcgctccatctgggaaaacggggactccctggaagaactgatggaggaagtgtcctttaaagttaacggtatccaaccattcctcaaaatcattttactttag

SEQ ID NO: 25518 - DNA, 285 bp, synthetic construct
  source 1..285: mol_type = other DNA; note = Synthetic coding sequence
atgctgtgctggggctactggagcctgggccagcccggcatcagcacaaatcttcaaggtatcgttgctgagccgcaggtctgtgggttcatttcagatagaagtgtcaaagaggtcgcatgcggcgggaaccacagtgtctttctgctggaagatggcgaggtgtatacctgtggcttgaatacaaagggccagttgggccacgagagagaagggaacaaaccagaacaaatcggcgctctagccgaccagcatattatacatgttgcttgtggggaaagctag

SEQ ID NO: 25519 - DNA, 747 bp, synthetic construct
  source 1..747: mol_type = other DNA; note = Synthetic coding sequence
atggccaccagcgcccccctgcggagcctggaggaggaggtgacctgttctatctgcctagattatctgcgcgacccagtgaccatcgattgtggacacgttttctgcagatcttgcaccacagatgtcaggcctatatccggctcaaggcccgtgtgtcccctgtgcaagaaaccattcaaaaaggagaacattaggccagtttggcagcttgcttccctggtggaaaacattgagcgactcaaagtggacaaagggcgccagccaggcgaagtcacccgcgaacagcaggatgccaagctgtgtgagcggcatagagagaagctccattactactgcgaggacgacgggaagttgctgtgtgtgatgtgcagggagagtagagaacaccggcctcacaccgcggtgcttatggagaaggccgcacagccacatcgggagaaaatcctgaaccatctatctaccctcagaagagacagagataaaatccaggggtttcaggccaagggcgaggctgacatacttgcggcactcaagaagctgcaagatcaaagacaatacattgttgccgaattcgagcaggggcaccagttccttagagagcgcgaggagcatttactcgaacagcttgccaaactggagcaagaactgacggaaggcagagagaagttcaaatcacggggagtgggtgagctggcccggctagctctggtcatttccgaactggagggcaaggcgcagcagtag

SEQ ID NO: 25520 - DNA, 2814 bp, synthetic construct
  source 1..2814: mol_type = other DNA; note = Synthetic coding sequence
atggagcccgacatcatccggatgtacagcagcagccccccccccctggataatggagcggaggatgacgacgacgatgagtttggggaatttggggggtttagcgaggtcagtccatcaggagttgggttcgtggacttcgatactccagactatacccggcctaaggaggaatttgttccctcgaaccactttatgcccattcatgaattcagtgagaacgtggatagccttacgtcgttcaaatcgattaagaacggaaacgacaaagacattaccgccgagttgtcagctccagtcaaagggcagagcgacgtgttgctgtctaccaccagcaaggagatcatctcaagcgagatgttggccacatccattgacggcatggaacgcccaggcaacctcaacaaagtagttgagcagcgccaaaatgtaggaaccctggaaagtttctctccgggtgacttcagaacaaatatgaatgtcgtgcaccagaacaagcagcttgagagttgtaatggagaaaagcctccctgtctggagatcctgaccaacggcttcgccgtattagagacggtgaatcctcagggaaccgacgatttagacaatgtggccgacagcaaaggccggaagcccctatccactcatagtacagagtacaacttagacagcgtcccgagccccgccgaagaattcgctgatttcgctacattctccaaaaaagagcggattcagttggaagagattgagtgcgctgtccttaatgaccgagaagctttaactattcgtgagaacaacaaaatcaatagggttaatgaactgaactcggtgaaggaagtcgctttgggacgttccctggacaataagggcgacacggacggcgaggaccaggtatgtgtcagtgaaatcagcatcgtgactaatcggggatttagtgtggagaaacaggggctgcctaccctgcagcaggatgagttcctgcagtcaggggtccagtccaaggcttggtctctggtggacagcgcagataatagcgaggccatcagacgggagcagtgcaaaactgaagagaaactcgacctgttaacgtctaagtgcgcccacctttgcatggactctgtcaaaactagtgacgatgaagtggggagccccaaggaggagagtaggaaatttacaaacttccagagccccaacatcgaccccacggaagaaaatgacctcgacgattctctcagtgtcaaaaacggggatagttcaaacgactttgtcacctgcaacgatatcaacgaagacgactttggcgactttggcgattttggctccgctagcgggtctacccctccgttcgttacaggcactcaggacagtatgagcgatgccacttttgaggaaagcagcgaacattttccccacttctctgagccaggtgacgatttcggcgaatttggtgacatcaatgccgtgtcctgtcaggaggaaacgatcttgacaaagtccgacctgaaacaaacatccgataatctgagtgaagaatgtcagctggctaggaagtccagtggaactgggacggagcccgtagccaagctcaagaacggccaagaaggcgaaatcggtcacttcgactctgttcctaacattcaggatgattgcaacggcttccaggacagcgacgacttcgccgactttagttcagccggcccaagtcaggtggtagactggaatgcatttgaagatgaacagaaggatagttgctcttgggctgcattcggagatcaacaggccaccgaaagtcatcatagaaaagaggcatggcagtcccaccggaccgacgaaaatatagatacccccgggacaccaaagacgcattcggttccttccgcaactagcaaaggggctgtggcttctggccatctgcaggaatccgcaacctccgtccaaactgccctgctgaacaggctggaacgaatatttgaagcctgtttcccatcaattctggtccccgacgcggaggaggaggtgactagcctaaagcacctgctcgaaactagcacactgcctatcaagacccgggaggctttgccagaatccggagagctactggatgtttggactgagctgcaggatatccacgacgcccatgggttgcggtaccagtggggaggctcccattctaataaaaagctcctatccagtttgggcattgatacgagaaacatcctgttcaccggaaacaaaaagcagcctgtgatcgttccaatgtacgcagctggtctgggaatgttagagcccacaaaggagcccctgaagccacttagtgcagccgagaaaatcgcatcaataggccagactgccacaatgtccccagatatgaatacgtgtacgtctgaccaatttcaggagtccttgccccctgtccaatttgattggtcaagcagtggactgactaacccactcgacgcttccggcggctcaacacttctgaacttagatttcttcggacctgtggacgattcatctagttccagttctactactatcccaggggtcgaccctgagctgtatgaactcaccaccagcaaactggagatctctacaagcagccttaaggtgactgacgcatttgcgcgtctcatgagcacggtggagaaaacaagtacaagtacttccaggaaaccgaagcgtgaggagcatctttcagaggaggctattaaagtgattgctggactgcccgatctgactttcatgcacgctaaggtgctcatgttccctgctacactgacgccaagcactagctcacaggaaaaggccgacggctag

SEQ ID NO: 25521 - DNA, 114 bp, synthetic construct
  source 1..114: mol_type = other DNA; note = Synthetic coding sequence
atggccagcgaggacatcgccaagctggccgagaccctggccaagacccaggttgcagggggccagctgagtttcaaaggaaaaagtcttaagctgaatactgctgaggactag

SEQ ID NO: 25522 - DNA, 309 bp, synthetic construct
  source 1..309: mol_type = other DNA; note = Synthetic coding sequence
atgcagaccagcagcagccggagcgtgcacctgagcgagtggcagaagaactactttgcgattacatcaggcatctgtaccggtccgaaagcagacgcctatcgggcacagattctccgcatacagtatgcttgggccaatagcgaaatttctcaagtgtgtgccaccaagctgtttaagaagtacgcggagaaatactcagccattatcgactccgacaatgtggaatctggccttaacaattacgcagagaatattctgactctagctgggtcacagcagacagattcagataaatggcaatcttag

SEQ ID NO: 25523 - DNA, 474 bp, synthetic construct
  source 1..474: mol_type = other DNA; note = Synthetic coding sequence
atggccaccagcgcccccctgcggagcctggaggaggaggtgacctgcagcatctgcttggactacttgcgggacccagttactattgactgcgggcacgtcttttgtagaagctgcaccaccgacgtgcgtccgattagcgggtctcggcccgtatgtccactttgtaagaaaccctttaaaaaggaaaatattaggcctgtttggcagctagctagcctcgtggagaacatcgaaaggctgaaggtggacaaaggcagacagccaggagaggttacaagggaacagcaggacgccaagctgtgtgagcgacacagagagaagctccactattactgcgaggatgacggcaagctgctgtgtgtgatgtgtcgagaatcgagggagcaccggccacatacagccgtgctgatggagaaggcagctcaaccacaccgtgagaagatcctgaatcacctatcaacacttagatag

SEQ ID NO: 25524 - DNA, 348 bp, synthetic construct
  source 1..348: mol_type = other DNA; note = Synthetic coding sequence
atggccggcgcccccaccgtgagcctgcccgagctgcggagcctgcttgccagtggccgcgcaagattatttgatgtcagaagtcgggaggaagccgcagccgggaccatacctggcgccctgaatatcccagttagtgaactagaaagcgctctacagatggagcccgcagcattccaggctctgtactcggcggaaaagcctaagttggaggatgaacacctggtctttttctgtcagatgggcaagcgaggcttgcaagccacccagttggctcggtctctggggtatacaggcgccaggaattacgccggggcatatcgagagtggttggagaaagaatcatag

SEQ ID NO: 25525 - DNA, 4767 bp, synthetic construct
  source 1..4767: mol_type = other DNA; note = Synthetic coding sequence
atgctgccccccaagcacctgagcgccaccaagcccaagaagagctgggctcctaacctttacgagcttgacagtgacttgacgaaagagccagatgtaattattggtgaaggacccactgacagcgaattctttcatcagcggtttcgtaacctgatttacgtcgagtttgtggggccacgcaaaaccctgatcaagctcaggaacttgtgtcttgactggctccagcctgagacgcggacgaaggaggaaataatcgagctgctcgtgctcgagcagtacctgactatcattcctgagaaactcaagccttgggtcagagcaaaaaaaccagagaactgtgagaagctggtgactcttctggagaattacaaagaaatgtaccagccagaggacgataacaatagcgatgtgacctcagatgatgacatgacgcgcaaccggagagaatcttccccacctcatagcgtgcactcatttagcgaccgcgattgggatcgtcgagggcgatccagggatatggagcctcgggatcgctggtcccatacacgcaatccaagatcccgcatgcctcctcgagacctgtctcttcctgtggtcgccaaaacatcatttgaaatggatcgcgaggacgatagggattcgagggcttacgagtccaggagtcaggatgcagagtcttatcagaacgtcgtcgatctcgcggaagaccggaagccacataacactatccaagacaacatggaaaattatagaaaactgctttctctggttcagctggcggaggatgacggccacagccacatgacccagggacactcctcccgcagcaaacgcagcgcttatccatccacatcgagaggcttaaaaaccatgcctgaggctaaaaagagcacccaccgcagaggtatctgcgaagacgaaagtagtcacggagtcattatggaaaaattcattaaagatgtgtctcgctcatcaaagagtggaagggctagagagtctagcgaccggtctcagcgcttccccaggatgagcgacgacaactggaaagatatttccttaaacaaaagagagtccgtgatacagcagcgggtgtatgaaggaaatgcttttcgaggaggattcagattcaattccacattggtgagtcgcaagcgggtgctggagaggaaacgacgctatcattttgacactgatgggaagggaagcatccacgaccaaaagggctgccctaggaagaagcctttcgagtgtggcagtgagatgagaaaggcgatgagtgtttcttccctcagtagcttgagcagcccctcctttacggaatcacaacctatcgactttggggctatgccatacgtgtgcgacgagtgcggacgcagtttttccgtcatctccgaattcgttgaacatcaaattatgcacacgcgggagaacctctacgagtatggggaaagctttatacactccgtggccgtctctgaagtgcaaaagtcccaggtcggaggcaaacgtttcgaatgcaaagactgcggcgagacattcaataagtcagcagcactggccgaacacaggaaaatacatgctcggggatatctcgtagagtgcaaaaatcaagagtgcgaggaggcgttcatgccttccccaacgttctcggagctccagaagatctatggaaaggacaagttctacgagtgcagagtttgcaaggagaccttcctgcattcttcagcattgatcgagcaccagaagattcactttggagacgacaaagacaacgaaagagaacacgaaagggagcgcgaaagggaaagaggggagacctttcggcctagtcccgctctgaatgaattccagaagatgtacggtaaagagaaaatgtacgaatgcaaggtgtgtggagagacctttctgcatagtagctctctgaaagaacaccaaaagatccacaccagaggaaatcccttcgagaataaaggtaaggtgtgcgaagagaccttcatcccaggacagtccctgaagcgtaggcagaaaacctataataaagagaaactctgtgactttactgacgggagagatgcctttatgcagtctagtgagctaagtgagcaccaaaaaattcactcaaggaagaatctgtttgagggaagggggtacgagaagagcgtcatccactccgggcctttcacagaaagccagaagagtcacaccatcacccgacctctggaatctgacgaagacgagaaggctttcacaatatcaagcaacccctacgaaaatcaaaagatccccacaaaggaaaacgtgtatgaggcaaagtcctatgaaagaagcgtgatacactctctcgccagtgttgaggcccagaagagtcactcagtagccggtcccagtaaaccaaaagtcatggcagagtccaccattcagtctttcgatgccattaaccaccaacgcgtgcgggctggaggcaatactagtgaaggacgggagtatagccggtctgtcattcatagcctggtggcctccaaacctccgagaagccacaacggcaatgaactggtcgaaagcaatgagaagggggaatcaagtatctacatctcagacttgaacgataaaaggcagaagatccccgctcgagaaaacccctgtgagggcggaagcaagaatcgtaactatgaggattcggttatacaatccgtgtttcgagccaaaccacagaaatccgtgccgggggaaggatcaggcgaattcaagaaagacggcgaattctccgtgccttcctcaaatgtgcgggaataccaaaaagcccgcgccaagaagaagtatatagagcatcgttccaatgagacctcagtgatccatagcctcccttttggggaacaaactttccgcccccgggggatgttgtacgaatgtcaggagtgtggtgaatgctttgcccactcaagcgatctcacagaacatcagaagatccatgaccgcgaaaaaccttccggatcccgtaattacgaatggtccgtgatcagatcactggcacctactgatccgcaaaccagctacgcacaggagcaatacgcaaaggagcaagccagaaacaaatgtaaggactttcggcagtttttcgcgactagcgaagacctcaacacgaatcaaaagatctacgatcaggagaagtcacacggcgaagagtcccaaggtgaaaatacagacggagaggaaacacatagcgaagagacccacggccaggaaactattgaagatccggtgatacaggggtccgatatggaggaccctcaaaaggacgatccagatgacaaaatctacgagtgcgaagactgtggcctggggtttgtcgaccttaccgatttaacggatcatcagaaggtgcattctcgaaaatgtctcgttgactcccgtgagtacacccactcagtaattcacacccactcgatatccgagtatcaacgcgactacaccggagagcaactctacgaatgcccaaagtgcggcgagtcctttattcattcatcatttctgttcgagcatcagcggatccacgaacaggaccagctgtattctatgaagggatgtgatgacgggttcatcgcactcttacccatgaagccccgaagaaacagagccgccgaacgtaatcccgcgctcgctggcagcgcaatcagatgcctattgtgtggacagggcttcatacattctagcgccttaaacgaacacatgaggcttcaccgcgaggatgatctcctcgagcagtcccaaatggccgaagaggcaatcattccagggctcgctctgactgaatttcagagaagccagacagaagagcgcctttttgagtgtgcggtgtgcggcgagtctttcgtaaatcccgcggaactggcggatcacgtgactgtgcacaagaacgaaccctacgagtacggctcttcttacacacatacttcgttcctgactgagcccctcaagggcgccattccattttacgaatgtaaggattgtgggaagtcatttattcactccactgtactcacaaagcacaaagagctgcatttggaagaggaagaggaagacgaagccgccgcggccgccgcagccgcagctcaggaagtggaagctaacgttcacgtacctcaggtggtccttaggatccagggtctcaacgtagaagcagcggaaccagaagtggaggccgctgagccagaagtcgaggccgccgagcctgaggtggaagcagcagagccgaacggtgaagccgagggccctgacggtgaggccgccgagcctattggtgaggcaggtcagcctaatggggaagccgaacagcctaatggtgatgccgatgaaccagatggggcaggaatcgaagatcccgaagaaagagccgaggagccagaaggaaaggccgaggaacccgaaggcgatgctgatgagccggatggagtcggcatagaggaccccgaggaaggagaagatcaggaaattcaagtggaggagccctattacgactgccatgagtgtacagagacgttcacttcttccacagcattctctgagcatctgaagacccacgccagtatgataatcttcgaacctgcaaatgccttcggggagtgttcagggtacattgagcgagccagtactagcactggcggagccaaccaggctgatgagaaatatttcaagtgcgacgtgtgtggccagctcttcaacgacagactgtcgcttgctcgtcaccagaacactcacacagggtag

SEQ ID NO: 25526 - DNA, 381 bp, synthetic construct
  source 1..381: mol_type = other DNA; note = Synthetic coding sequence
atggccgccgccaccggcgaccccggcctgagcaagctgcagttcgcgcccttctccagcgctctggatgtaggtttctggcacgagcttacacaaaagaaactgaatgaatatcggctggacgaggctccaaaagatatcaaaggatattactacaacggtgattccgcaggactgccagccagattgacgttggagttttctgcctttgacatgtccgcccccactcctgctcggtgctgccccgcaatagggacactttataacacaaataccttagagagctttaagactgccgacaagaagctgcttttggagcaggccgctaatgaaatctgggagtcaatcaaaagcgggacagctctggagaacccagtctag

SEQ ID NO: 25527 - DNA, 1434 bp, synthetic construct
  source 1..1434: mol_type = other DNA; note = Synthetic coding sequence
atggccgacggccaggtggccgagctgctgctgcggcggctggaggcttctgatggcggactggactctgctgagctcgctgcggaactcgggatggagcaccaagctgttgtcggagcagtgaagtccctccaggccctaggcgaagtgatcgaagctgaactgcgtagtacgaagcactgggaactaactgctgaaggcgaagagatcgcccgagagggtagccacgaagctagagtgtttcgcagtatacccccagagggcttagcacagagcgagcttatgaggctcccctcaggcaaggtaggcttttccaaggcaatgtcgaacaaatggattagagtcgataagagcgccgcagatggccccagggtctttcgtgttgtggacagcatggaagacgaggtgcagcgtcgactgcaactggtccgaggagggcaggccgaaaaattgggggaaaaagaacggagtgagctcaggaagaggaaactgcttgctgaggtgggttcctggcgggacaggccttttaagccatataacttcctcgctcatggggtactcccagatagcggacatctacacccactgctaaaggtcagaagtcagttccgccaaattttcctcgagatgggcttcacagagatgccaactgataatttcatagagtctagtttttggaactttgacgccctgtttcaaccacagcagcaccctgccagggaccagcacgacacttttttcctccgggaccctgcagaagcactacagctgcccatggattacgttcagcgcgtgaagcgcacacattctcagggcggttatgggtcacagggttacaaatacaattggaagctagacgaagccaggaagaatctgctgcggacccatacaacatctgccagtgcccgggcgctctatcgacttgcccagaaaaagccatttactccagtaaagtacttctctattgacagggtctttaggaacgaaactttggatgcgacgcatctggccgagtttcaccagatcgaaggggttgtcgccgatcatggactgacactcggccacctgatgggagtcctacgggaattctttacaaagctcggaattactcagttgcggtttaagccagcgtataacccttacactgaaccatccatggaagtgttttcatatcatcaaggcctgaaaaaatgggtagaagtggggaacagtggcgtgtttaggcccgaaatgctcttacccatgggccttcccgagaacgtgagcgtgatagcatggggattgtcactggagaggccaaccatgattaagtatggaatcaataatatacgtgaactggtcggacacaaggtcaatctacagatggtgtacgattctccactctgtcgactggatgccgaacctaggcctcctccgacgcaggaggccgcctag

SEQ ID NO: 25528 - DNA, 3195 bp, synthetic construct
  source 1..3195: mol_type = other DNA; note = Synthetic coding sequence
atgcccgtgcaggccgcccagtggaccgagttcctgagctgccccatatgctacaatgaatttgacgagaacgtgcacaaacctatcagtctgggctgttcccacactgtctgtaagacatgcctaaataagctgcaccgtaaagcctgcccctttgatcaaactgctatcaatacagatatagacgtgctaccagttaattttgctctgttacagctggtcggagcccaggtgcctgatcaccagagtatcaagctgagcaacctcggagagaacaaacattacgaggttgccaagaagtgcgtggaggatctggctctgtatctgaaaccactgagcggcgggaagggtgtagccagtttgaaccagtccgccctctcacgccctatgcagcggaagttggtcaccctggttaactgccaactcgtcgaagaagaaggccgagtacgtgccatgcgagccgctcggtcattaggcgagcgcaccgtcactgaactcatcttgcaacatcaaaatcctcaacagctgtcagccaacctctgggcggcagtccgagcgagaggatgtcagtttctcggaccggccatgcaagaagaggctctgaagctggtgctcctggccctggaggacggctcagccctctcgcgaaaggtactagtgcttttcgtagtgcagcgcttggagccccgattcccgcaagcatctaagacttcaattggacacgttgtgcagctcctgtaccgagcttcgtgctttaaagttactaaacgagatgaggattcaagcctgatgcaactcaaggaagaattccgaagttatgaagccctccggagagagcatgatgcccagatagttcacatagctatggaggctggcctaaggatctctcccgagcagtggtcgtccttgttgtatggagatctcgctcacaagtcccacatgcagagcatcatagacaaactgcagagccctgagagcttcgccaagagcgtgcaggagttgactatagttctgcaaagaactggggatcctgcaaacctaaatcggctgcgtccacacctggagctcctggcgaatatagaccctaaccctgatgctgtgtctccaacctgggaacagttagagaatgccatggttgcggtcaagacggtagtccacggcctggtagattttatccagaactattcacgaaagggacacgagacaccgcagccacaacccaattctaagtacaaaacgagcatgtgcagggatttacggcagcagggcggctgtccaagagggactaactgtaccttcgcgcattcacaagaggagctagagaagtaccgtctgagaaataaaaagataaacgcgacagtacggacatttcctctcctcaacaaagtcggcgtaaataacactgtcacaactaccgctgggaacgtgattagtgtgatcgggtcaaccgagaccacggggaagatcgtgccatccaccaacggtatctccaatgccgagaactccgtctcacagcttatttcccgatctaccgattcaacactccgagcactagagaccgtcaagaaagttgggaaagtgggtgccaacgggcagaacgcagcaggcccatccgccgacagcgtgaccgaaaacaagattggctctccgcctaagacaccagtttcaaacgtcgcagcaaccagcgctggacccagcaatgtgggcaccgagttgaatagtgttccccagaaatcatctccttttctgacgagagtgccagtatatcctccacattccgagaatatccagtactttcaggatcccagaacccagattcccttcgaagttccccagtaccctcagacgggatactacccacctcccccaaccgtgcccgcaggcgtggccccttgcgtgcctcgcttcgtcagatccaataacgttcctgagtcttctctgccacctgcatcgatgccttacgccgatcattattccacattctcacccagggaccggatgaatagtagtccatatcagccccctccacctcagccgtacggaccagtaccgcctgtaccatccgggatgtacgctcccgtttacgattcccgcaggatatggagaccccctatgtaccaacgagacgacataattagatctaattctcttccacctatggatgtgatgcactcctccgtctatcaaacatctttgcgtgaacgctataacagtctagacggatattacagcgtcgcctgtcaaccgccaagtgaaccacgcaccaccgtacctttacctagggaaccctgcggtcacctcaaaacttcctgtgaagaacagatccggagaaaacctgaccagtgggctcagtaccacacacagaaagctccactcgtttcttcaacccttcccgtggccacccagtcccctacgccccccagccccctgttcagtgtggacttcagggcagacttctctgaaagtgtctcgggaaccaagtttgaagaagaccacctcagccactactccccctggtcctgtggtactattggatcgtgtatcaacgctatcgactcagaaccaaaggatgttatcgccaactctaatgctgtgttgatggatctggacagcggggacgtgaagaggagggtccacctgttcgagacccagaggcggacaaaggaggaggacccgattatccccttctctgatggccctattatcagtaagtggggcgcaataagcagatcaagccgcacaggataccacacaacagaccctgtgcaagcaactgcctcacagggcagcgcgaccaagcctattagcgtgagcgattacgtgccttacgtgaatgccgtcgattcaagatggtctagttacggcaatgaagccactagcagcgcccattacgtcgagagagatcgttttatagtgaccgatctatccggtcacaggaaacactcatcaaccggcgacctcctctcgctggaactacagcaggcgaaatcgaattctctcctgctacagagagaagcaaatgctctagcaatgcagcaaaagtggaactccctggacgagggtcggcacctgactctcaacttgctcagcaaagagatagaattgcgcaatggagaagtaaaaaaactcaacttatctgcttcttgtctcatgtatttgttttcagctgcagcctcatggctgtatcattattag

SEQ ID NO: 25529 - DNA, 1548 bp, synthetic construct
  source 1..1548: mol_type = other DNA; note = Synthetic coding sequence
tgagccggcggcagccccagcgtggtggactacttccccagcgaggacttctacaggtgtggctattgcaagaacgagtcgggtagtcgaagcaacgggatgtgggcccactccatgaccgtgcaggattatcaggaccttattgatcgagggtggagaagaagtggtaaatatgtgtacaagccagtaatgaaccagacatgctgcccacaatacacaatcagatgtcggccactgcagttccagccttccaaatcccataagaaagtcctgaagaagatgcttaagtttttagcaaagggggaggtgccgaagggatcctgtgaagatgagccgatggatagtacaatggacgacgctgtcgccggagacttcgcacttattaacaagctggacattcagtgtgatctcaagacgctttccgatgacatcaaggagagtctcgaatcagagggtaagaattcaaaaaaggaggaacctcaggaactgctgcagtctcaggactttgtgggcgaaaagttaggcagcggtgagccctctcattctgtgaaggtgcacactgttcccaaacctggaaagggagccgacctgtcgaagcctccctgtaggaaggccaaggaaatcagaaaggaaaggaaacgcctaaagttaatgcagcagaatcctgccggggagttagagggattccaggcccaggggcatcctccgtccctgtttcctcctaaagccaaatccaatcaacctaagagcttagaggacctgatctttgagagcctgcccgaaaatgcttcacataaactggaggtgcgggtggttcggtccagcccacctagtagccagttcaaagcaaccctcctggagagctaccaggtctacaagagataccagatggttatacacaaaaatccacccgacactcctactgagagccaattcacccggttcctgtgttcatctccactggaggcagaaactccccccaatggccccgactgtggctacgggagttttcatcagcagtattggctcgacgggaagataatcgccgttggggttatcgacattctaccaaactgtgtgtcctccgtgtacctgtattacgatccggattattcctttctgtctttaggagtctatagtgctctccgagagatcgcttttacacgccagctccacgagaaaacgtcccagctctcctattactatatgggattctacattcatagctgtcccaagatgaagtacaagggacagtatcggccctcagaccttctctgcccggaaacctacgtttgggtacccattgaacagtgtctgcctagtctggaaaactcaaagtactgtaggttcaaccaggaccccgaggcagtggatgaggaccgctctaccgaacccgaccgcctgcaggtttttcataaaagagcaattatgccctacggggtgtacaaaaaacagcagaaggacccatctgaggaagctgcagtgctccaatatgcatcacttgtgggccagaagtgttcggaacgcatgttactgtttaggaattag

SEQ ID NO: 25530 - DNA, 225 bp, synthetic construct
  source 1..225: mol_type = other DNA; note = Synthetic coding sequence
atggccatggcccccagccccagcctggtgcaggtgtacaccagcccggccgcagtcgcagtgtgggagtggcaagacggtctgggaacttggcatccctactcagccactgtctgcagtttcattgagcagcagtttgtgcagcagaaaggccagcggtttggactaggaagtctggctcacagtattcccctggggcaagccgatcccagtctcgctccgtag

SEQ ID NO: 25531 - DNA, 594 bp, synthetic construct
  source 1..594: mol_type = other DNA; note = Synthetic coding sequence
atggccgccttccgggacatcgaggaggtgagccagggcctgctgtccctgctcggagcaaatcgcgccgaagcacaacaacgtcgcctattggggcggcacgaacaggtcgtagagcgactgctggagacccaggatggagccgaaaaacagctgcgggaaatactgaccatggagaaggaggtggcccagtccctcctgaacgcaaaggagcaggtgcatcaggggggcgtagagctgcagcagttagaagctggtctgcaagaggccggggaggaggacacaaggttgaaggcaagcttactccaactgacacgagagctggaggagttaaaggagatcgaagcagatctggagcgccaggaaaaggaggttgacgaggataccaccgtgacgatcccctccgccgtctacgtggctcagctatatcatcaggtgtcgaagattgaatgggattacgaatgcgaacccggaatggttaaaggcattcatcacgggccatccgtcgcccaacccatacacctggacagcactcagcttagcagaaaattcatctctgactacctgtggagcttagtcgacacagaatggtag

SEQ ID NO: 25532 - DNA, 2271 bp, synthetic construct
  source 1..2271: mol_type = other DNA; note = Synthetic coding sequence
atgagcccccagaagcgggtgaagaacgtgcaggcccagaaccggacttcccaaggtagcagcagctttcagacaactctgtccgcatggaaggtgaaacaggatccatctaatagcaagaacattagtaagcatggtcagaacaatcctgtgggagattacgaacatgcagacgaccaggccgaggaagacgctctacaaatggctgttggttattttgagaaaggtcctattaaagcttcacaaaacaaggacaagacgctggagaagcatttaaagactgtcgagaacgtggcttggaagaatggactcgctagtgaggagattgacatcttattgaacatcgccctctctgggaagttcggcaatgccgtgaacacgcgtattttgaagtgtatgatacctgccaccgtaatttccgaggattccgtggtaaaagccgtttcgtggctctgtgtgggcaaatgttctggaagtacaaaggtcctcttttacaggtggctagtggccatgttcgactttattgatcggaaagagcagatcaaccttctgtacggcttcttcttcgcttccctccaggatgacgcactgtgcccctacgtctgtcacctgctctatctactgacgaaaaaagagaacgtgaagccattcagggtgaggaagttgctcgacctgcaggcaaagatggggatgcagccccatctccaagcccttttgtctctgtataagttcttcgcacccgctctgatctctgtatcgcttcctgttcgtaagaagatctacttcaaaaattccgaaaatctgtggaagaccgccctcctagctgtcaaacagcgaaaccgcggtccttctcctgagcctttgaaactaatgctggggccagcaaatgtgagaccactcaagaggaagtggaacagcttgtccgtgatcccagtcctgaactctagcagctatacaaaggagtgcggcaaaaaagagatgtcactctccgactgcctgaaccgcagtggatcttttccactggagcaactgcaaagctttccacaacttctccaaaacattcactgtcttgagctgcctagtcagatgggctctgttctgaataactcactgctgctgcactacataaactgtgtcagagatgaaccagtcctattacgcttctattattggctgtcacaaacactgcaggaggagtgcatttggtataaggtgaataactatgagcacggcaaggaatttaccaatttcctcgacacaatcataagggcggaatgtttcttgcaggaggggttctatagctgtgaggccttcctctacaagtccctgccattgtgggacgggctgtgctgtcgcagccagttcttgcagctggttagttggatcccattcagcagcttcagcgaggtcaaacctctgctgttcgatcacttggcccaactctttttcacaagtacgatctactttaaatgttcagtacttcagagcctgaaagaactgttgcagaattggctgttatggctctctatggatattcacatgaagcccgttaccaactcacccttagaaacgactctgggtggatctatgaattcagtgtcgaaacttatacactatgtcggatggctgtccacaacagcaatgcgcctggaatccaacaacacctttctgctgcactttatcctggacttctacgaaaaagtatgcgacatctacattaattacaacctcccgctggtggtcctctttccaccaggtattttttactcggccttactgagccttgatacctccattcttaatcagctatgctttattatgcataggtataggaaaaacctcaccgcagcaaagaagaatgagctggtgcagaaaactaaatcagagtttaacttctcctcaaaaacctaccaagaattcaaccactacctgactagcatggtaggatgtctatggacatccaagccctttggaaagggtatctacatcgaccctgaaatcctcgagaagaccggggtcgccgagtataagaattccctaaatgttgttcaccatccctctttcctgtcatacgccgtgtctttcttactgcaggaatctccagaagaacgcaccgtcaacgtttctagcatcagagggaagaaatggtcatggtacctcgattatctcttttcccaggggctgcaaggccttaagttgtttattcgctctagcgtccaccattcttctattcccagggccgaggggattaactgtaacaatcagtactag

SEQ ID NO: 25533 - DNA, 1941 bp, synthetic construct
  source 1..1941: mol_type = other DNA; note = Synthetic coding sequence
gcccagggcagcgtgagcttcaacgacgtgaccgtggacttcacccaggaggaatggcaacatctagaccatgcccaaaagacgctgtatatggacgtgatgttggaaaactactgccacctgattagtgtcggctgccacatgactaagcctgacgtgatactcaagctggagaggggtgaggaaccctggacgagcttcgctggacacacttgccttgaggagaattggaaggccgaggatttcttggtgaaattcaaggaacatcaggagaagtactccaggtcagttgtgagcatcaaccataaaaaactggtgaaagagaaatctaaaatttatgaaaagaccttcactttggggaaaaatcctgtcaacagtaaaaatttaccacccgaatatgacacacacggccgcatcctgaagaacgtgtcggagctcatcatcagtaacttaaaccccgctcgaaagcggctcagcgagtacaacgggtatgggaagagcctcctcagtacaaaacaggaaactacccatcccgaagtgaaatctcacaaccagtcagcacgcgcattctctcacaatgaggtcctgatgcagtatcagaagaccgaaacacctgcacaatccttcggatacaatgactgtgagaagtcattcctccagagagggggtcttatcacccacagcagaccttataaaggcgaaaacccttcagtatataataaaaaacgacgggcgactaatattgaaaaaaaacatacatgcaacgaatgcggtaagtcattctgccggaaatcagtgctgatactccatcaaggaatccacagtgaggagaaaccataccagtgccaccagtgcgggaatgcattccgtcgcaaatcctatcttatagatcaccagcgtacgcataccggcgagaaacctttcgtgtgcaatgaatgtggcaagagtttccggttaaagactgctttaacagatcaccaaagaacccatacaggtgagaaatcatatgaatgcctccagtgccgcaacgctttcaggctaaagtcacatcttattaggcaccagcggacgcataccggggaaaagccttatgagtgcaacgattgcggaaagtctttccgccagaagaccacattgtctctgcaccagcgcatccacaccggtgaaaagccgtacatctgtaaggaatgtggaaagtctttccatcagaaagcaaacctcactgtccatcagcgaacacacacaggggaaaaaccctacatatgcaatgagtgtggaaaatccttttcccagaaaacaaccctggccctccacgagaaaacacacaacgaggagaagccatacatctgcagcgaatgcggcaagagctttcgacaaaaaaccactctcgtcgcacatcagagaacacacacaggggagaagagctatgagtgtccgcactgtggcaaggctttcaggatgaaatcatacttgatagaccaccatagaactcatacaggggaaaagccctatgagtgcaatgagtgtggcaagtctttttctcagaaaaccaatctgaatctgcatcagagaatccacaccggggagaagccgtatgtgtgcaatgaatgcggcaaaagctttcggcagaaagccacacttacggtacaccagaaaatccacaccggtcagaaaagttatgaatgcccacagtgtggaaaagccttctctcggaagtcctatttgatacatcaccagaggacccacaccggggagaagccctataagtgttctgaatgtggaaagtgttttcggcagaagaccaacctgatcgtgcaccagagaacccacaccggcgagaaaccttacgtgtgcaacgagtgtgggaagagctttagttataaacgaaatctgatcgtccatcagcgcactcacaagggtgaaaatattgagatgcagtag

SEQ ID NO: 25534 - DNA, 594 bp, synthetic construct
  source 1..594: mol_type = other DNA; note = Synthetic coding sequence
atgggcggccggaagcgggagcggaaggccgccgtggaggaggacacctccctgtccgaatccgagggccccaggcaaccagatggcgacgaagaagagtcaactgcactatctatcaatgaagagatgcagcggatgctgaaccaactccgtgaatacgacttcgaggatgattgcgattccttgacatgggaagagaccgaagagacccttcttctttgggaagactttagtggatatgccatggctgccgcagaggctcaaggtgagcaagaggactctctggaaaaggtgattaaagatactgagtcgctgtttaagactagggaaaaagaatatcaagaaacaattgatcagatcgagctcgagctcgccacagccaagaatgacatgaatagacacctgcacgagtatatggagatgtgctcaatgaagaggggccttgatgtccagatggagacctgcagaagactgattacccaatctggcgataggaaaagccccgcctttacggcagtccctctctctgatccccctcctcggcaggcccgcttaaggactccaatcgccatgtctcacttaacagcgccctag

SEQ ID NO: 25535 - DNA, 423 bp, synthetic construct
  source 1..423: mol_type = other DNA; note = Synthetic coding sequence
atggccatggcccccagccccagcctggtgcaggtgtacaccagccccgcagcagtggccgtgtgggagtggcaagatgggcttggtacgtggcatccgtattcagctacagtctgctcctttattgagcagcagtttgtgcagcaaaagggccagcgctttggcctgggatctctggcccattccatccccctgggccaggccgatcctagcttagccccatacataatcgatctgcccagctggacccagtttaggcaggacaccggcacaatgcgcgctgtcaggagacacttatttcctcagcatagcgccccggggcggggcgttgtgtgggagtggctttccgacgacggaagctggactgcttatgaagcttccgtctgtgactatctcgaacagcaggtcgccagaggcaattag

SEQ ID NO: 25536 - DNA, 3237 bp, synthetic construct
  source 1..3237: mol_type = other DNA; note = Synthetic coding sequence
gtgtgcatgcacccccacaacgtgctgagcgacgtggtgaactacactctgtggctgatggagtgcagtcacgccagcggctgctgccacgctaccatgttcttttctatctgcttcagctttcgggcagtcctcgagctattcgaccgctacgatggattacggcgcttggtgaacctgatttctacattggagattttgaatctcgaggaccagggtgctctcttgtctgacgacgaaatttttgccagccgccaaacggggaaacacacttgtatggctctgagaaagtattttgaggcccacctagctatcaagctggagcaggtcaagcagagtctccaacgtacggaaggtgggattctagtgcacccacagcccccatacaaggcgtgcagctatacacatgagcagatcgtagagatgatggaatttttgattgaatacggacctgcccaactttactgggagcctgcagaggtctttctgaagctttcttgtgtgcaacttctcctccagctgatatctatcgcctgcaattggaaaacctattatgcccgaaacgacacggtgaggtttgccctagacgtgctggcgattctcacagtggtcccgaagattcagctgcaattggcagaatcagtggatgttctcgacgaggctggtagcactgtgagcaccgtgggaattagcatcatcctgggcgtggccgaaggcgagtttttcatccatgatgcagagatccagaagtcagccttgcagataattattaactgcgtgtgtgggcctgacaaccgcattagctcaatcggaaagttcatatccggcacccctaggcgcaagttgccacagaacccaaaatccagtgagcacaccctggcaaagatgtggaacgttgtgcaatctaataatggcatcaaggtgctgctgtcattactgagtatcaagatgcctataaccgacgctgaccagatccgggctcttgcctgcaaggcactggttggactatcaaggtcctccacggttagacagatcatttcaaagcttcctctcttcagttcctgccagatccagcagctgatgaaggagccagtgctgcaggataaacggagtgaccacgttaagttttgtaagtacgcagctgagctgatagaacgggtttctggaaagcccttgctcataggcaccgacgtaagcttggccagactccagaaagcggacgtcgttgcccagagccgtatttctttccccgagaaggaacttctgcttctaatccgcaatcacctgatatctaagggccttggagaaaccgccacagtactgacgaaggaggccgatctccctatgactgctgcttcccatagcagtgccttcacaccggtgacggctgcagcgagccccgtgtctttgccacggaccccgcgaattgcaaacggcattgccacacgccttgggtcccacgccgccgttggcgcttcggcgccctctgcacctaccgcgcacccacaaccacgccccccccagggccctctggcccttcccgggcctagttatgctggcaattctccattaattgggaggattagctttatcagggagaggccctcgccctgtaatggccgcaagattcgggtcctgcggcagaagagcgatcatggcgcctatagccagtctcctgctattaaaaaacagctcgacagacacctccccagcccacccacactagactcaattatcacggaatatctgagagagcaacatgcaaggtgtaagaatcccgtcgctacatgtccccccttctccttgttcacaccacaccagtgtccagagcccaaacaaagacgtcaggctcccattaacttcacatcaaggcttaaccgtcgcgcttcatttcccaagtacggcggcgtagatgggggctgctttgataggcacctgattttctcaaggtttcggccgatcagcgtcttcagggaagccaacgaggatgaaagtggcttcacttgctgtgcattttccgcccgcgagcgtttcctgatgcttggtacctgtactgggcaactcaaattatacaatgtcttctctggtcaggaggaggcctcatataactgccacaacagcgccataacccaccttgagccaagccgtgacgggtctctcctgctgacaagtgctacctggtcgcagccacttagcgcgctatggggaatgaaatccgtttttgatatgaagcacagcttcacggaagaccactatgtcgagttcagtaaacacagtcaggatagagtcatcggaacaaagggcgatatagcccatatatacgatatacagactgggaacaagctcctgacactcttcaacccagacctagctaataattacaagcgcaattgcgccacattcaaccctaccgatgatctggttctcaatgatggggtcctctgggatgtaagatccgctcaagcaatccacaagttcgacaagttcaatatgaacatcagcggagtgttccatccaaatggactggaagttataatcaacacggagatttgggatcttaggacattccatcttctgcatacggttcccgccttggaccagtgtcgcgttgtctttaaccatacagggactgtcatgtacggagcgatgctgcaagctgacgacgaagacgatctgatggaggaaaggatgaaatctcctttcggtagtagctttcggacttttaatgccactgattataagccaattgctaccattgatgtgaagcggaacatctttgacctctgcaccgataccaaggactgttatctggcggtgattgagaaccaggggagcatggatgccctgaacatggacacagtttgtagactgtacgaagttggaagacaacgcctggccgaggacgaggacgaagaggaagaccaggaggaggaggaacaggaggaggaagacgatgacgaggatgacgatgacactgacgatctcgacgagttagacaccgaccagcttcttgaggccgaactggaggaagacgataataacgagaacgccggagaggatggtgacaatgacttctcgcctagcgatgaggagctcgcgaacttgttagaggagggagaagatggggaggatgaagactctgacgcagacgaagaagttgagctgattttaggcgataccgactcttcagataactccgatctcgaggatgacatcatcttatctctcaacgagtag

SEQ ID NO: 25537 - DNA, 447 bp, synthetic construct
  source 1..447: mol_type = other DNA; note = Synthetic coding sequence
atgctgagcgacggctgcggcagcgaggagaagatcagcgtgccctcatgctacggaggaatcggcgcccctgtctcgaggcaagtgccagcttcccacgactcggagctgatggcctttatgacacgcaagttgtgggacttagagcagcaggtaaaagcccagacagacgaaatcctcagcaaggatcagaagattgctgccctcgaggacctggtgcaaacactgcgaccacaccctgctgaggccactttacagcgccaggaagagctcgaaactatgtgcgtgcaattgcagaggcaggtacgcgaaatggaacggtttctcagcgactatggccttcagtgggtgggggaaccaatggaccaggaagattcggagagcaagacggtatcggagcatggcgaacgagactggatgaccgctaagaagttctggaagccttag

SEQ ID NO: 25538 - DNA, 1755 bp, synthetic construct
  source 1..1755: mol_type = other DNA; note = Synthetic coding sequence
atgagcctgccccccgagaaggccagcgagctgaagcagctgatccaccagcagctcagcaaaatggacgtgcacggacgcatccgcgagatcctggccgaaaccataagagaggaactcgccccggaccaacaacacttgtctacggaagatctgatcaaggccctacggcgtagggggattattgacgatgttatgaaggagctgaacttcgtgaccgattcagtcgaacaggagcttccctctagccctaagcagcccatttgttttgaccgacaatctacgctcaagaagagcgatggcactcgtatggctgattctactacaatgctttctatctccgacccgatacatatggtgttgattaaaactgacatttttggcgagaccacactggttgcctcctacttcctggagtggcgctctgtgctcgggtcggagaacggtgtgacctccctgacggttgaactgatgggagtcggcaccgaatctaaagtgtctgtggggattctgaacatcaagctcgagatgtacccacccttgaaccaaacacttagccaagaagtggtgaatacgcagctggccctagagcgtcaaaaaactgccgagaaagaaaggctgtttttagtgtatgccaaacaatggtggagagagtatctccaaattcgaccatcacacaattcaagactggtaaaaatcttcgctcaggacgagaacggaataaaccggcccgtatgcagttatgtgaaacctctgcgcgcagggcggcttctcgatacccctcgacaagctgcaagattcgttaatgtcctcggatacgagcgggcaccagtcatcggcgggggggggaaacaagagcaatggtgtacccttctcgccttcttgtgtaggaacaagggagactgcgaggaccacgccaaccttctctgtagcctgctgctcggatacggactcgaagcattcgtgtgtgtaggaactaaggctaagggcgtaccccacgcttgggtgatgacgtgcggcacagacggggccatcactttttgggagtccctgacaggacacaggtacattcataaaccaacaaatcccgacgaacctcccgtcgccgaacagccaaaaccgctctacccttaccgcactataggatgcgttttcaatcatcagatgttccttggaaactgtcagccaagtgatgctgttgagacatgcgtgtttgatctcaatgacgaatctaagtggaagcccatgtccgaggaagccattaagagtgtctgtgcccctggggccacaacctcactcccaccattcccccctttatgcgccagcacaattgacgcgtctgtgacaagcaatgagatcgaaatgcaactgaggttgctggtgtctgagcataggaaagatttaggactcacaaccgtgtgggaagatcaactgagttaccttttgtctcctgctctggcctcatacgagtttgaacgtaccacctccatcagtgcgggaaacgaggagttccaggacgccatcaggcgagctgtgccagacgggcacacctttaaggggtttcccatacatttcgtgtaccggaatgcgaggcgagcgttcgccacctgcttaagatcacccttctgcgaagagatcatttgctgtcggggagatcaggtgcggttggcagtgagagtgagggtattcacctaccctgaatctgcctgcgccgtctggataatgttcgcctgcaagtatcggtcagtgttgtag

SEQ ID NO: 25539 - DNA, 4515 bp, synthetic construct
  source 1..4515: mol_type = other DNA; note = Synthetic coding sequence
atggtgagcgagagcgacttcagcaaggacgtggccgtgcaggtgctccccctggacaagattgaagagaataacaagcagaaagctaacgacatattcatcagtcagtacactatgggacagaaggacgccctgcgaactgtgcttaagcagaatgtttctctgtgtctgaccgggtggagcgatcacagtggagtgattaccacccactgttctctctatctattacgtctcatgcgctcgagtcacttatccttgccatcttcttgggactacagagcgcagtccatgcctgtgttcaaagaggttaaagttcatcttttggaggatgccggcatcgaaaaagacgccgtgacgcaggagactagaatttcacctagtggcatcgacagcgcaacaactgtcgccgccgccactgcagccgctatcgcgacagccgcccccctgattaaggtgcaatccgatctggaggccaaggttaatagcgtaacagaattgttgtcaaagctccaggaaaccgacaagcaccttcagcgggtgacagaacagcagacatccatccagcgcaaacaggagaaactgcattgccacgatcatgagaagcaaatgaacgtatttatggagcaacatattagacaccttgagaagctccaacagcaacagatagatattcaaacccactttatttccgcagccctgaaaaccagctcctttcagccagtatcaatgccctctagcagagcagtggaaaagtatagtgtgaagcctgagcacccaaacttaggcagctgcaatccaagcctgtataacacattcgcctctaaacaggctcccctgaaagaggtggaagatacctcctttgataaacaaaagtctccactcgaaacacctgccccgcgccgcttcgcaccagtcccagttagtcgcgatgacgaactttcaaagagggaaaacctactggaggaaaaagagaacatggaggtgtcatgccacagggggaacgtgcgattgctggagcagattctcaataataacgacagcctcaccaggaagagtgaaagctctaataccacatctcttacccgcagtaaaatcggatggaccccagagaagactaacagattcccttcgtgcgaggaactggaaactacaaaggtgactatgcagaagagcgatgatgtgctccatgacctgggtcagaaagaaaaggagaccaacagtatggtccagccaaaagagtctctgagcatgctgaagctgcctgatctaccacaaaattctgtcaagcttcaaaccactaatacaacaagaagcgttctgaaggacgctgagaagatattgagaggggtgcagaataataagaaggtactcgaagagaacctagaagccattattagagctaaggacggagcggcgatgtactctctgataaacgccttgtcgaccaacagggaaatgtctgaaaaaatccgtattaggaagactgtggacgagtggatcaaaacaatcagcgcagagatccaagatgagctttctaggacagactatgaacagaaacgattcgaccagaaaaatcagcgcaccaagaagggacaaaatatgactaaggatattagaaccaacactcaggataaaaccgttaataaatcagttataccaaggaaacactctcagaaacagattgaggaacatttccggaatctccccatgcgagggatgccagcgagttcactgcaaaaggaaagaaaagaaggccttctgaaggctaccactgtgattcaggacgaggactacatgttgcaggtgtacgggaagcctgtgtaccagggacaccggtccacactgaagaaggggccctacttgaggtttaactccccctccccaaaaagccgcccacagcgacctaaggtgattgaacgcgttaagggtactaaggtgaaatctattagaactcaaacagatttctacgccactaagcccaaaaagatggattcgaagatgaagcacagtgtgcccgtgttgcctcacggagaccagcagtatctgttcagtcccagcagggaaatgccaacgttttccggaaccttagaaggccacctgatcccaatggccatcctacttggccagacccagtctaactccgacaccatgcctcctgcgggtgttatcgtgtcaaagccccaccctgtgactgttacaaccagcattccaccctcctctagaaaggtggaaaccggagtaaaaaaaccgaatatagccatcgtggagatgaagagcgagaagaaggaccctccacagctcacggtgcaagtacttccgtccgtggacattgactcaattagcaactcgagcgccgacgtgctcagccccctctcctctcctaaggaggcttctttaccccctgtgcaaacatggatcaagaccccagaaattatgaaagtcgacgaggaggaggtgaagttccctgggacaaacttcgacgagatcatcgacgtaattcaggaagaggagaagtgtgacgagatccctgactcagagcctatactggagttcaataggtcagtgaaagcggactctaccaagtacaacggaccccctttccctccagtcgctagcacattccaacccactgcagatattcttgataaggtgattgaaagaaaggagactctggagaactctctgattcagtgggtggagcaggagattatgagtaggattatctctggactctttccagtacagcagcagattgctcctagcatatccgttagcgtgagtgaaactagcgaacctctaacttccgacatagtggagggcacgagctctggcgctttacaattatttgtggatgccggcgtgcctgtaaacagcaacgtgataaaacactttgtgaatgaggcactggccgaaacaatcgcggtgatgcttggagatagggaggctaaaaagcagggtcctgtagctacgggcgtctccggagacgccagcaccaacgagacgtacctccctgcccgagtctgcacccctctaccgacaccacagccgactcccccctgctcccccagttcaccagctaaggaatgtgttctggtgaagacaccagactctagtccatgtgatagcgatcacgatatggctttccccgtgaaggaaatttgcgcggaaaaaggcgacgacatgccagccatcatgctggtaaacaccccaaccgtgactccaactacgacaccacccccggcagccgctgtcttcactccgactctgtccgacatctctatcgataagttgaaagtgtcctcacccgaactgccaaagccttggggagatggagatctaccactggaagaggagaatcctaattcaccccaagaagaactccacccccgggcgatcgttatgtcggtggccaaagacgaagagcctgagagtatggatttccccgcacaacccccgccacccgagccagtgcccttcatgccctttcccgccgggaccaaggccccttccccaagtcaaatgccaggatccgactcttccaccctcgagagtaccctaagcgtgacagtcacagaaactgagacacttgacaaacctatatcagaaggagagatcctgttttcgtgtggacaaaaacttgctcccaagatactcgaagatattggtctttacctgacaaatctgaacgatagcctgtcctctacccttcacgatgcagttgaaatggaagatgaccctccgagtgaaggtcaagtaattagaatgtctcacaaaaagtttcacgccgacgcaattttgagtttcgctaagcaaaatcaagaaagcgccgtctcacagcaagccgtctatcacagtgaagatttagaaaatagtgtaggagagctgtcagagggtcagcggccccagttgacagcggcagcagagaacatcctgatgggccatagcctttatatgcagccacccgtgaccaatactcagagtctcgaccagcaatgtgaccccaagcccctgagccggcagtttgataccgtttcaggctctatttatgaggactcctgcgccagccatggaccaatgagccttggcgaactggaactagagcccaatagcaagttagtccttcctacaacactgctgacagctcaggagaacgatgtaaacttgcctgtggcggctgaagatttttctcagtaccagctgaagcaaaatcaagacgtcaaacaggtggagcataaaccatcccagagttacttgagagtgcgaaataagtccgatattgcaccgagtcagcagcaagtcagtcccggggacatggacaggacccaaatcgagttgaacccttatttgacttgtgtgttctcggggggaaaggccgtgcccctatcagcatcccaaatgccaccggctaagatgagcgttatgttaccatctgtgaacttagaggactgctcacagagcctgagcttgtcaacaatgcaagaggatatggaaagctcgggagccgacacgttctag

SEQ ID NO: 25540 - DNA, 2271 bp, synthetic construct
  source 1..2271: mol_type = other DNA; note = Synthetic coding sequence
atggtggcccccgtgctggagaccagccacgtgttctgctgccccaacagggtgaggggcgtgttgaattggtctagtggccccaggggtctcctggcctttggaacatcgtgttccgtggtcctttacgacccacttaagcgggttgtcgtgaccaacctcaatgggcatacagctagagtgaactgtatccagtggatctgtaagcaagatggcagtccatccacggagctcgttagtggcggttcggataatcaggtgatacattgggagattgaggataaccagttgctgaaagctgtccacctgcagggtcacgaaggtccagtgtacgcagtgcacgccgtgtaccagaggagaacttctgatcccgcactctgcacgctaatcgtgtctgcagccgctgacagtgccgtcagactgtggagcaaaaagggaccagagggcagagacctgtttttggcctcatgcagccaggactgcctcatacgtatttggaagctctatatcaagtctacatctctggaaacgcaggatgacgacaacattagactgaaggagaacaccttcactatagagaacgagagtgtaaaaatcgctttcgcggttacactggaaacagtgctggccggccacgagaactgggtgaacgccgtgcactggcaaccagtgttttataaagatggcgtcctacagcagccagtgcgtctattgtctgcgagcatggataaaactatgatcttgtgggcaccagacgaggagtctggggtgtggctggaacaagtgcgggtgggcgaggtaggggggaataccctgggtttttatgattgccagttcaacgaggacgggagcatgataatcgcccatgccttccatggagccctgcacctgtggaaacagaatacagtcaatccccgcgagtggacgcccgaaatcgtgatcagtgggcactttgacggtgtgcaggatcttgtgtgggatccagagggggaatttattataaccgtaggaactgatcagacaactagactttttgctccatggaagagaaaagaccagagccaggttacttggcacgagatagcacgccctcagatccacgggtacgacctaaaatgtcttgccatgattaatcgcttccagttcgtctcgggagctgatgaaaaggtccttcgcgtgttttctgcgccccgaaactttgtggagaacttctgcgctataactggccagtccttgaatcacgttctgtgcaaccaggactccgatcttccggagggtgccacagtgccagctttaggattgagcaacaaagcagtgtttcagggcgacatcgctagtcagccttccgatgaagaggaactcctgaccagcaccggctttgaataccagcaggtggcattccagccgtctatcctcactgaaccccctacagaagaccatctgctacagaacaccctgtggcccgaggtccaaaaactgtacggccatggttatgagatattctgtgttacctgcaatagttccaagacactacttgcttctgcgtgcaaggccgccaagaaggagcatgcagcaataatcttgtggaacaccactagctggaagcaggtgcaaaacctggttttccactctctcacagtgactcagatggcattctctcccaatgaaaaatttctcctagctgtgtctagagatcggacttggtccctgtggaaaaagcaggatacaattagccctgaattcgagccagtatttagcctcttcgcctttacaaacaagatcacttctgtccatagccggatcatttggagctgcgactggtctcccgatagcaaatacttttttaccggatcacgggataagaaagtcgtggtctggggcgagtgtgattcaactgacgattgtatcgagcataatattggcccatgtagctcagtcctggatgtggggggagcagtgactgcagtcagcgtgtgcccggtccttcaccccagccagcgctacgttgttgctgtcggtctggagtgcggaaaaatctgcctctatacttggaagaagacggaccaagtacccgaaatcaacgattggacacattgcgtggaaacaagccagagtcagtcacatactctcgcaattagaaaactttgctggaaaaactgctccggaaaaaccgagcagaaggaggctgaaggtgctgaatggctgcacttcgcaagctgtggtgaggaccacacggtcaaaattcatcgcgtaaataaatgtgcgctgtag

SEQ ID NO: 25541 - DNA, 345 bp, synthetic construct
  source 1..345: mol_type = other DNA; note = Synthetic coding sequence
atgcaggagatcaaccagaacctggccgaggaggccggcctgaacattactcatatctgtttgccacccgattcctccgaagcagagattatcgacgaaattttaaagatcaatgaggacacaagggtgcatggtcttgcactgcaaatcagcgaaaaccttttcagtaacaaagtgctgaatgcattaaaacccgaaaaagacgttgacggcgttacagatattaacctcggtaagctggtgcgtggagacgcacacgaatgtttcgtgtcacccgtcgccaaggctgttatcgagttgttagaaaagagcggggttaacctggacggaaagaagatattgtag

SEQ ID NO: 25542 - DNA, 747 bp, synthetic construct
  source 1..747: mol_type = other DNA; note = Synthetic coding sequence
atggccaccagcgcccccctgcggagcctggaggaggaggtgacctgttcgatctgcctggactatctccgggatcctgtgactatcgactgtggccatgtgttttgcagatcttgcactactgacgttcggccaatttctggcagccgtcctgtgtgtccactctgcaaaaagccctttaagaaggagaatatcaggcctgtttggcaattggcttcactcgtggagaacattgaacgcctgaaggtggacaaaggtaggcagcccggcgaggttacgcgggaacagcaggatgcaaaattatgcgagcggcatcgcgaaaagcttcattactattgcgaggacgatggcaagttgctgtgtgtgatgtgtcgtgaatcaagggaacatagaccccacactgctgtccttatggagaaggccgctcagcctcacagagaaaagatcttgaaccatctgagcacacttcggcgcgacagagacaagattcagggctttcaagcgaagggagaagccgacatcctagccgccctgaagaagctgcaggaccagcggcaatacatcgtggcagagttcgagcagggacaccagttcctgcgagaacgtgaggagcacctcctggaacaattagccaagctagaacaggaacttactgaaggaagggagaagttcaaatctaggggcgtgggagagcttgcacggttagccttagtcattagcgagctggaggggaaggctcagcagtag

SEQ ID NO: 25543 - DNA, 1461 bp, synthetic construct
  source 1..1461: mol_type = other DNA; note = Synthetic coding sequence
atgacctgcggcagctactgcggcggccgggccttcagctgcatctcagcctgcggcccccgtcctggaaggtgctgcatcacagctgctccttacaggggcatatcatgttacaggggactcactggcggctttggatcccacagcgtctgcggagggtttagagccggctcatgtgggcgtagcttcggatacaggagcggcggcgtttgtggaccgagtcccccctgtattacaacagtgagtgtcaatgaatccctcctgaccccattgaacctggagatagatccaaacgcccagtgtgtgaagcaggaagaaaaggagcagattaaatctctgaattccaggtttgcagctttcatcgacaaggtgcggtttctcgagcagcagaataagctgctagagacaaaactccagttttaccagaacagagaatgttgccaatcaaatcttgagcccctttttgaaggatatatcgagacattgagacgtgaagctgagtgcgtggaggctgactctggccgcctcgcaagcgagttaaaccacgtgcaagaagttttggaagggtataagaaaaagtatgaagaggaggtgtcactcagagccacagcagagaacgaattcgtcgctctgaaaaaggacgtcgactgcgcgtacctgcgcaaatccgacctggaggcaaacgtagaggccctgattcaggaaatagactttttgaggcggctatatgaagaagagattagggttctacagtcccacatctcggacacctcagtggtcgttaaattggacaactcccgcgacctgaacatggattgcataatagctgagatcaaggcccagtacgacgatatcgtaacccggtcaagggctgaagccgagtcgtggtatcgcagcaagtgcgaggagatgaaagcgaccgtaattaggcacggcgaaactctgcgcaggacgaaggaagagatcaacgagctgaaccgcatgatccaaaggctgactgcagaggtcgaaaacgccaagtgccagaattcgaaactggaggcggcagttgcacagtctgagcagcagggagaggccgcccttagcgatgcaagatgtaagctcgcagagctcgagggcgctctgcaaaaggccaagcaggatatggcctgtctgataagggagtaccaagaggtgatgaatagcaagctaggcctcgatattgagatcgctacttatcgccgtcttttggagggtgaggaacagcgcttatgtgagggcgtcggtagcgtcaacgtgtgcgtgtcttcttctcgtggaggagttgtctgcggggacctttgtgcttctactaccgcccctgtagtcagcacacgagtgagctctgtacctagcaactctaacgtggttgtgggaacgacaaatgcatgtgcacctagcgctcgggtcggcgtgtgtggcggttcgtgcaaaaggtgttag

SEQ ID NO: 25544 - DNA, 1710 bp, synthetic construct
  source 1..1710: mol_type = other DNA; note = Synthetic coding sequence
atggccctgctgagcgagggcctggacgaggtgcccgccgcctgcctaagcccctgtggaccccctaaccccaccgagctgtttagcgagtcacgcagacttgcgttagaggaactggtcgccgggggccccgaagccttcgcggcttttctacgccgagagagattagcaagattccttaaccctgacgaagtgcatgctatattacgagctgccgaaagacccggagaagagggcgctgcagccgctgcggcggcagaggatagttttggtagcagtcacgattgttcctccggaacctacttcccggagcagtctgatctggagcctcccctgctagaacttggctggccagcgttctaccagggggctggggaaggtggcccgtatgggtgcaaagacgcgctccggcagcagctgcgctctgcacgtgaggtgatcgccgttgttatggatgtatttaccgacatagatatctttagggacctccaagagatatgcagaaaacagggggtggccgtttatatactcctggaccaggctctgttgagccagtttttagacatgtgtatggatctgaaagtgcatcctgaacaggaaaagctaatgacagtcagaaccatcaccggtaatatctactacgcgcggtctggaacaaaaattataggaaaagtgcatgagaagttcacattgatcgatggaatccgtgtagctacggggagctactcattcacatggactgatggcaagttgaacagctcaaacctcgttatcctgagtggacaggtggtggagcattttgacctggagttccggatcctgtacgcccagtctaagcccatcagcccaaaactgttatcccacttccagagttcaaataaattcgatcatctcacgaatcgtaaaccacagtccaaggagttgactcttgggaatctgctgcgcatgaggctcgctaggcttagttcgacaccacgcaaagccgatctagatcctgaaatgccggcggaggggaaggccgaaagaaagccacatgattgtgagagttccacggtctcagaggaggattattttagtagtcaccgtgatgagctacagtctcggaaagccatcgatgcagcaactcagactgagcccggcgaagaaatgccaggcctaagcgtctccgaagtgggcacacagacatccattaccaccgcctgcgccggcacacaaacagccgtgattactcggatcgcgtcatcccaaactactatatggtcacgcagcaccacaactcagacagacatggatgaaaacatactgtttccccgcggcacccagagtactgaaggcagccctgtgtccaagatgtctgtgtcccggtcctctagcctgaaaagctccagctcagtttcttcccagggcagtgtggctagcagcaccggctcccccgcaagcattcgaaccacagacttccacaaccctggctatcccaagtacctcggtacaccacacctggaactatacctatctgactccctgcggaaccttaacaaggagcgccagttccacttcgccggcattagaagtcgactgaaccacatgctggcaatgctgagccgcagaaccctgtttaccgaaaaccacctgggtttgcacagcgggaacttttctagggtgaatttactggcagtgcgagacgtcgccttatacccatcctaccaatag

SEQ ID NO: 25545 - DNA, 1224 bp, synthetic construct
  source 1..1224: mol_type = other DNA; note = Synthetic coding sequence
atggtgctgttcagcgacagcagcctgccccactggcagcagcagcctccccagcccgccccacccccgccattgttcccacgtcaacagcaggtccaggttaacaaagggagagtcaattgccatcctcgttgccgctacatcaagaccaagccctgtcaccagctcagccatcaggtatgggtccagcagaaacctagtcatcgtctgttgtctttacagctgtcaccctcgccaaaaccatctcctagtccacagttgtctttgaagtttaggctcagcttgaaatttaggcctaagcagctgttccaccccatgtctctcctcaaacacaatccacctactcactcccatcccagtcctaaactccaacagtctcagcctcagagcaatgtccaaggccagtcccctgtcagagtccagagcccatcccagacaaggatcaggcctagtactccttctcagctgtcacctggccagcagtctcaggtccaaacgaccactagccagcctattccaatccagccgcatacttccttacaaatcccctctcagggtcagcctcagtcacaacctcaagtggtgatgaaacataatgcagttatagaacacctaaagcaaaaaaagtcgatgacacccgctgagcgggaagaaaatcagaggatgatcgtgtgtaaccaggtgatgaaatatatacttgataagatcgataaggaggagaaacaagccgcaaaaaagagaaaacgtgaagaaagtgtcgagcaaaagaggtccaagcagaatgcgaccaagctgtctgcactgctgtttaagcacaaggagcagttacgagccgaaatcctgaagaaacgcgctcttcttgacaaagacctgcagattgaagtccaagaggagttgaagagagatctgaaaatcaagaaggaaaaggaccttatgcagctggcccaggccacagccgtggccgccccctgcccacccgtaacacctgccccacctgcgcctcccgctcctcctccctccccaccacctcctcctgctgttcaacataccggcttgctttcaacacctactctccccgccgcttcacagaagcggaaacgtgaagaagagaaggatagctcctccaagtccaaaaaaaaaaagatgatctccactacctccaaggagaccaagaaggataccaagttgtactgcatctgcaaaactccctatgacgaatcttag

SEQ ID NO: 25546 - DNA, 480 bp, synthetic construct
  source 1..480: mol_type = other DNA; note = Synthetic coding sequence
atggccaccagcgcccccctgcggagcctggaggaggaggtgacctgcagcatatgtctagattacctgcgcgatcctgtaaccatcgattgtgggcatgttttttgtaggagctgcacgacagatgtgaggccaatatcgggaagtaggcccgtttgccctctctgcaagaagccatttaaaaaagagaatattcgccccgtttggcaacttgagaagattttaaatcacctgtctactctcagacgcgaccgtgacaaaattcaagggttccaggcaaaaggtgaggcggacatactggccgcccttaaaaagctgcaggatcagcggcagtacatcgttgccgaatttgagcagggccaccaattcctgagggagcgagaagagcacctcctagaacagttagcgaagctcgagcaagaactcacagaaggccgggaaaagtttaagagcagaggagtaggtgaactcgcgcggtag

SEQ ID NO: 25547 - DNA, 309 bp, synthetic construct
  source 1..309: mol_type = other DNA; note = Synthetic coding sequence
atgaacgaggccgagatcgtggacgtggccctgggcatcctgatcgagtcacggaaacaagagaaggcatgtgaacagccagcactcgcaggagccgacaatcccgaacacagcccaccttgtagcgtatcaccacacacatctagcgggagttcctctgaagaagaagattcgggaaaacaggcactggccccggggctgtccccctctcagcgcccaggtggatcttccagtgcatgtagccggtctccagaagaggaggaggaggaggatgtgctgaagtacgtgagagagatcttcttttcatag

SEQ ID NO: 25548 - DNA, 345 bp, synthetic construct
  source 1..345: mol_type = other DNA; note = Synthetic coding sequence
atgcagttcggcgagctgctggccgccgtgcggaaggcccaggccaacgtgatgctgttcctggaggaaaaggaacaggccgcgctgagtcaggccaacgggatcaaagcccacttggaataccgctcagccgaaatggaaaaatcaaagcaggaactagaaactatggctgcaattagcaatacagttcagtttctggagcgatctatgacgtccgaactaaagtgcctcccactatttagcgcaaacatagggctccctaacctgagcccagcccctggaaactccagttctaacatgtgtatgacatctcgttctacacggacacaacatacgtcgatatag

SEQ ID NO: 25549 - DNA, 579 bp, synthetic construct
  source 1..579: mol_type = other DNA; note = Synthetic coding sequence
atggcccccaagcccggcgccgagtggagcaccgccctgagccacttagtactcggtgtcgtgagcttgcacgccgcggtgtccaccgccgaggcgtctcggggcgcagcagctggattcctcttgcaagtgttggccgccactactactctggcaccaggcctttccacacatgaagactgcttagccggcgcctgggtggcgactgtcattgggctccccttgctggcattcgattttcattgggttaatggggaccgatcgagcgcaaacctgctattgggcggcgggatggtcttggcagtggcaggcgggcatctgggccccgaaggaaggagcgtcgccgggcaggccatgttactggtggtcgctgttaccatcctcatagtcgccgtgttcaccgctaatacctacgggatgtggggaggtgcaatgttaggcgtggccggattgctgtcacgattggaggaggaccgtctcctcctgctcccaaaagaggacgtatgccgctgggcgctggctgtgggctcctgggcctattgtcgggctttgcatactcagcgactccagtgggagtag

SEQ ID NO: 25550 - DNA, 888 bp, synthetic construct
  source 1..888: mol_type = other DNA; note = Synthetic coding sequence
atgaagcagtacggcctgggccccaacggcggcatcgtgaccagcctaaacctcttcgcaactagatttgaccaggtcatgaaatttatagagaaagcgcaaaatatgtccaaatacgtcttgatcgatacaccaggacagatcgaagtgtttacttggagcgcgtctggaaccatcattacagaggccctggccagttccttccccaccgtggtcatctacgtgatggacacaagcaggagcaccaaccctgtgacattcatgtctaacatgttgtatgcgtgctctatactgtataagaccaaacttccttttatcgtggtgatgaataagactgacatcatcgaccacagttttgccgtcgaatggatgcaggacttcgaggccttccaggatgcacttaatcaggaaacaacatatgtgtcaaacctgactcgcagtatgtccctggtgctggacgaattttactcctctctccgcgtggtcggtgtgagtgccgtgctgggcacaggcctggacgaattattcgtgcaagtgacctcagctgcagaggaatatgaaagggagtaccgcccggagtacgaaagactaaagaagtcacttgccaatgcagaatcacaacaacagcgggaacaattggagagattgagaaaagatatggggtcagtggcactcgatgcgggcacagcaaaggatagtctgagtcctgtgctccatccgagcgacctaatactgaccagaggaacactggacgaagaagacgaagaggcagactccgacaccgatgatatcgatcaccgggtcacagaagagtcgcatgaggagccagcattccaaaacttcatgcaagagtctatggcacagtattggaagaggaacaataagtag

SEQ ID NO: 25551 - DNA, 1212 bp, synthetic construct
  source 1..1212: mol_type = other DNA; note = Synthetic coding sequence
atgcccagcgccgaggccaagctgaagaagaaccggtgcgccaactgctttgactgccccgggtgtatgcatactttgtccacccgtgccacatccatttctacacagttgcctgatgatccggccaaaactacaatgaaaaaggcctactacctggcttgcggcttctgcagatggacctcccgtgatgtgggtatggccgacaagtcagtggcatccggcgggtggcaggaacccgaaaacccacatacacagagaatgaataagctgatcgaatattaccagcaactggcccaaaaggagaaagtggagagggatcggaagaaactcgcccggcggaggaattatatgcctttggcctttagtgacaagtacgggcttgggactcgactccagagaccccgtgctggcgcatctattagtactctggcagggctttcgctgaaggagggagaagaccagaaggagattaaaatcgaacccgcccaggcagtcgatgaggtggagcctcttccagaggattactatacacggcccgtgaacctcaccgaagtcaccacccttcagcagcgtttgttgcaaccagatttccagccagtctgtgcctcccagttgtacccacgccataaacacttgcttatcaaaaggtcactcagatgtcgtaagtgcgagcacaatctgtccaaacctgaatttaacccgacctcaatcaagtttaagatccagctcgtcgccgtgaactatattcctgaggtacggataatgtcaatccccaatctgagatacatgaaggagtcccaggtcctgttgaccctgaccaaccccgtggaaaatctgacccacgtgacactctttgaatgcgaggagggagaccctgatgacatcaacagcacagccaaagtggtggtcccacctaaagagttggtgctcgccggcaaggatgcagcggcagagtacgatgaactagcagaacctcaagattttcaggatgaccccgacatcatagccttcagaaaggccaacaaggtgggtattttcataaaagtaacaccccagcgggaagaaggagaggttaccgtgtgctttaaaatgaagcatgactttaagaatctcgccgcccccatccgacccatagaggaatcagaccaaggtaccgaagtgatatggctgacacaacatgtggagctgagtctgggacctctcttaccttag

SEQ ID NO: 25552 - DNA, 1674 bp, synthetic construct
  source 1..1674: mol_type = other DNA; note = Synthetic coding sequence
atggaccagagccgggtgctgctgtgggtgaaggccgagcccttcatagtgggagctctgcaggtgccccctccttccaagttctcgttgcactatctaaggaaaatctctacttatgtgcaaatccgtgccactgagggagcctaccccagattgtactggtccacatggagacacattgcctgcggcaagctgcagcttgcaaaagacctagcctggctgtattttgagatcttcgacagcctgtccatgaagacgcccgaagaacggctggaatggtcggaggtgttatcaaactgtatgtcagaggaggaggtggaaaagcaacgcaaccagctgagcgtggacacgctgcaatttttactgttcctgtacatacagcagttgaacaaagtgtccctgcgaacgtccctgatcggggaagagtggcctagcccccgaaacaagagccagtcccctgacttgacagaaaaaagcaattgccacaataaaaactggaatgactactcccatcaagcctttgtttacgatcacctaagtgacctgctggagcttctgctggatcccaagcagctaacagcttcattccatagtactcacagctccctagtgagcagagaagctgtcgtcgccctgagcttcctaatagaggggaccattagccgagcccgcaaaatttaccctctccacgagctggctctttggcagccccttcacgccgattccgggtttagcaagatttcaaaaacattttccttttacaaactggagacctggctgaggagctgcttaactgggaacccatttggtacgtctgcttgcctaaagtccgggaaaaagcttgcttgggcacaccaagtagaaggtacaaccaaacgggctaagatcgcctgtaatacccacgtggcacccagaatgcacaggttggtcgtcatgtcacaggtatacaaacaaacactggccaagagttcggacaccctggcaggagctcacgtcaaaatccacaggtgtaacgaatcattcatctacctcctgagccctctcagaagcgttacaatcgaaaaatgccgaaattctatctttgtgctcggcccagtcggaactacactgcatctccactcgtgcgataacgtgaaagtgattgctgtatgccacaggctgtccatttctagcaccacagggtgtatattccatgtgctgacccctacacgcccgctgatcctgagcggaaaccaaaccgtgacttttgctccttttcacactcattaccccatgctggaagaccacatggctcggaccggactggcaaccgtcccaaattactgggataatcctatggtcgtgtgcagagagaactctgacacaagagtgttccagctgctgcctccttgtgagttctacgttttcatcatcccctttgaaatggaaggagatactacagaaattccaggcggactgccaagtgtttaccaaaaagcgcttggacagcgagagcagaagatccagatctggcaaaaaacagtcaaggaggcccacctgaccaaagaccagagaaaacaattccaggtactagtagaaaacaagttttatgagtggttaataaacaccggacacaggcagcaacttgacagtctggtgcctccggccgctgggtctaaacaggccgccggatag

SEQ ID NO: 25553 - DNA, 462 bp, synthetic construct
  source 1..462: mol_type = other DNA; note = Synthetic coding sequence
atggccgagcaggagcagcggaagatccccctggtgcccgagaacctgctcaaaaaaaggaaggcttatcaggctctgaaagccacacaggccaagcaagcgttattagccaagaaagaacagaaaaaaggcaagggactgcgcttcaagcggctggagagcttcctgcatgattcatggaggcagaaaagggataaagtccgcctgcggagactggaagtcaaaccgcacgctctggaattgccggacaagcattccttggcttttgtggtccggattgaacggatagatggagtgtccctactggtccagcggaccatcgcccggctgcgcctgaagaaaattttttccggagtcttcgtgaaagttaccccacagaatttgaaaatgcttaggattgtggaaccctatgtgacctggggtgaggtgtggcggcaccttcttggacgccctcattcttag

SEQ ID NO: 25554 - DNA, 2070 bp, synthetic construct
  source 1..2070: mol_type = other DNA; note = Synthetic coding sequence
atgatcgacagcgtgaagctgcggcgggacagcgccgccgacttctttagccattatgagtatctgtgcgcccttcagaactctgtaccactcccggctgtgagggcgtgtctgagagaaggtgtcctggactttaacgctgatcggctcagaggagtggactgggccccattactctcaacgttgaaaattaataaagacctccccctcgtgagcataaagtccttttttcaaccatggttaggcgatacagggagcgacatgaataagttttgtcggagcagggtccctgctatccggtacaaagacgtgacatttcagttgtgcaaggcactgaaagggtgcttaagtatctcttcagtacttaaaaatctggaacttaacggtctgattctcagagagcgggacctgactattttggcaaaaggccttaacaaatctgccagcctggtgcatctgtccctcgcaaactgcccaataggcgacggcgggttagagatcatctgtcagggaatcaagtcttctataacactgaagacggttaacttcactggctgtaacctgacctggcaaggcgccgatcatatggctaagattcttaagtaccaaaccatgagaagacacgaggaaacatgggcggagtccctccggtaccgccggcctgacctggactgtatggctggcctacgccgcattacacttaattgcaatacgctcatcggggacttgggcgcatgtgcctttgccgatagcctgtccgaggacctgtggttgcgcgctctggatcttcagcagtgcgggctcacgaatgaaggcgccaaagcactcctcgaggctcttgagactaacacgacccttgtggtgcttgacatccgtaagaacccgctcattgaccactccatgatgaaagcagttatcaaaaaagtcctgcaaaacggacggtccgctaaatccgaataccaatggatcacttcaccctccgtcaaagaaccatctaagaccgccaagcagaaacgtcggaccatcattctgggatctggtcacaagggcaaagctaccattcggattgggctcgcgaccaaaaagcctgtatcctcagggcgcaaacattccctgggcaaagagtattacgccccagcccccttacctcccggggtgtccgggttcctgccttggcgcacagcggaacgggctaagaggcacagaggcttcccgctcatcaagacccgcgatatttgcaaccagcttcagcagccggggttcccggtgaccgtcacggtggaaagcccctcgagctctgaggtggaggaggtggacgactctagtgagtctgtgcacgaggtgccagagaaaaccagcatcgagcaagaggctcttcaagaaaaactggaggagtgtcttaagcagcttaaggaagagcgcgttattcgtttgaaggtggacaaaagagtgagcgagctggaacatgagaatgctcagttgagaaatattaacttctctctcagcgaggctttacacgcacaatcacttaccaatatgattttggacgacgaaggcgtcctgggctcaatcgagaacagttttcaaaagttccatgcctttctggacctcctcaaggacgccggcctaggacaattggcaacaatggccgggattgaccagtctgactttcagttgttgggacatccacaaatgacttcaaccgttagcaatcctcccaaggaggagaaaaaagctctcgaggacgagaagccggagccaaaacagaacgccctcgggcagatgcagaatatccagttccaaaagatcacaggcgacgcccgaatccctttgccactggactccttcccggtgccagtttcaacgcctgagggtttgggcacctcgagcaacaacctcggcgttcctgctacagagcagagacaggaaagtttcgaaggcttcatcgcccgtatgtgtagtcctagcccagacgcaacgtccgggaccggatcacagcgcaaggaggaggagctgagcagaaactctcggtcatcttccgaaaaaaagacaaaaaccgagtcacattag

SEQ ID NO: 25555 - DNA, 915 bp, synthetic construct
  source 1..915: mol_type = other DNA; note = Synthetic coding sequence
atgaacttcagcgaggtgttcaagctgagcagcctgctgtgcaagttttcccctgacgggaagtacctggcttcatgcgtgcagtaccgactcgtggtgcgcgatgtgaacaccctccagatcctgcagctctacacttgtcttgaccagattcagcacattgaatggagtgcggacagtctgttcatattgtgtgctatgtataagagggggttggttcaggtgtggtcattagaacaacccgaatggcattgcaaaatcgacgagggttctgccggactggtggcctcatgctggtcacccgacgggcgccatatcttaaacactacagaatttcacctgcggataacagtatggtccctctgcacaaagtccgtgtcatatatcaaatatcctaaagcatgccttcagggaatcacctttacaagagacggaaggtatatggcgctggcagagagacgggactgtaaagactacgtttcaatctttgtatgttccgattggcagctcttacgtcatttcgatactgacactcaagacctcaccgggatcgagtgggctccgaatggctgcgttttggctgtgtgggacacctgcttggaggttaggattctgaatcacgtcacttggaagatgataacagagttcggtcaccccgctgcgatcaacgatccaaagattgtcgtctataaggaagccgagaagtccccgcaactaggcttagggtgcctttccttcccgcccccccgcgctggcgccgggcctcttccatcctccgagagtaagtatgagatagcgtcagtgccagtgtcccttcagacgctgaagccagtgactgaccgtgctaatcccaaaattggtatcggaatgctggctttctcacccgactcctacttcctggcaacacgtaattag

SEQ ID NO: 25556 - DNA, 483 bp, synthetic construct
  source 1..483: mol_type = other DNA; note = Synthetic coding sequence
atgaaggaggtgggccggccccgggaggtgcggggccggcccggcaaatctagaattcaaaaagaactcgctgacattaccctagacccccccccaaattgttcagccggccctaaaggggataatatctacgaatggagaagtacaattctgggcccaccaggatctgtttacgaaggaggcgtgttcttcttagatattactttcacaccagaatacccctttaagccccccaaggtcacctttcgcaccaggatctatcattgcaacatcaatagccagggagtcatctgcttggatatcctcaaagacaactggtctccagcattaacaattagtaaggtacttcttagcatttgctccctcctgacagactgcaacccggctgatcctctggtgggctctattgccactcagtatatgaccaatcgtgccgaacacgacagaatggctaggcagtggacaaagagatacgctacttag

SEQ ID NO: 25557 - DNA, 516 bp, synthetic construct
  source 1..516: mol_type = other DNA; note = Synthetic coding sequence
atgagcagcggcaacgccaagatcggccaccccgcccccaacttcaaagctactgccgtgatgccagatggccagttcaaagacatttctctctcggactataagggtaagtatgtggtgtttttcttttaccctcttgacttcacatttgtctgcccaacagagatcatagccttcagtgacagggctgaggagtttaagaaactcaactgtcaggttatcggagcttccgtggactcacatttctgccacctagcctgggtcaacactcccaagaaacaaggcgggttaggaccaatgaacattcccctcgttagcgaccctaaacggacaattgcccaggattatggggttctgaaagctgacgaggggatcagctttagggggctttttattatagacgataagggtattcttcggcagattactgtgaacgatctgcccgtagggcggagtgtagatgagacgctgcggctggtccaggcctttcagtttacagacaaacatggagagtag

SEQ ID NO: 25558 - DNA, 603 bp, synthetic construct
  source 1..603: mol_type = other DNA; note = Synthetic coding sequence
gtgctgatcttcgcctgcctggtgcccggcttccccgccgtgatgagctcccgcggcccatgtactctggagaccctaattaatccttcaccgtctgtggccgatgttaaaatatatccggaagaaatcaccccactcctaccagctatctccggggagaagattgccgaggaccaaacttgcttttttctgcagattctcctgaagtacatggtgattcaggcagcttccctggaatggaagaataaggaaaaccaggacactgggttcaaattcttgtttacgctgtttcggaagtactacctcccccatctatttccctcttttaccaagctgacgaatatttacaaacctgtgctcgatattccccacctgagaccgaaaccagtctatatcacaaccacgagagacaatgagaatatctattccacaaaaatcccctacatggccgccagagtcgtgttcattaaatggatcgtgacgttcttcctcgagaagaaatacctgaccgccacccagaacacaaagaatggcgtggacgttctgcctaaaataatccaagtttgccacccctcatcattctatttattgatgctggtatag

SEQ ID NO: 25559 - DNA, 576 bp, synthetic construct
  source 1..576: mol_type = other DNA; note = Synthetic coding sequence
atgagcagcaccctgggcaagctgagcaaccaggtggaggagaccctcccactcctgaaaaaaccattgaagcgagcaatcactacactcatggccggcattctacggctcgtggtgcaatggcctcccggtaggttgcaaaccgtgaccaaaggagtcgagtccctgatctgtacggattggattaggcacaaatttactcgaagcagaattcccgaaaaggtgtttcaggccagccctgaggaccatgagaagtacggcggcgaccctcaaaaccctcataaactgcatatcgtgaccaggattaaaagcactagaagacgaccatactgggagaaagatatcatcaagatgttaggtctcgagaaagcccacactccccaggtgcacaagaacattcctagtgtgaatgctaaactcaaagtcgtaaaacatcttatccggataaaacccctgaaacttccccagggcctccctgcggaagagaatatgtccaacacatgcctcaagtcaaccggagagctggttgttcagtggcatttgaagcccgtggagcaaaaagcacatgagagctag

SEQ ID NO: 25560 - DNA, 483 bp, synthetic construct
  source 1..483: mol_type = other DNA; note = Synthetic coding sequence
atggaggccgagcggccccaggaggaggaggacggcgagcagggccccccccaggatgaagagggctggcctccaccaaatagcaccaccaggccctggcggtcagccccaccttcccctccacctcctggaacccgccacactgctttgggaccacggagcgcctctctcctgtcactgcaaactgaactcctcctagatttagttgccgaagcccagagccgccgcttggaggaacagcgtgccacattctacacaccccaaaacccaagctctctagccccagctcctcttaggcctctggaggatcgagagcaactgtacagtaccatactgagtcaccaatgtcagcgtatggaggcccaaagatctgagccaccactcccacctgggggacaggaactgctagagctcctcttgcgcgtgcagggcggaggtcggatggaagagcagagatcaagaccccccacacacacatgttag

SEQ ID NO: 25561 - DNA, 321 bp, synthetic construct
  source 1..321: mol_type = other DNA; note = Synthetic coding sequence
accttcctggagcagagcaagacccggttcaacaagaactacaagggtatgagtctgtcgaaaataacaacaacagtgggactgaacatcggcacggtggacgtgggcaaagcacgcctgatgttttgggatctcggtgggcaggaggagctgcaatcactttgggataaagacaagactaagtgcggcgacctggggactttgcatagctctaaggtctccgccagcttcaggttgcgcgatctcgccgctgaccatcaccggacgcagaagtggcagagacctgatgtcggtacagccggatggctgccacttccttag

SEQ ID NO: 25562 - DNA, 1524 bp, synthetic construct
  source 1..1524: mol_type = other DNA; note = Synthetic coding sequence
atggccgagctgcagatgctgctggaggaggagatccccggcggccgccgagcgctcttcgattcttacactaatctcgaaagagtagcagattactgtgagaataactatattcagtctgccgacaagcagagggctttagaagaaacaaaagcatacacgacacagtccctggcgtctgtcgcctatttaatcaatacactggctaacaacgtactgcagatgctcgatatccaggcttcccagctcaggcgaatggagtcaagcattaatcacattagccagactgttgatatccacaaagaaaaggtggcccgcagggaaatcggcatactgactaccaacaaaaacacctctagaacacacaagattatcgctccagctaacctcgagagaccagtgagatacattcgcaagcccattgactataccatcctagacgacattgggcacggggtcaaagtgagtacccaaaatatgaagatggggggactgccacggactacacctcccacccagaagcctccgagccctccaatgagtgggaagggaactctgggaaggcactcaccatataggacactcgagccggtgcggcctcctgtggtgccgaatgactacgttcccagccccactaggaacatggcaccatcccagcagagccctgtgagaacagcaagtgttaatcagagaaaccgaacctattctagttcaggatcttccggaggctcacaccctagcagcaggtcttcatcccgcgagaactcagggtctggctcagtaggagtgccaattgctgtgccaactccctcacctccgagcgtgtttcccgcaccagccgggtcagccggcacacctccacttccggctacaagcgctagtgccccagcacccctggtccccgctaccgtgcctagttcaaccgcccctgacgctgccgcagggggagcccagactcttgcggatggcttcacaagccctactcctcctgtcgtgagctccaccccgcctacaggtcaccccgttcaattctactccatgaataggcctgcgtcacgtcacacccctccaacaattggagggtccttgccatacaggcggcccccctcaataacatcccagacctcactccagaaccagatgaacggaggcccattttattctcaaaacccagtaagcgataccccccctccacctccccccgtggaagaacccgtgttcgacgaaagtccaccccctccacccccgcctgaagattacgaggaggaggaggccgctgtggtggaatatagcgatccttacgccgaggaggaccctccttgggccccgcggtcatatttggaaaaggtggttgcaatatacgattatacgaaagacaaggaagatgagttgtccttccaggagggtgctatcatttatgtgattaagaagaacgatgatggctggtacgaaggcgttatgaacggcgtaaccggactgtttcccgggaattacgtcgagagcatcatgcattactcggagtag

SEQ ID NO: 25563 - DNA, 303 bp, synthetic construct
  source 1..303: mol_type = other DNA; note = Synthetic coding sequence
atggccagcgccggcacccagcactacagcatcggcctgcggcagaagaattccttcaagcagtccggtcccagcggcaccgtgcccgctacaccaccagagaagccgtccgagggtcgggtatggcctcaagcccaccagcaggtgaagcctatttggaagctcgagaaaaagcaggtcgaaacactctctgcggggctggggccaggtctattgggagtgcctccacagcccgcttacttcttttgccccagcaccctgtgtagctctggtacgacagccgtaattgccggccacagctag

SEQ ID NO: 25564 - DNA, 1212 bp, synthetic construct
  source 1..1212: mol_type = other DNA; note = Synthetic coding sequence
atggccagcgccctgcggcccccccgggtgcccaagcccaagggcgtgctgccaagccactattatgaatcattcttggaaaaaaaggggccttgcgaccgggactacaagaaattttgggccggactgcagggcttgacaatctatttctacaactctaatagagacttccagcacgtcgagaagcttaatctcggagccttcgaaaagctcactgatgaaataccttggggatcgagcagggatcccggcacccacttttctctgattctgagagaccaagaaatcaaatttaaggttgagacattagaatgtcgtgaaatgtggaaaggtttcattttgacagtggtggagctgcgggtccctaccgatctgacactgctgccagggcatctatatatgatgtcagaggtcctcgccaaggaagaagcccgtcgtgctcttgagaccccctcctgctttttaaaggtctcaaggctggaggcacagctgctgctggagagataccccgagtgtggaaatcttctcttgaggccgagcggtgacggcgctgatggcgtctccgtcactacccggcagatgcacaatggcacccatgtcgtgcggcactacaaagtgaaaagagaggggccaaagtatgtcattgacgtcgaacagccattctcttgcacatcacttgacgctgtagtgaattatttcgtgagccataccaaaaaagctctcgtcccctttttgctggatgaggattatgagaaggtgcttggctatgtggaggccgataaagagaacggtgagaatgtgtgggtagccccaagtgcgccgggccctgggcccgctccttgcaccgggggaccaaaaccgctatcccccgcgtctagccaggataagctgccacccctgccaccgctacccaaccaggaagagaactatgttacacctatcggggatggccctgctgtcgactatgaaaatcaggacgtggcctctagcagctggccggtgatactgaaaccaaagaaattaccgaagccacctgcaaagctgcctaaacccccggtaggacccaaacccgagccaaaggtttttaatggtggactgggcagaaaactgcccgtatcctctgcacagcccctatttccgacggccggactagccgatatgaccgcagagctgcagaagaagctagagaaacgcagggctctggaacattag

SEQ ID NO: 25565 - DNA, 1551 bp, synthetic construct
  source 1..1551: mol_type = other DNA; note = Synthetic coding sequence
atgctgcggcggggcagccaggccctgcggcggttcagcaccggcagggtgtacttcaagaataagctgaaactggcactgattggacagtctctttttggccaggaagtttacagccacctgcggaaggagggacatcgcgtcgttggggtgttcaccgtcccggataaggatggtaaggccgaccctctagcattagccgcagagaaggacggcaccccagtctttaaactgccaaaatggcgggtgaagggtaagaccatcaaggaagtggccgaggcctatcggtctgtgggggccgagctaaacgtgctccccttttgcactcagttcatcccgatggacattattgacagcccaaagcatgggtctatcatctatcatccttctattctgcctaggcaccgcggagcgagtgcaattaattggaccctgatcatgggagataaaaaggctggtttttctgtgttttgggccgatgatgggttggatactggcccaatcctgctccagcgatcatgcgacgtcgagcctaacgacacagtagacgcactgtacaacaggtttttattccctgagggtattaaagcaatggtagaggccgtgcaactgattgccgacggtaaggccccacggatcccacagccagaagaaggagctacatatgaagggatccaaaagaaagaaaacgccgaaatttcgtgggatcagtcagcagaagtgctgcataattggattcgcggccatgacaaggtcccgggcgcttggaccgagatcaacggccagatggttaccttttacggcagcacattattgaatagttccgtcccccccggcgagcctctggaaatcaaaggggccaagaaacctgggctggtcaccaagaacggcttggtcctattcggaaatgacggaaaagctctgacagtgcgaaacctgcagttcgaagacggaaagatgattcctgcatcccaatatttttctactggagagacgagcgtggtggagttgactgccgaggaggtgaaggtggcagagacgatcaaagtcatctgggccggcatcctgtctaacgtccccataatcgaagactctaccgacttcttcaagtcaggggctagcagcatggatgtggccagacttgtggaggaaatccgccagaagtgtggcggtctgcagctccagaacgaagacgtgtatatggccaccaagtttgagggctttatccagaaagtcgtgcggaagctcagaggggaagaccaggaagttgagcttgtcgttgattacataagcaaagaagtgaatgagatcatggtcaaaatgccctaccagtgtttcataaacggccaattcacagacgccgatgacgggaaaacctatgacacaatcaatcccaccgatggcagtacgatctgtaaagtatcatatgcttccctcgcggacgttgacaaagcggtcgcagccgctaaggatgcttttgagaatggcgaatgggggaggatgaatgcccgggagaggggcagacttatgtactctatgcgcatgaattag

SEQ ID NO: 25566 - DNA, 1581 bp, synthetic construct
  source 1..1581: mol_type = other DNA; note = Synthetic coding sequence
atggaggagatccccgcccaggaggccgccggcagcccccgggtgcagtttcagagtctagagacccagtcagagtgcctgtctcctgagccacagtttgtgcaagatacagatatggagcagggtcttactggcggcttccccatctcgaaaccggatgggatcagccagctcgaacaggacctgcaggtattcgacctcgagaccaagacacgagaagtgctcagggatgattgtagcgacggcgagacgagagaagagaacaaactgcttatccctaagcagaaaataagtgaggaggtgcactcctacaaggtgcgcgtcggtaggttaaagcacgacatcacccaggttcctgagacccgtgaggtttataagtcggaagataggctggagaggttacaggagatcctaaggaagttcctttatctcgagagagagtttaggcagattaccatttcaaaggaaacgttcacaagtgagaaaaataacgaatgtcacgagcccgagaagagttttagcttagattctaccattgatgccgaccagagagtgcttcgaattcagaataccgacgataatgacaagtacgacatgtcttttaatcaaaactctgcctcaggaaagcacgaacatctgaatctaaccgaagattttcagtcttccgagtgcaaagaatcccttatggacctatcacacctgaataagtgggaatctattccaaataccgagaagtcttataaatgtgacgtgtgtgggaagatattccatcagtcttccgccttaacgcgacaccagcgcatacatactcgcgaaaaaccctacaaatgcaaagagtgcgaaaaatcgttctcacagagcagtagcttgtctaggcacaaacgtatccacactcgggagaagccctacaagtgcgaagcaagcgacaaaagctgcgaggcatccgacaagtcatgctcgcctagctccgggataattcagcataaaaagattcatacccgtgctaaatcatacaaatgttcgtcttgtgagcgggtgtttagccggagtgtgcacctcacacagcatcagaaaatccataaagagatgccatgtaagtgcacagtttgtggaagtgacttttgtcacacatcatatctcctggaacatcagagagtgcaccatgaggagaaggcctatgagtatgacgagtacgggctggcctacatcaaacagcaggggattcacttccgggagaagccttatacatgcagcgagtgcgggaaggattttaggctcaatagccacttaatccagcatcagcggatacacacgggtgaaaaggcccatgagtgtaatgaatgtggaaaggccttctcacagacatcgtgcttgattcagcaccataagatgcatcgaaaagagaagtcatatgaatgtaacgaatatgagggtagtttttcccacagctctgatctcattctgcagcaggaggtcttgacaaggcaaaaggcctttgattgtgatgtgtgggaaaaaaactcctctcagcgggcccacctcgttcagcaccagagcattcacactaaggagaatagttag

SEQ ID NO: 25567 - DNA, 603 bp, synthetic construct
  source 1..603: mol_type = other DNA; note = Synthetic coding sequence
gtgctgatcttcgcctgcctggtgcccggcttccccgccgtgatgtcctctcgcgggccttgtactcttgagactcttatcaatcccagtccaagcgtcgccgacgttaagatttatcccgaggaaattacccccctgttgccagccatcagcggtgaaaagatagccgaagaccaaacctgtttcttcctacagattttgctgaagtatatggtgattcaggccgcctccctcgaatggaagaataaagaaaaccaggatactggtttcaagtttttgttcacacttttccgaaagtattaccttccccatttgttcccttcattcacaaagctcacaaatatctataagccggttttggacatccctcacctgcgccccaagcctgtgtacattacaactactcgcgacaatgaaaacatctactcaacaaagattccatacatggccgctcgtgttgtatttattaaatggatcgtcacgttttttttagagaagaagtaccttaccgccacacaaaacaccaagaacggcgtcgacgtgctgccaaagataatccaagtgtgccacccttcttctttctacttgttaatgcttgtgtag

SEQ ID NO: 25568 - DNA, 540 bp, synthetic construct
  source 1..540: mol_type = other DNA; note = Synthetic coding sequence
aacatcaagcccggcgagggcctgggcatgtacatcaagagcacctatgacggcctgcatgtgatcacagggacgaccgagaatgtgggctggcaactgaagaacctggtaaagaagctacgtgagaatccaactggagttgttttgctgctgaagaaacggcctactgggtccttcaacttcacccccgctcctctgaagaaccttaggtggaaaccccccctggtgcagacgagcccaccccctgctacaacccagtctcctgaaagtacaatggacacttccttaaagaaagagaagtcggccatcctggacctttacatccctcccccgcctgcagttccttactcaccccgcgacgagaacgggtcatttgtgtatggggggagctccaaatgcaagcagccactacctgggccgaaaggaagcgagagccccaatagcttcctggatcaagagtcacgcagaaggcgtttcacaatagctgattctgatcagctgcccggctatagtgttgagactaacatactgccaacctag

SEQ ID NO: 25569 - DNA, 1368 bp, synthetic construct
  source 1..1368: mol_type = other DNA; note = Synthetic coding sequence
atgatgggcgcccccaacctgatcgccgacagcatggagtacggcttaagctattcggtgatttcttatttgaagaaactgagccagcaagccaaaattgaaagcgatcgcgtcattgggagcgttggcaagaaggtagtgcaggagaccgggattaaggtgcgttcaaggtcccacggcctgtctatggcctatcggaaggacttccagcagttactgcaggggatctcagaggacgtgccacatcggcttctggacctgaacatgaaagaatataccggattccaggtagcactactgaacaaggacctgaagccccagacgtttagaaatgcgtatgatataccacggcggaatctgctcgatcacctgacaaggatgaggtcaaatctcctgaagtctacaaggagatttctgaaggggcaagacgaggaccaggttcatagcgtgccaatcgcccaaatgggcaattatcaagagtatctgaagcaggttccttcgccactccgcgaactagacccagatcagccaagacgactacacacattcggcaaccccttcaaactagataaaaaaggcatgatgatagacgaagccgatgaatttgtcgcggggcctcagaataagcacaaaagacccggggagccaaacatgcagggaattccgaagaggcggagatgtatgtcaccactcctgcgaggacgacagcaaaacccggtggtaaataatcatattggtggcaagggaccacccgcaccgaccacacaagcccagcctgatctgattaaacctctccctctgcataagatttccgagaccacgaacgactcgatcatacacgacgtggtcgagaatcacgtcgccgaccagcttagctcagacatcacgccaaacgccatggatacggaattctccgccagcagccctgccagtcttttagaaaggcccactaatcacatggaagctcttggacatgatcacctcggcacaaatgatcttaccgtgggtggcttcttggaaaatcatgaggagccgcgcgataaagagcaatgtgccgaagaaaatattcccgcctcttctctgaataaaggcaagaagctgatgcattgcagaagccacgaagaggtgaacacggaactcaaggcccaaatcatgaaagagatcaggaaaccaggacgcaagtatgagagaattttcactctcctcaagcacgttcagggaagcttacagactcggttaattttcctgcagaatgtcatcaaggaggcttccaggttcaagaaacggatgctcatagagcagctggaaaatttccttgatgagatacatagaagggctaatcagattaaccacattaattccaactag

SEQ ID NO: 25570 - DNA, 1467 bp, synthetic construct
  source 1..1467: mol_type = other DNA; note = Synthetic coding sequence
ctggactgcggcccccggctgcccgtggaggtgggccccagcctgagctcaccttcatctggatgcggcgaagggtcgattagtgtcggcgagaatgtgagcgatgtcgctcctactcagccctggtggcctaatactccaggcgactcggtcagtgaagaattgggacccggaaggtccggcgacaccgaagacctttcccctaattggccattgaactcacaggaagataccgcagcccaaagctcccctggacggggcgaggaagcagaggcatctgcagctgaagcacagggtggcgaacaggcctatctggcaggcctggcggggcagtaccatttggagcgatacccggactcttatgagtctatgtcagaaccaccaatcgcacacttgctccgtccggtcctccctcgagcttttgccttcccggtggatccccaagtgcagagcgctgctgatgagaccgcagtgcaactctctgaacttctcaccttaccagtgctgatgaagcggtccataaccgcccctctcgcagcccatatttctttggtgaacaaagcagcggtcgactatttttttgtggagctgcacctggaggcacactacgaggcactgcgacattttcttctgatggaggacggcgagtttgcgcaatccctgtctgatcttctctttgagaaactgggggctggtcagactcctggcgaattgctcaaccctctggtacttaactccgtgctgtccaaggctctacagtgttcgttgcacggcgacactcctcacgccagcaatctgagcctcgccctgaagtatcttccggaggtgttcgcgccaaacgcccctgacgtactgtcttgcctggagctcagatacaaggtcgactggccgctgaatattgtgatcaccgagggttgcgtgagcaaatatagcggggtctttagtttcctactccagctcaaactaatgatgtgggcgttgaaggacgtctgttttcacctgaaaaggactgtcccctcggccgcggccgtgcaggctcgcgacgccgccttcagggaagggcaccctggtctccacagacagccggatcctgccaggcacttggtaagggtccagggccaggtgggacataggggaaggccagggggcgatccagcatgcgctaggcgggtcccagcccaaggccggcttcaggcagccccagtgatgaacgtgattcattccatatttagtttggtgctgaaattccggtctcagttgatctcgcaggcctggggccctcctggtgggcctcggggggctgagcaccccaattttgccctgatgcagcagtcttataacacgtttaaatactatagtcactttctgttcaaggtcgttactaagttggttaacaggggatatcagccgcatctggaagattttctgctgcgcatcaacttcaacaattactaccaggatgcctag

SEQ ID NO: 25571 - DNA, 3819 bp, synthetic construct
  source 1..3819: mol_type = other DNA; note = Synthetic coding sequence
atggccaacgacagccccgccaagagcctggtggacatcgacctgtcaagcttacgagaccctgctggaatctttgagcttgtagaagtggtgggtaatggcacatacggccaggtctataaggggcgacatgtgaaaacagggcagttagctgccattaaggtgatggacgtgacagaggatgaggaggaagaaatcaaacttgagatcaacatgcttaagaagtactctcatcatcggaatatcgccacctattacggtgcgttcataaagaagagtccaccaggtcatgatgatcagctctggttggtcatggaattttgcggtgccggctcaatcaccgacctggtcaagaatactaagggcaacaccctaaaggaggattggattgcctatatatcacgggaaattctcaggggcttggcccatcttcatatccatcacgtaattcatagggacattaagggccagaacgtgctgttgaccgagaacgcagaggtgaagctcgtggattttggggttagcgcacagctcgacagaacggtgggtagacgtaacacatttatcggtactccatactggatggccccagaagtgatcgcatgtgatgagaacccagacgccacatacgattacagatcagacctgtggagttgcgggatcactgccatcgaaatggcagaaggtgcgccacccctttgcgacatgcaccccatgagagctctcttcctcatcccacggaatccgccacctaggctcaaatcaaaaaagtggtccaagaagtttttctcattcattgaaggttgtctggttaagaactacatgcaaagacctagtacagaacaactcctcaagcacccatttattagagaccaacctaacgaaagacaggtcaggatccaacttaaagaccacattgaccgcaccaggaagaagagaggggagaaggatgagacagagtacgagtattctggatcagaagaagaggaggaggaggttccagaacaggagggggagccctccagtatagtgaatgtgcctggggagagtacacttcgtcgcgacttccttcggctgcagcaggaaaacaaggagaggagcgaggccttacgacggcagcagctgctgcaggaacagcagttgcgcgagcaggaggagtacaaacggcagctgctggccgagagacagaagagaatagagcaacagaaggagcagagaagacgactcgaagaacaacagaggagggagagagaggcacgccgacaacaggaacgggagcagcgtaggcgggagcaggaagagaaaagaagactggaggaactggaacgcagacgaaaggaagaggaggagaggcggagagccgaggaagagaaaaggagagtagaacgggaacaggagtacatccggcgccaattggaggaagaacaacgtcatctggaggttttgcagcagcagttgctacaggaacaggctatgctgctacatgatcacagacggcctcatccgcagcattcacagcagccacccccacctcaacaagagagaagcaaaccatcttttcacgcccctgaacctaaggctcactatgaacctgctgatcgcgctcgggaagttgaagatcggtttaggaaaaccaaccatagttcgccagaggctcagtcaaagcagactggcagggtgctcgagcccccagtgccctcccgatctgagagtttctctaacggcaacagcgagtcggtgcaccctgcactgcagcggccggctgaaccacaggttcccgtccgtacaactagcaggtcccccgtccttagcagacgggattctcctttacagggctcaggacagcagaattctcaggcaggccagcgcaatagcacctccatcgaaccccggctactgtgggagcgagttgaaaaactggtgcccagaccaggaagcggctcatctagcgggtcctccaattctggatctcagcccgggtcgcatcctgggtctcagtcgggctccggcgagcgatttcgagtaagatccagcagtaaatcagaagggagccccagtcagaggctggagaatgcagtcaaaaaacctgaagacaagaaagaggtattcaggccgttgaagcctgcagacctgacagcactggcaaaggaactccgggcagtggaagacgtgcggcctccacacaaagtaacagattactcctcatcgtcagaggaatccggcactactgatgaggaagacgacgacgtcgaacaggagggagctgatgagagtacaagtggccctgaggatactagagcggcatcttctctcaacttgtccaacggcgaaactgagagcgtgaagacgatgatcgttcacgacgacgttgagagtgagccagccatgacaccaagcaaagaaggtacgcttattgtgaggcagtctacggtcgaccagaaacgggcgtcccaccacgagagtaacggattcgccggcaggatccatctgctgccagatctgctccagcagtcgcactctagcagtacatcatcaaccagtagtagtcctagctcttcccagccaactccaaccatgagcccacagacaccacaggataagcttacagcaaatgagacccaaagcgcctccagcaccttacagaagcataagtcctcgtcttcctttactcctttcattgacccacgcttgctgcagatctcaccaagcagtggaacgaccgtcacaagcgtggtcggtttttcctgcgacggcatgcggcctgaggcaatacggcaggacccaacccggaaagggagtgttgtgaacgtgaatccaacaaacaccagaccccagtccgatactccagaaatccgaaagtacaagaagcggtttaattcagagattctgtgcgccgccctgtggggcgtcaatttgctcgtgggaactgagagtggcctcatgctccttgataggagcgggcagggaaaggtgtaccccctcatcaatcgacgccggtttcaacaaatggacgtgctggaaggactgaatgtccttgttactatatcagggaagaaggataaattgagggtgtattacctatcctggttgagaaataagatccttcataatgaccctgaagtcgagaaaaaacagggatggacaactgtgggagaccttgaaggttgcgtccattataaagtggtgaagtacgaacgcatcaaattccttgtgattgcccttaaaagcagcgtggaggtttacgcatgggcaccaaagccctatcataaattcatggcattcaagtcttttggtgaattggtccacaaaccactgctggtggaccttacagtggaagagggacagagattgaaggtgatttatggcagctgcgctggttttcatgctgtggatgtagattctggttcggtgtacgatatttatttgcccacccacatacagtgctccattaaacctcatgctattataatactccctaataccgatggcatggaactactagtatgttatgaggacgagggcgtgtacgtgaacacttacggcaggattaccaaggatgtcgtactccaatggggggagatgccgacctctgtagcttacatcaggtccaatcagaccatgggctggggggaaaaggcaattgaaatccgcagtgtggagacaggtcacctcgatggagtgttcatgcataagagggcacagagacttaagttcctgtgtgagcggaacgataaagtttttttcgccagcgttcgtagtggagggtcttcccaggtttactttatgaccctgggacgaactagcctgttatcctggtag

SEQ ID NO: 25572 - DNA, 363 bp, synthetic construct
  source 1..363: mol_type = other DNA; note = Synthetic coding sequence
gccctgcagatcagcgagaacctgttcagcaacaaggtgctgaacgctctgaaacccgagaaggatgtggacggagtgaccgacatcaatctgggcaaactggtcaggggagatgcccacgaatgctttgtgtcacccgtggccaaagctgttattgaactcctggaaaagtccgtgggggtgaacttggacgggaaaaaaatcctggtggtcggcgcccacggctctctggaggctgccctgcagtgcctcttccagcgcaaaggctctatgacaatgtccatccaatggaagacccgacagcttcagagcaagacagaatccagatctgtgacacgtctcgaatgcagacgagtgatttag

SEQ ID NO: 25573 - DNA, 1866 bp, synthetic construct
  source 1..1866: mol_type = other DNA; note = Synthetic coding sequence
atggtgagcatcctgagcagcttcgagagccggctgatgaagctggagaactcgatcattccggtccacaagcagaccgaaaacctgcaacggttgcaggagaatgtggaaaaaaccctatcatgcctcgatcatgtgatttcttattatcatgtggctagcgatacagaaaagattatccgagagggccccactggacgtctggaggagtatctgggtagcatggccaaaatccaaaaggccgtggagtatttccaagataatagccccgactcacctgagctgaacaaagtcaaactgctgttcgagagagggaaggaggccctggagagtgagtttcgaagtctaatgactcgccacagcaaggtcgtgtctcccgtgctgatcctggacctgatctccggcgacgatgacctggaggcccaggaggacgtgactcttgagcacctccctgaatctgtgttgcaagatgtgattcgtattagtagatggctggtggaatatggaagaaatcaagatttcatgaatgtgtactaccagatccgcagttctcagctcgatcggagcattaagggcctcaaagagcattttcacaaatcatccagctctagtggcgtgccatactccccagcaatcccgaacaagcgcaaggatacgccaacgaagaagccggtaaaacggcccggcacaatccggaaagcgcaaaatcttctgaaacagtattcacagcacggcctggatgggaaaaaaggcggttccaacctgataccgctggaaggacgcgatgatatgctagatgtggagaccgacgcctatatacactgcgtctctgcctttgtgaagctggcgcagagcgagtaccaattgctggcagatattatccctgaacatcaccagaaaaaaacatttgattctttaatccaagacgcactggacggtctgatgttggagggagagaatatcgtctctgccgcccggaaagctattgtgcggcacgacttcagcaccgtcctcaccgttttcccgatcctccgacacctcaagcagactaagccggaatttgatcaggtgttacagggaactgcagcatcaacaaaaaataagctgcccggcctgattacatcaatggagaccattggagcgaaggccctggaggacttcgccgataacataaagaacgatcctgataaggaatataatatgccaaaggacgggacagtgcacgagttgacgagtaatgctatactgtttttgcagcaacttttagacttccaggagaccgctggcgcaatgctggcatctcaaggcaaggtgctgggtaacctccaactcaatttgctgtccaaatcgaaggtctatgaagaccccgctctgagcgcaattttcctccacaataattacaattacattctgaaatcactggagaagtccgagctaatacagctcgtggccgtgacacagaagaccgccgagcggtcttatagggaacatattgaacagcagattcagacatatcagagaagctggttgaaagttactgactacatcgccgaaaaaaatctgcccgtttttcaacctggcgtgaaactgagagataaagaacgacaaataataaaggagcgctttaaaggctttaatgatggcctcgaagaactgtgtaagattcaaaaggcttgggcaatcccagacacagagcaacgggatagaattcgccaagcccagaaaacaattgttaaggaaacatacggagccttcctgcagaagttcggctctgtccccttcaccaagaatccagagaagtacatcaagtacggtgtggagcaggtgggcgatatgattgatcgactgtttgacacctcagcctag

SEQ ID NO: 25574 - DNA, 1344 bp, synthetic construct
  source 1..1344: mol_type = other DNA; note = Synthetic coding sequence
atggacttcctgctgggcaaccccttcagcagccccgtgggccagcggatcgaaaaagccaccgacggctccttgcagtccgaggactgggcgttgaatatggaaatctgcgacatcatcaacgagacagaagagggccccaaagatgctctgcgagccgtgaaaaagaggattgtgggaaataaaaatttccatgaagtaatgcttgctctaacagtgctcgaaacttgtgtcaaaaactgtggacatcgcttccacgttctcgtggccagtcaggactttgtggagagtgtgctggtgaggaccattctgcctaagaacaaccccccaactattgtgcatgacaaggtgctgaatctgatccaaactgtgttcaattccgaaacccagtccggtcaggactcagttgggactgactcctctcagcaagaagactccgggcagcatgctgcccccctacctgccccacccattctgtctggcgatacacctattgcccctacacctgagcaaatcgggaaacttcgctccgagctcgagatggtctctgggaacgtgagggtgatgtccgagatgctcaccgagctggtgcccacccaggctgagccagccgacttggagctactgcaagagcttaatcggacgtgtcgcgccatgcagcagcgtgttcttgaactgattccacaaatagctaacgagcagttaaccgaagagctccttattgtgaatgataacttaaacaatgtatttctcaggcacgagcggttcgagaggtttcgcactggccagacgaccaaagcgcccagcgaagccgaacccgccgcagacctgattgatatgggccctgacccagccgctaccggcaatctgagctcccagctcgctggcatgaacttaggcagctccagcgtgcgagccggcctgcaatcgctcgaggcctcaggccgcctggaggacgaattcgatatgttcgcgctgacccgtggatcgtctttggccgatcagagaaaggaggtgaagtatgaggcccctcaggctacggacggcttggctggtgctctggacgccagacagcagtccaccggcgccattcccgtcactcaagcctgccttatggaggacatagagcagtggctgagtacagatgtgggcaatgatgccgaagagccaaagggcgttacgagcgaggaattcgacaagttcctggaggagagggcaaaggcagctgaccgattgccaaacctcagctctccatcagccgaagggccccccggacccccatcagggcctgcacccagaaaaaagacacaagagaaggacgacgatatgctctttgccttatag

SEQ ID NO: 25575 - DNA, 2103 bp, synthetic construct
  source 1..2103: mol_type = other DNA; note = Synthetic coding sequence
atggccaccatgatcccccccgtgaagctgaagtggctggagcacctgaacagtagctggatcaccgaggattcggagtctatcgctacaagagaaggggtcgcagtgctctactctaagttagtatcaaacaaagaggttgtgcccctgccccagcaggtgctgtgcctgaagggacctcagttgcccgactttgaaagagaaagcctgtcaagtgacgagcaggaccactatctcgacgcactgttgtctagccagttggccttggccaaaatggtctgctccgatagtccttttgcaggagcgctgaggaaacgactgctcgtgttgcagcgcgtgttctacgccctgagcaacaagtatcacgataagggtaaggtgaaacagcagcagcattcacccgagtcctcctccggttccgcagatgtgcacagcgtgtcggagcggccacggtcatctaccgatgcgctgatagaaatgggcgtgaggaccggtctgtctttactttttgcccttttacggcagtcttggatgatgcctgtatcaggtcccgggttgtcactctgcaatgatgtaattcatactgcgattgaagtggtcagcagtcttccgcctctgtccctagccaacgagtccaaaatcccgccgatggggctggactgccttagtcaagtaaccacttttctgaagggtgtcaccatcccaaacagtggcgcagataccctggggcgcagactggcaagcgagttgctacttgggctggccgcacagcggggatctctccgctacttgctcgagtggatcgaaatggcgctcggggcctctgctgtggtccacaccatggagaaaggcaaattactttcatctcaggaaggcatgattagtttcgactgcttcatgactatcctcatgcaaatgcggagaagtctcattagcgagaaccaggactccgcggatgttgacccccaggaacactcattcacaaggactattgatgaagaagccgagatggaggagcaggcggagagagaccgcgaagaaggccacccagaaccagaggacgaggaagaagaacgggaacatgaagttatgaccgctgggaagattttccagtgtttcctctccgccagagaagtcgcaaggagccgagatagagaccgcatgaactccggagctggcagcggagccagagcggacgatccacccccccagagccagcaagagcgaagggtgtctacagatcttccagagggccaggatgtgtataccgccgcctgtaatagtgtgatacatcgatgcgctctcttaatactcggagtgtcgccagttatcgacgagctgcaaaaacgtcgcgaagaggggcagctccagcagccgtctacgtccgcttcagagggcggaggcctgatgacccggtccgaaagcctgacagcagagagtcggttggtacatactagtcctaattacagactgatcaaatcaaggtccgaatctgacttgagtcagcccgaatccgatgaagaggggtatgccctgagcggaaggcggaatgtggatctcgacctggccgcctcacacaggaagcggggccccatgcacagtcaactagaaagtttatcagacagttgggcgcgccttaagcatagcagggactggctttgtaattcatcatatagcttcgagtccgacttcgatctaacgaagtctttaggcgtccatactcttattgaaaacgtcgtctctttcgtgtctggtgatgtgggtaacgcacctggctttaaggaaccagaggagtcaatgagtacatccccccaggccagcatcatcgctatggaacagcagcagctccgggccgagctcaggctcgaggccctgcaccagatcctggtgctgttaagcgggatggaagaaaaagggtcaatcagtctggccggatccagattatcctcaggcttccagtcctctacacttctgaccagtgtcagactgcagttccttgctgggtgcttcggcctgggcacagttggtcatacaggggggaaaggagagtccgggcggctacaccattatcaagacggcattcgcgccgctagggggtactag

SEQ ID NO: 25576 - DNA, 537 bp, synthetic construct
  source 1..537: mol_type = other DNA; note = Synthetic coding sequence
atggccgaccgggccgccgccgagcgggcctgcaaggaccccaacccaatcatcgatggacgcaaagccaatgtcaatctggcatacttaggagcgaagccgagaatcatgcagccagggttcgcctttggggttcagcagctccaccctgccctgatccaacgcccattcggtatcccggctcactatgtctaccctcaggcttttgttcagcccggtgttgtgattcctcacgtgcagccaaccgctgccgccgccagcacaaccccctacatagattatacaggtgccgcctatgctcagtattcagctgctgcagccgctgcagctgctgccgccgcctacgaccagtatccatatgcagcatcgccggcagctgccgggtacgtaaccgcagggggctacgggtatgccgtccagcagccaattacagccgccgcaccggggacggccgctgccgcagctgctgccgcagcagccgccgccgcattcgggcaatatcagcctcagcaactgcagactgaccgcatgcagtag

SEQ ID NO: 25577 - DNA, 579 bp, synthetic construct
  source 1..579: mol_type = other DNA; note = Synthetic coding sequence
atgggcaagggctgcaaggtggtggtgtgcggcctgctgagcgtgggcaagacagccattttagagcagctgctttatggtaatcatacgatcggcatggaagattgtgagacaatggaagacgtgtatatggccagtgtcgagacagatcgcggcgttaaggagcagctccatttgtatgatacaagagggctgcaggagggcgtggagctacctaaacattattttagcttcgcagatggattcgttctcgtgtactctgtgaataatctggagagctttcagcgggtcgagctgctaaagaaagagatcgataagtttaaagacaagaaagaagtagccattgtggtgctgggtaataagattgatcttagcgaacaaagacaggttgatgcagaggtagctcaacagtgggccaaatcggaaaaggtaagactttgggaggtgacagttacagacaggaagacactgattgaaccctttacactcctagcctctaaactgtctcaaccacagtcaaaatctagttttccactgcctgggagaaagaacaagggaaattccaactctgagaactag

SEQ ID NO: 25578 - DNA, 555 bp, synthetic construct
  source 1..555: mol_type = other DNA; note = Synthetic coding sequence
atgaaccggagccagcccggcctgctgcggaccgaccccgtgcccgaggagggcgaggatgtagccgcaacaattagtgccaccgaaacgctgtctgaggaggaacaggaagagctgcgtagggaactggccaaagtggaagaggaaatccagactcttagccaggtgctagcagccaaggaaaagcatctggccgaaattaagcgtaagctggggataaactccctgcaggagctgaagcagaacatcgctaagggatggcaggacgtcacagcaacaagcgcctataaaaagacatcagagacattatctcaggctggccagaaagcatcagccgcttttagctctgtggggtccgtgatcactaagaagctggaagatgtgaagaacagccccacttttaaaagttttgaagaaaaggttgagaacctcaagtctaaagtgggtggcactaaaccagccgggggagatttcggcgaagtattgaattccgccgcaaatgccagcgctactacaacagaacccctgcctgagaagacacaagagtcactatag

SEQ ID NO: 25579 - DNA, 1620 bp, synthetic construct
  source 1..1620: mol_type = other DNA; note = Synthetic coding sequence
atggccaccagcgcccccctgcggagcctggaggaggaggtgacctgttctatctgcctagactacttgagggaccctgttactatcgattgcgggcatgtgttttgccggagttgcaccacagacgtgcggcctataagcgggtctcgaccagtttgccccctgtgcaagaaaccatttaagaaggagaacatacgccccgtgtggcagctggcctctctcgtagagaacatcgaacgtttaaaagtggacaaaggccggcagcccggcgaggttacgcgtgaacaacaggatgccaagctgtgcgagagacatagggaaaaattgcactactactgtgaggacgatgggaaacttctgtgtgtgatgtgccgggagtcccgcgagcatcgcccgcataccgcagtcctcatggagaaagcagcccagcctcaccgcgagaaaatcctaaaccacctgtctacactccggcgtgatcgggacaagatacagggtttccaggcaaaaggggaggctgacattctggccgccttaaagaagttgcaagaccagaggcaatacatcgtggccgagtttgaacaggggcatcagtttctgagagaacgtgaagaacatctgctcgagcaactagctaagttggaacaggaattgactgagggcagggagaaatttaaatccagaggcgtgggagagctggcgagacttgctctggtgatcagcgaactagaaggaaaagcacagcagccagctgccgagcttatgcaggatacccgagactttcttaaccgatatcctcggaagaaattctgggtgggcaaacctattgccagagtggtcaagaagaaaacaggggagtttagtgacaagcttctcagcctgcagcgcgggctgagggaatttcagggaaagctgctacgagatttagaatataagaccgtcagcgttacactggacccacaatctgcctccggctatctgcagctcagtgaggactggaaatgtgtaacgtacaccagtctgtataagtctgcatatctgcacccccaacagtttgactgcgagcccggtgtccttgggtcgaaggggtttacctggggtaaagtttattgggaggtcgaggtcgaaagggagggatggagcgaagatgaagaagagggtgacgaagaggaggagggtgaggaagaggaagaggaagaggaagcgggctacggcgatggttacgatgactgggagacggatgaagacgaagaatctttgggagacgaagaggaagaagaagaggaggaggaggaggaagtgctggagtcctgtatggtcggcgtcgcacgagacagcgttaagagaaagggcgacctgagtctgagacccgaggacggcgtgtgggccctgcgccttagctctagcgggatctgggctaatacctcgcccgaggcggagctgttccctgctttgcgaccacgccgagtggggatcgccttggactacgagggaggcaccgtgacctttacgaacgcggagtcccaggagctgatctatacgtttactgctacctttacacggcgactggtgccgttcctctggctcaagtggccaggcactcggctgcttcttagaccttag

SEQ ID NO: 25580 - DNA, 612 bp, synthetic construct
  source 1..612: mol_type = other DNA; note = Synthetic coding sequence
atggagccccccatggagcccagcggcggcgagcaggagcccggcgctgtgcgatttcttgatttgccttgggaggacgtactgttgcctcacgtattgaacagagtgcctttacggcaattgctgagactgcagcgagttagccgtgcctttagatcactagtgcagctgcaccttgctggcttacgccgcttcgatgcagcacaggtgggcccccagattccaagggccgcacttgcccggctgctgagagatgctgaggggcttcaggagctcgccttggctccctgtcatgaatggctatcagatgaggacttggtgccagtgttagccaggaatcctcaattaaggtcagttgctctcggtgggtgcggacagttgagcagaagggcattgggggccctcgctgaggggtgtcctagactccagagactgagtctcgcacactgtgattgggtcgacggcttggccttaagaggtctggctgacaggtgtccggctctggaggagctcgacctgactgcatgtaggcagctgaaagatgaagcgattgtgtaccttgcccaacggcgcggcgctggactcagaagtttaagcctggctgttaactag

SEQ ID NO: 25581 - DNA, 1824 bp, synthetic construct
  source 1..1824: mol_type = other DNA; note = Synthetic coding sequence
atggcccggggcctgggcaaggccagcggcttccccgccggcccctccggcgccgaactccctgccagtggacgcagaagaggtccacttatctccctctttccagccgtcctggcctccgaggccgccatgtcttaccctgccgacgattatgagtcagaagccgcatacgacccctatgcttaccctagcgactatgacatgcatactggcgaccccaaacaggacctcgcttacgagaggcaatacgaacagcaaacttaccaggtgatcccagaagtcattaaaaattttatccagtacttccataaaacggtttctgatctaattgatcagaaggtgtacgagctgcaggcaagcagagttagttcagacgttatcgaccagaaggtgtacgaaatccaggatatctacgagaatagttggacaaagctgaccgaaaggttctttaagaacaccccgtggcccgaggccgaagccatagccccacaggtgggtaatgacgcagtttttctgatcttatataaggaactctattacagacacatctatgccaaagtgtcagggggccccagtttggaacaacgcttcgaaagctattacaattactgtaacctgtttaactacatactaaatgccgacggacctgcacccctggagctgccaaaccagtggctgtgggacatcatcgatgagttcatctatcagtttcagtcgttctcccaatatagatgcaaaacggccaaaaagagcgaagaggagatcgactttctcagatctaaccccaaaatctggaacgtgcactcagtactcaatgtgttacacagtctggtcgataagtctaacattaaccgacaactggaagtgtatacaagcggcggcgatccggagagcgtggctggggagtatggacgacacagcctgtacaaaatgctgggatacttctctctggtcgggttgctccgactgcacagcttactaggtgattattaccaggccataaaagtgctggagaacatagagctaaacaagaaatctatgtattcccgcgtgccagaatgccaggtaacaacttattattatgtcggctttgcgtatctgatgatgcgtagatatcaggacgccattagagtttttgcgaatatcctgttatatatccaaagaaccaagtctatgttccagagaacaacatacaagtacgaaatgattaacaaacagaacgagcaaatgcacgctctgctcgcaatcgctttgacgatgtaccctatgcggattgatgaaagcattcacctccagctgcgggagaaatatggggataaaatgctacgcatgcagaaaggcgatcctcaagtgtatgaagagctctttagctatagttgtcccaaatttctctcacccgttgttcccaactacgacaacgtccaccccaattatcataaagaaccattcctgcagcagctgaaggtattttctgacgaggtccagcaacaggcgcagttgagcacaattcggagctttctgaaactttacacaactatgcctgtggccaaacttgccgggttcctggatctgacggaacaggaattcagaattcagctcctggtgtttaaacacaagatgaaaaatctggtctggacctcaggcatctccgcgttggatggcgaatttcagtccgcaagcgaggtggacttttatatcgacaaagatatgatccatattgccgatactaaggtggcacgccgctatggggacttttttatccgccagattcacaagtttgaagaacttaatcggactctgaaaaagatgggccagcggccttag

SEQ ID NO: 25582 - DNA, 1308 bp, synthetic construct
  source 1..1308: mol_type = other DNA; note = Synthetic coding sequence
atggccgccagcagcctggagcagaagctgagccggctggaggccaaactcaaacaggagaatagggaggctaggcgtaggatcgacttaaatctggatatttccccccagcgccctagacctattatcgtaatcacactgagccccgcccctgccccctcccagagggctgctctgcagctgcccctcgctaacgacgggggaagtcgaagcccctctagcgagagcagtccacagcatcctactcccccagcccggcctaggcacatgttagggcttccatcaactctgttcactcccagatcaatggaatccattgagatcgatcagaagcttcaagagataatgaagcagaccggctacctgaccattggaggacagaggtaccaggcagaaattaacgatctggagaacctgggcgaaatgggctccggtacctgcggacaggtgtggaaaatgagatttcgaaaaaccggtcacgtcattgccgtgaaacagatgcggcgctccggtaacaaggaagaaaataaacgaatcctgatggacctggatgttgtccttaaaagtcatgactgtccatacatcgtgcagtgtttcggaacctttataactaataccgatgtgtttattgccatggagcttatggggacgtgtgctgagaagctgaaaaagcgtatgcaagggcccattccagagcgtatattagggaagatgacagtggccatcgtcaaggctctctattacttgaaggaaaagcacggggtcattcatagggacgtcaagcccagcaatatcttgctcgatgaacgtggacagatcaaactttgcgattttggaatcagtggccggttggtagattccaaggccaaaactcgcagcgcaggttgcgccgcttacatggcgccggaaagaattgaccccccagatcccactaagccggactacgatatccgggccgacgtctggagcctcggtattagcctcgttgagctggccaccgggcagttcccctataaaaattgtaagaccgacttcgaagtgctcacaaaggttctgcaggaagagcctcccctgctgcccggccacatgggctttagtggcgattttcagagcttcgtcaaggattgcctcacgaaagaccaccgtaagagacccaagtataataagctcctcgaacactcatttattaaacggtatgaaactctggaggtcgatgtcgcatcctggttcaaggacgttatggctaagacagagtccccccgaacatccggcgtcctatcccaaccacatctgcctttctttagatag

SEQ ID NO: 25583 - DNA, 3006 bp, synthetic construct
  source 1..3006: mol_type = other DNA; note = Synthetic coding sequence
atggccagcagccccctgcccggccccaacgacatcctgctggccagtccctctagcgccttccagcccgacacgctgtctcagccccgtcccggtcacgctaacctgaaacccaatcaggtggggcaagttattctttacgggattcctattgtgtctctggtaattgatgggcaggaaagactgtgcctggcccagatttctaatacgctattgaagaacttcagctacaatgagatccacaatagacgagttgcactaggcattacatgtgtgcaatgcaccccggtgcagctggaaattctgcgacgagccggggccatgcctattagctcccgtcgctgtggcatgatcacaaaaagggaagcagaacgactgtgcaaatcttttttaggcgaaaatcgccctccaaaactgcccgataacttcgcattcgatgtctctcatgaatgtgcgtggggttgtcgggggtcttttatccccgcccggtataatagctctcgcgccaagtgtataaagtgcagctactgcaacatgtatttctctccaaataagttcatctttcacagccacaggactcctgatgcgaagtacactcagccagacgctgccaactttaactcttggcggaggcatctgaaactgaccgataagtccccacaggatgaacttgtctttgcttgggaggacgttaaggctatgttcaacggaggatccagaaagcgcgcccttcctcagcccggcgcccatcccgcttgtcatcccttgagtagcgttaaagctgccgcggtggctgctgcggcagccgttgccgggggagggggcctcttagggccacatctgcttggcgcccctcctccaccccctccgccacctcctcccctcgccgagctggctggtgcacctcacgcccatcataagcggccacgctttgacgacgacgatgattcactccaggaggcagccgtcgtagctgcagccagtttgtcagctgctgccgctagtctcagtgttgcagccgcgtctggcggtgcaggtaccggcgggggcggggccggtggtgggtgtgtggccggagtcggcgttggagcaggcgctggagccggcgccggggcaggagcgaaggggcctaggagctatccagtgattcccgtgccaagcaaagggagcttcgggggcgtcctacagaaattccctggctgcggaggtctattccctcatccatatacattccccgccgcagcagcagcctttagtctgtgtcataagaaggaagatgcaggggccgcagcggaggctttgggaggcgctggtgccgggggtgcaggagctgcgcctaaagctggactgtccggcctgttctggccggccggccgcaaggacgctttctaccctccgttttgtatgttttggccccctcgcactccaggcggcctaccggtcccaacctatctccaaccaccaccacaaccaccatctgcactgggatgcgcacttggggaatcccccgcccttctacgacaagccttcttggacctggctgaaccaggaggcgccgccggcagtgctgaagcagccccacctcctggacagcctccacaagtggtggctaatggtcctggctccggaccaccccctccggcaggtggggctggttctagagatgctttgttcgagtctcctccaggcgggtccgggggagattgcagcgccgggtccacgcctcctgctgattctgtggcggccgctggcgctggcgcagccgctgcgggtagtggcccggcggggtcacgcgtgcctgcaccccatcacccacaccttttagaagggcgtaaggccggcggcggaagctatcatcattctagcgcatttaggcccgtgggcgggaaagatgacgcagaaagtcttgccaaactccatggcgcgtcagctggagcaccccactcagctcagactcacccccaccatcatcaccatcctcaccaccatcatcaccaccatcacccaccacagcctccctctcccttgcttctgctgccacctcagcccgacgagcctggctcagagaggcatcaccctgctcctccacctccacccccaccaccaccgccccccccactggcccagcacccccaccacagggggctgctgagcccaggcgggacctcatgctgttaccctagcgaggattcctctgaagacgaagatgatgaagaggaggagcaggaggtcgatgtggaaggacacaagccccctgaaggagaggaggaggaggaagggagggaccccgacgatgacgaggaggaagacgaggagaccgaagtcctgcttggcgacccactggtaggaggaggaagatttctgcagggccgtggaccctctgaaaaagggtcttctcgggacagggctcctgccgttgccggtgcctttcccctcggcctgaatagtagccgcctgctgcaggaagacggcaagcttggggatcctgggtctgaccttccgcccccacctccacctcctttggcgccgcagaaagcaagcggtggaggctcgtcttccccgggaagccccgtgcatcatccttcgctagaagagcagccctcctacaaggacagccagaaaacaaaagagaataaccaggttatcgtgtctacaaaggacgataactcattctcagacaaaaacaaagagcattcattcttcattactgattctgacgcaagcggtggagacttttggcgcgaacggtctggcgaacacacacaggagactaacagtcctcactcacttaagaaggatgtggaaaatatgggcaaggaggaactccagaaggttctgtttgagcagattgatctgcgaagaaggttggaacaggaattccaggtgctgaagggaaacacatccttccccgtgtttaataacttccaggaccagatgaaacgtgagctcgcgtatcgcgaagagatggtgcagcagctgcaaatcgtgagttgcatcagtacttag

SEQ ID NO: 25584 - DNA, 198 bp, synthetic construct
  source 1..198: mol_type = other DNA; note = Synthetic coding sequence
atggccatggcccccagccccagcctggtgcaggtgtacaccagcccagctgcagtggccgtgtgggaatggcaggacggcttgggcacctggcacccctactctgctacggtctgcagcttcatagagcagcagttcgttcagcaaaagggccagagattcgggttgggatcccttgcacactcgattccactgtag

SEQ ID NO: 25585 - DNA, 1041 bp, synthetic construct
  source 1..1041: mol_type = other DNA; note = Synthetic coding sequence
atgatcagccggcccgcctggctgtggggcgccgagatgggcgccaacgaacatggcgtgtgcatagccaacgaagcaatcaataccagggagcctgccgccgaaatcgaagcccttctgggcatggatctagtccgcttgggactagaacgtggagagacagcaaaagaagcccttgacgtcatcgtctccttactggaagagcacgggcagggtggcaattatttcgaagatgccaactcttgtcacagtttccagtctgcatatttaatcgtggatcgtgatgaagcgtgggttctggaaacaatcggcaagtactgggccgcagagaaagtaacagagggtgtgcgatgtatctgctcccagctgtctctcacaactaaaatggatgccgagcaccctgagctgcggtcttacgcccagtcgcaggggtggtggaccggcgaaggagaatttaacttctccgaagtatttagccctgtcgaggaccatctggattgtggtgccggcaaagattccctggaaaagcaggaagaaagcatcactgtgcagactatgatgaacacgcttcgggacaaagcttctggggtgtgcattgactcagagttttttcttactaccgctagtggcgtgagtgtgctgcctcagaacaggtcttcgccctgcatccattacttcacgggcacccctgacccttcaagatcgatctttaagccctttatctttgttgacgatgtgaaactggtacctaaaactcagtctccatgcttcggagatgacgatccggccaagaaggagccacggtttcaagaaaagcccgaccgaaggcatgaattatacaaagcccatgaatgggcacgggctatcattgaatccgaccaggaacagggacgtaaactgcggtcaaccatgcttgagctcgagaagcaagggctggaggccatggaagagatcctaactagttccgaaccactcgatcctgcagaggttggggacctcttttacgattgcgtagatactgagattaaattctttaagtag

SEQ ID NO: 25586 - DNA, 1620 bp, synthetic construct
  source 1..1620: mol_type = other DNA; note = Synthetic coding sequence
atggccaccagcgcccccctgcggagcctggaggaggaggtgacctgctccatctgcttggactacctgcgggatccagtgactatcgattgtggtcacgtcttctgtcgcagttgtacaaccgacgttagacccatctccggctctcgcccggtttgtcccctctgcaagaaaccttttaaaaaggagaatatcaggcccgtctggcagttagcctccctagtcgaaaatatcgaaagactgaaggtcgataaaggtaggcaacctggagaagtaacacgcgaacaacaggatgctaagctttgtgagagacatagagagaaactgcactactactgcgaggacgatgggaaattactttgtgtcatgtgcagggagtccagagagcaccgtccacatactgccgtcctaatggaaaaggccgcacaaccccaccgggagaagatcctgaaccacttgtctactttgcgaagagaccgtgacaagatacagggttttcaagccaaaggtgaagcggatatcctcgcagccctaaaaaagcttcaggaccagcggcaatacatcgttgcagaatttgagcagggacatcaatttctccgcgagcgagaggagcacctcctggaacagttagcaaagcttgagcaagagttgaccgagggccgcgagaagtttaagtcaagaggggttggcgaactcgccagattggcattggtgatctcggagctcgaaggaaaggcacagcagcctgcagccgaactcatgcaggacacccgtgatttcctcaataggtatccaagaaaaaaattctgggtggggaagccaatcgccagagtagtgaagaaaaagaccggcgaattttcggataagttgctttcactccaaagaggactgagagaattccagggcaagctgctgcgggacctggagtataagaccgtgtcagtgacgctggaccctcagtcggctagtggctatctgcagctgagcgaagactggaagtgtgttacttacaccagcctctacaagtccgcctatctacatccacagcaatttgattgcgaacccggcgttctcggctccaagggatttacatggggcaaggtgtactgggaggtggaagtcgaacgagagggctggagtgaggacgaggaggaaggagacgaggaagaagaaggggaagaggaggaggaggaggaggaggcaggatatggtgatgggtacgacgattgggagactgacgaagatgaagagtctctgggagacgaggaagaagaggaagaggaagaagaggaagaggtgcttgaatcctgcatggttggtgttgctagagatagcgtgaagaggaagggagatctgagcctcagacccgaagacggcgtctgggccctgaggttgtcatcaagtggaatctgggcgaataccagccccgaagctgagttgttccctgccttgcggccaagaagggtgggcattgctttagactatgagggtggaaccgtgacgttcactaacgctgaatcacaggaactaatctacacctttacggccaccttcacacggcgcctggtgccttttctctggctcaagtggccgggcacacggttgctgctgcgcccgtag

SEQ ID NO: 25587 - DNA, 390 bp, synthetic construct
  source 1..390: mol_type = other DNA; note = Synthetic coding sequence
atggccgagctgatccagaagaagctgcagggcgaggtggagaagtatcagcagttacagaaggacttgagtaagtctatgagcggcaggcaaaaactggaggcccagctgactgagaataacatcgtcaaagaagaactggcgctcctcgatggtagcaacgtcgtgttcaaactgctcggccctgtgctcgtaaaacaggagctcggggaggcccgagcaactgttggcaaaagactcgattacattacggctgaaattaagaggtacgaatcacagctccgcgacttggagcgccaatcggagcagcagagagagacattggcacaactgcagcaggaatttcagcgagcccaggccgctaaggccggcgctccagggaaagcttag

SEQ ID NO: 25588 - DNA, 1740 bp, synthetic construct
  source 1..1740: mol_type = other DNA; note = Synthetic coding sequence
atgagcgccgccaaccccgagacccccaacagcaccatcagccgggaagcttcaacgcaatccagctcagctgcagctagtcaagggtgggtcctgccagaaggcaaaattgtgccaaacactgtatttgtgggaggaattgatgctcgcatggatgaaacagagatcggttcgtgtttcggacgctatggcagtgtaaaagaggtgaagatcatcacaaatagaaccggcgtaagcaaaggttacgggtttgtgtctttcgtgaatgacgttgatgttcaaaagatagtcggcagccagattcattttcacggcaagaagttgaaactcggcccggctattcgcaagcagaagctgtgtgcgcgccacgtgcagccccgtcctctggttgtgaatcccccccctcccccccaatttcagaacgtctggaggaaccctaacacagagacataccttcaaccacagatcacccccaatcccgtgacacaacatgtacaaagtgccgccaatcccgaaacaccgaactctaccattagtagagaagcgtcgactcagagttcatccgccgcggcatcccaaggttgggtcttgcccgagggtaaaatcgttcccaatacagtgtttgtagggggaatcgacgcaagaatggatgaaacagagatcggatcttgtttcggccgttacgggtctgtcaaagaagtaaagatcattacgaataggacaggggtaagcaaggggtacggatttgtgtcttttgtgaatgatgttgatgtgcagaaaatcgttggctcgcagattcatttccacggcaaaaagctaaagttgggccccgcaatccgaaagcagaagttgtgtgcccggcatgtgcaacctagacccctcgtagtaaatcctcccccacctccacagtttcagaatgtgtggaggaatcccaacacagagacttacctgcaaccgcagattacgccgaatcccgtgacacaacacgtgcaggcatattctgcatacccccactctccaggccaggtcattaccgggtgccagcttcttgtgtacaattaccaggaatacccaacttacccagattcagcattccaggttacgaccggatatcagctgcccgtgtataattaccagcctttccccgcttaccctaggtccccctttcaagtgaccgccggatatcaattacccgtatacaattaccaggctttccccgcatatcctaactctccattccaggttgccaccgggtatcaattcccagtgtataactaccagcctttccccgcctacccttctagtccatttcaggtgacagctggctaccagcttccagtctataattatcaagctttccccgcgtatcccaactctcctttccaagttgccactggctaccagtttccagtgtataactatcaggcattccccgcttacccaaactctcctgtgcaggtaactacaggataccagctgccggtgtataactaccaggcctttcctgcttatccctccagcccctttcaggttaccacagggtatcaattgcccgtgtacaattaccaggccttcccagcttaccccaacagtgccgtgcaggtgacaacaggatatcagttccacgtgtacaactatcagatgccacctcagtgtcccgtgggggagcaacggagaaatctgtggactgaagcctataaatggtggtacctcgtgtgtcttatacagcgccgcgactag

SEQ ID NO: 25589 - DNA, 831 bp, synthetic construct
  source 1..831: mol_type = other DNA; note = Synthetic coding sequence
atgtacgccagctggaccaaggcctgccggggcctggaggagctgattaacctgacacgcttgaatgtcagctacaaccacattgatgacctcagcgggttaatcccattgcatggcattaaacacaagctgcggtacatagatctgcactccaataggattgatagcatccaccatttgcttcagtgcatggttggacttcacttcctcacgaacctgatcctcgaaaaggacggagatgacaatcctgtatgccgtctgccgggatatcgagctgtaattttacaaactttaccccaacttcggatccttgactgcaaaaacatctttggtgaacccgtgaacctcaccgagataaacagttcacaactccagtgtttagaaggcctactagataatctagtgtctagtgattccccgttaaatattagtgaagacgagatcattgaccgtatgccagtgatcactgcgcctatcgacgagcttgttccactcgagcagttcgcctcaacaccaagtgatgcggtcttgacaagcttcatgagtgtatgccagtcttctgagccagaaaaaaacaaccacgagaatgaccttcagaacgagatcaaactacagaagctggatgaccagatcctccagctcctgaatgagaccagcaacagcatagataacgtgctagaaaaggaccctcgacccaaaagagatacagacatcacttctgagtcagactatggtaactctcgcaaaaatggcgaaacgaaaaaggcagccgcggggtctacagataagaccgatccacgtggtggcactcagtctttctcttgcaggtag

SEQ ID NO: 25590 - DNA, 1995 bp, synthetic construct
  source 1..1995: mol_type = other DNA; note = Synthetic coding sequence
atgggcgacgacggcagcccccccgccaagaagatgatcaccgacatacatgccaatggcaaaaccataaacaaggtcccaactgtgaaaaaagaacacctggacgactacggcgaggcccctgtcgagacagatggtgagcacgttaagaggacttgtacttccgtaccggaaacactacatcttaatccatcactgaaacatacactggctcaatttcatcttagttcacaatcaagtctgggcggtccggcggcctttagtgccaggcacagccaggagtccatgagcccaaccgtcttccttccccttccatcccctcaggtgctgcctggccccctactcatcccctctgattctagtaccgaactaacacagactgtgttagaaggggaaagcatttcatgcttccaggtggggggcgagaaaaggctgtgtctgccccaagtcctgaatagcgtgctgcgagagtttactctacagcagatcaacactgtttgcgacgagttgtacatatattgctcaagatgtactagcgaccagctgcatattctgaaggtgctgggaatcttaccatttaatgctccatcttgtgggttgattaccctcacagatgctcagcgactatgcaatgctctgcttagaccacgcacattcccacaaaacggaagcgtgctgcctgccaagtcctctttggcacagttgaaagagaccggctcagcatttgaggtggaacacgaatgtctcggtaagtgtcaaggtttatttgccccccaattttacgttcagccagatgccccctgtatccagtgcttggaatgctgtggcatgttcgcaccccaaaccttcgtgatgcatagccaccgttcacccgacaagaggacttgccattggggatttgagtccgctaagtggcattgctatcttcatgttaatcaaaagtacctaggaaccccagaggagaaaaagctcaagatcatactggaagaaatgaaggaaaaattctctatgagatcgggtaaacgtaaccagagcaagacagatgcgccttccggaatggagttgcagagctggtaccctgtcataaaacaggaaggcgaccatgtgtcccagacacactcattcctccatcccagctattatctgtatatgtgtgacaaggtggtggcgcccaacgttagtttgacatccgctgtgagccagtcaaaagagcttacgaagacggaggccagcaagtccatctcgcgccaatcggagaaggctcactcctctggcaaacttcagaaaacagtgtcctacccagatgtcagcttggaagagcaggaaaagatggatttgaagacatcaagggagctttgcagcagactagatgctagcatttctaataacagcactagtaagcgcaaaagcgagagtgcaacatgtaatttggtccgagacatcaacaaagtcggaattgggctggtggccgcagcctcttctccactcttggttaaagacgttatatgcgaagatgataaaggtaaaattatggaagaggtgatgaggacatatctcaaacagcaggagaaactcaatctcatcctacagaaaaagcaacaattgcagatggaagttaagatgctgtcttcttcaaaatcaatgaaggagcttacagaggagcaacagaacctacagaaggagctcgagagtctccagaatgaacacgcccagaggatggaggaattctatgtagagcagaaggatcttgagaaaaagctcgagcagatcatgaagcagaagtgcacctgtgattcaaacctggagaaagacaaagaagcagagtatgccggccaactggcagaactcagacaacggttagatcacgccgaagctgaccgtcaggaactgcaagatgagctgaggcaggagagggaagcccgacaaaaactggaaatgatgatcaaggagctaaagctccagatcctcaagtctagtaagactgcgaaagaatag

SEQ ID NO: 25591 - DNA, 1068 bp, synthetic construct
  source 1..1068: mol_type = other DNA; note = Synthetic coding sequence
atgggccggcgggacctggtgagcggcggcagcaacgagggcaacggtaaggaagactgggccatgaaaaccgtcagtctcaggtggactaagctgccccccgtgaagagcgctatcagaggacaagccccagtcgtgccttacatgaggtacgggcactccacagtccttatcgatgatacagtcctactgtggggcggcagaaacgatacggagggtgcctgtaacgttctttacgccttcgatgtgaacacccacaagtggttcacccccagggtgagcgggactgtgcccggcgcaagagatgggcactctgcctgtgtactcggaaagattatgtacatcttcggtggctacgaacagcaagccgactgtttttctaatgacattcacaagcttgacacttctactatgacatggactttgatctgtaccaagggctctcccgctcgctggagggatttccatagcgccaccatgctgggatcccacatgtatgtctttgggggccgcgccgacagatttggacctttccactctaataatgaaatctactgtaatcggattagagtgttcgacacacgcaccgaggcgtggcttgactgcccaccaacccctgtgctccccgaaggacggagatcccactctgcctttggctataatggcgagctctatattttcggtggctacaacgcccgcctgaatagacatttccacgacctttggaaatttaatcctgtgagttttacatggaaaaagatcgagccaaaaggcaaaggcccatgtccgagacggagacagtgttgctgtatcgttggcgataaaatagtcttgtttggcggtacctctccgagccccgaagaggggcttggcgatgaatttgatctcatcgatcatagcgacttgcatatactggacttttctccatccctgaaaaccctctgtaaactagccgtaatccagtataatctggatcagtcttgtctgcctcatgacattcgatgggagctcaacgcaatgacaacgaactctaatataagccggcctatagtgagctctcacggttag

SEQ ID NO: 25592 - DNA, 1245 bp, synthetic construct
  source 1..1245: mol_type = other DNA; note = Synthetic coding sequence
atggccgccgccccccccagctactgcttcgtggccttcccccccagagccaaggacgggctggtggtcttcgggaagaattccgcccggccccgcgacgaggtccaggaagtagtttacttttcagccgctgatcatgagcccgagtcgaaagtcgaatgtacctatatcagtatcgatcaagtgccccggacctacgccatcatgatatcacggcccgcctggctgtggggtgctgaaatgggagcaaatgagcacggggtgtgcatcgcaaatgaggctattaacactagagagccggctgcagagattgaggctctgctcggcatggacctggtgaggctcgggcttgagcggggtgagactgccaaagaggctcttgacgttattgtgtcacttttagaagagcacggtcaggggggcaactattttgaggacgctaattcctgccatagtttccagtcagcatacctgatcgtggaccgggatgaagcttgggttctggagaccataggtaagtactgggcggcagagaaggttactgagggagtcaggtgcatatgcagtcagttgagcctgactaccaaaatggacgccgaacaccctgagcttagatcctacgcccaaagtcagggatggtggacgggtgagggagagttcaacttctcagaggtgttctcccctgtcgaggaccacctcgactgtggagctggtaaagatagcctcgaaaagcaagaagaatccatcactgtacaaacaatgatgaacacccttcgggataaagctagcggggtatgcatagactccgaattctttctaacaactgcttcaggcgtgagtgttctgccccagaataggagtagtccttgcatccactatttcacaggaactcccgatcctagtcgatctatcttcaagcctttcattttcgtggacgatgttaaactcgtccccaaaacgcaaagcccctgctttggagacgacgaccctgctaagaaggagcctaggttccaggagaagccagatagacgacatgaactttataaggctcatgaatgggcgcgggccatcattgaatccgaccaggagcaaggacgtaaactgagatctactatgcttgaactagagaaacaaggcctcgaggccatggaggaaattctgacttcaagtgaacctctcgatcccgcggaggttggggacctgttctacgactgtgtcgacacagaaattaaattcttcaaatag

SEQ ID NO: 25593 - DNA, 1200 bp, synthetic construct
  source 1..1200: mol_type = other DNA; note = Synthetic coding sequence
atggccaccggcgacctgaagcggagcctgcggaacctggagcaggttttgcggttacttaattatccagaggaggtcgattgcgtaggtttgatcaaaggcgatcctgccgcctccctgccgatcattagctattcttttacttcatactctccatatgtgaccgagctgattatggagtccaatgtggaacttatcgcgaagaacgacctgcgctttatcgacgccgtgtacaagctgctgcgtgatcagtttaattacaagccaatcttaacgaagaagcaatttattcagtgcggatttgctgagtggaagattcagattgtatgtgatatactcaactgcgtgatgaaaaagcacaaggagttaagttccctacagaagattccttcccagcaaagaaaaaaaatatcctccggaaagtcagagcccccactgggcaacgagaaaatctcggcagaggcagtgggtgttgacattagcggcaggttcatgacctccggtaagaaaaaggcagtggtgataaggcacctctacaatgaagacaatgtggacatctccgaagacacgctgagtcctattacagacgtgaacgaagctgtggacgttagcgatcttaatgccacagaaatcaaaatgcccgaggttaaggtgcccgagataaaggcggagcagcaagacgtcaacgtcaatccagagataactgctctgcaaaccatgttagctgagtgccaggaaaacttaaaaaaactcacatccattgagaagcgcctcgattgtctcgagcagaaaatgaagggcaaagtcatggttgatgagaacacctggacgaacctgctgtccagggtgacactgctggaaacagagatgctcctgtccaaaaaaaacgatgaatttatcgagttcaacgaggtaagtgaggactacgcgtcctgctccgatatggatctgctgaacccgcacagaaagagcgaagtggaacgccctgcctctattcctttgtcaagtggatattccactgcgagcagcgactctacgccgcgtgctagtacagttaactactgtgggctaaatgagatctcagagaatttccctgcatggagcgccaccagctcatgctccagcctgtcatggttgctcagaggtcatacttcatacctcagctcgcaaagttttgcatggccattgtcatgcgtgtag

SEQ ID NO: 25594 - DNA, 1317 bp, synthetic construct
  source 1..1317: mol_type = other DNA; note = Synthetic coding sequence
tgatgcgccggcgccgagcggccccggcggcggggccggctgtgggattccagtggcgtgcctcagcgtcagaaaaggcctggaccctggaggactcagacgcaagagcaaatgtcaagagacgtatgcattcatacctggccctgcacatactaccttgagcctaaacgccgctgggtgacaggacaactcagtctcacctccctatcactcaggtttatgacagatagtacaggcgagatcctggtctcctttcccctgagcagcattgttgaaataaaaaaggaagcaagccactttattttttcatccattactattttggagaagggacacgccaaacattggttctcatcgttacgaccatcaagaaacgtcgtattttcaattatcgagcacttctggcgggaactcctcctgtcacagccaggcgctgtggccgacgcatcggtgcctagaacgcgtggtgaggagctcaccgggctgatggcgggatctcagaagcggttggaggataccgccagggtcctgcaccaccagggacaacaattggatagcgtgatgcggggcctggacaagatggagagcgacctggaggtggccgacagactcctgacggagctggagagcccggcatggtggccattcagctcgaaactctggaagacaccaccggagacaaagcctagagaagatgtgtccatgaccagctgcgagccttttggaaaagagggtatccttatcaagatccctgcggtaattagtcaccgtacagaatcgcacgtgaagcctggcaggctgactgtcctggtctctgggctggagatacacgacagctcttcgcttttaatgcacagatttgaaagagaggatgtggacgacattaaagtgcactccccgtacgagatcagtattcggcagaggttcatcggcaaacccgacatggcctataggctgattagcgcaaaaatgccggaggtaattccaattctagaagtacagttttctaaaaagatggaactgttggaggatgcgttggttctaagaagtgcgcgaaccagcagtcctgctgagaagagttgctcagtttggcatgctgcgtccggactgatgggaagaaccctgcacagagaaccacccgctggggaccaagagggcaccgcactgcatctgcagacatctctacccgccctgagcgaagcggacacgcaggaattaacacagggcttccgacctatgtcactcagcacacagacagtccttgtaatgctgtgcagcgagtcggccggtgccctctggcggcagcggttgtcctag

SEQ ID NO: 25595 - DNA, 711 bp, synthetic construct
  source 1..711: mol_type = other DNA; note = Synthetic coding sequence
atgaccggctacgaggcccggctgatcaccttcggcacctggatgtacagtgtaaataaggaacagctggcacgcgcaggattttatgccattggccaagaagataaggtgcagtgctttcattgtggtggggggttggcgaactggaagcctaaggaagacccatgggagcagcacgcgaagtggtaccccggttgtaagtaccttcttgaagagaaagggcacgagtatattaacaatattcacttgactagaagtctggaaggagctctcgtacagacaacgaaaaaaaccccctctctgaccaaaaggatcagtgacaccatcttccccaatcctatgctgcaggaggctatccgcatgggattcgacttcaaagacgtgaagaagataatggaggagcgtattcagacatctggctccaattataagacgctggaagttttggtggcagatctagtttcggcgcaaaaggataccacagagaacgagctgaatcagacaagtcttcagagagagatatcacctgaagaacctctacgtcggttacaggaagaaaaactgtgtaagatatgcatggaccgtcacatcgccgtggtatttattccttgtgggcacttagtcacctgcaagcagtgcgccgaggcggtggaccgatgcccaatgtgttctgccgtcattgatttcaagcagagggtgttcatgagctag

SEQ ID NO: 25596 - DNA, 285 bp, synthetic construct
  source 1..285: mol_type = other DNA; note = Synthetic coding sequence
atgaaccccaccaaccccttcagcggccagcagcccagcgccttctcggctagctctagcaatgtcggtaccctgccatctaagccacccttcagatttggacagccgtccttattcggtcagaattccaccctgtcagggaaatcctctggcttctctcaggtgagcagcttccctgctagcagcggcgtttcgcatagcagctctgtccagactctgggctttactcagactagctcggtggggcctttcagtggcctggagcatacatctactttcgtgtag

SEQ ID NO: 25597 - DNA, 723 bp, synthetic construct
  source 1..723: mol_type = other DNA; note = Synthetic coding sequence
atggccatcgtgcagaccctgcccgtgcccctggagcccgcccccgaagccgccactgccccacaagctcccgtcatggggtccgtcagctcgctgatctctggccggccctgcccaggcggccctgcaccaccgcgacatcacggacctcctggacccactttttttagacagcaagatggcctgctccgggggggatatgaggcgcaggagccactgtgtcccgctgtcccacccagaaaggccgttcctgtaacaagtttcacttatatcaatgaggactttcgtactgagagtcccccgagcccctctagtgacgttgaagacgctcgagagcagagggcacataatgcacatttgagggggccacccccaaaactgatacccgtgtccggtaagcttgaaaaaaatatggagaagatcctcatcagacctacagctttcaagccagtgctgcctaaacccagaggagcaccttccttgccttcgtttatgggaccacgagccactgggctgagtggctcacaggggtcactcactcaactgtttggtggaccggcctcctcaagcagctcaagttcgtccagctcggccgcggacaaacccttggcattctcagggtgggccagcggctgtcctagcggaacactcagcgatagcggccgcaattccctgtcctcactgcctacatactctactggaggagcagagccgaccacgtag

SEQ ID NO: 25598 - DNA, 1317 bp, synthetic construct
  source 1..1317: mol_type = other DNA; note = Synthetic coding sequence
atgtgccccaagaacgccagctactacggcaaccgggccgccaccttgatgatgctcggacgattcagagaggcactgggagatgcccagcaatcagtccgactcgatgatagttttgtcaggggccaccttagagaggggaagtgccacctgtccttaggcaacgccatggccgcttgtagaagcttccagagggccctggagctggaccacaagaacgcacaggcacagcaagagtttaaaaacgctaacgcggtgatggagtacgaaaagatcgctgagacagatttcgaaaagcgggattttcgcaaagttgtgttctgcatggacagagcattagaattcgccccagcctgccacagatttaaaattctcaaagccgaatgcttagccatgcttggccgctacccggaggctcaatcagtagcatcagatattcttaggatggattctacaaatgcagacgccctgtacgttcggggcttgtgcctttactatgaggattgcatcgagaaagccgttcagtttttcgtgcaggccctgcggatggcacccgatcacgagaaggcatgtatcgcctgccgaaacgctaaagctcttaaggctaagaaagaggatggtaacaaagccttcaaggaaggcaactataagctggcttacgaactctacacagaagccctgggcattgaccccaacaacatcaagactaacgcaaagctgtattgtaaccgtgggactgttaatagcaagcttaggaaattggacgacgcaatagaggactgcactaatgccgtgaaactcgacgatacctacatcaaagcatatttgcgacgcgctcagtgctacatggatactgaacagtacgaagaagcagtacgcgactatgagaaagtttaccaaaccgagaagactaaggaacataaacaactccttaagaatgcccaattggagctgaaaaagtctaagcggaaggactattataagatcctaggggtcgataaaaatgccagcgaggatgaaatcaagaaagcatatagaaaacgggcgttaatgcaccatcccgacagacatagcggcgctagcgccgaggtgcagaaggaagaggagaagaagtttaaggaagtaggggaggcgtttacgattttatccgacccgaagaagaagacccgttatgactctggccaagaccttgatgaggagggtatgaatatgggagattttgatccgaacaacatattcaaagcctttttcggaggtcccggagggttcagctttgaagcatctggccctggtaatttcttctttcagtttgggtag

SEQ ID NO: 25599 - DNA, 678 bp, synthetic construct
  source 1..678: mol_type = other DNA; note = Synthetic coding sequence
atggaggaggaggagatgaacgacggcagccagatggtgcggagccaggaaagtctgacttttcaggatgtagccgtcgatttcacgcgtgaagagtgggatcagttgtaccctgctcagaaaaacctctatcgtgacgtcatgttagagaactatcgaaacctcgtcgcgctgggctaccagctgtgcaagcctgaagtaattgcccagctcgaactcgaggaggaatgggttatcgaacgcgactcactcctggacacccatcctggagaccagagccacgtaatgtctgttgtcaggtctagtgtccacgcccggtggatcgtgggtaaagtcatcggcactaagatgcagaaaaccgcaaaggtaagagtgaccagacttgtgctggatccctatttattgaaatactttaataagcggaagacatatttcgcccatgacgctctgcagcagtgtaccgtgggggacattgtgctcctacgggcattgcctgtgccccgggcaaagcacgtgaaacacgagttggccgaaattgtgttcaaagtgggtaaagtcattgatccggtgacaggcaagccatgcgctggcactacatacctggaaagcccactttcctcagagactacccagttgtcaaagaatctagaagagctcaacatttcttccgcacagtag

SEQ ID NO: 25600 - DNA, 753 bp, synthetic construct
  source 1..753: mol_type = other DNA; note = Synthetic coding sequence
atgaccaccaagaacctggagaccaaggtgaccgtgaccagcagcccgatccgcggggccggcgacgggatggagaccgaggaaccccctaaatctgttgaggttacctctggcgtacagagccgaaagcaccactcgttacaatccccgtggaagaaggcagtcccctccgagagccctggagtcttgcaactcggcaaaatgcttaccgaaaaggccatggaagtcaaggctgtccgcattttggttcccaaggcggccatcacccatgatattcctaacaagaacacgaaggtgaagtccctaggacaccacaaaggagagtttctcggccagtccgaaggggttatcgaaccgaacaaagaactatctgaggtgaagaacgtgctagaaaaacttaagaacagcgaacggagacttctgcaagataaagaggggctgtccaaccagctgcgtgtccagacagaagtgaaccgagagctgaagaaactgctagtggcctccgtgggtgacgatctgcagtatcactttgagagactcgcccgagagaaaaatcagctgatactggaaaacgaggctctggggaggaatactgcccagctctctgagcaactggagaggatgtctatacagtgcgacgtttggaggtccaagttcttggctagccgagtgatggcggacgagcttacgaatagtcgggccgctctgcagagacagaatcgcgacgcccacggagcaatacaggatttatag

SEQ ID NO: 25601 - DNA, 387 bp, synthetic construct
  source 1..387: mol_type = other DNA; note = Synthetic coding sequence
atgctgtgctggggctactggagcctgggccagcccggcatcagcaccaacctgcagggaatcgtcgcagagccccaggtctgtggctttattagcgacaggtccgtgaaagaggtcgcttgtggcggaaatcacagtgtcttcctcctcgaagacggagaagtgtatacatgtgggctgaacacaaagggccagctcggccatgaaagggaaggtaataagcctgagcagattggcgcgcttgccgatcagcacattattcacgtagcttgtggtgagagccactctctggctctctctgatcgtggccagctgtttagctggggagccggcagtgatggccagctcggtctgatgactacggaggactccgtggccgtgccatag

SEQ ID NO: 25602 - DNA, 1617 bp, synthetic construct
  source 1..1617: mol_type = other DNA; note = Synthetic coding sequence
atggacgtggacaaggagctgggcatggagagcgtgaaggccggcgcgtctgggaagccagaaatgcgactgggcacccaggaagaaacctccgagggcgatgctaacgagtcttcattgttagttctgagctcaaacgtgcccctcctggctttggagtttcttgagattgcgcaggccaaggagaaagccttccttcctatggtgagccatacatttcacatgcggaccgaagagagcgatgcgtctcaggagggcgacgacctgcctaagtcaagcgccaatacttcccacccaaagcaggacgactctccaaagtctagtgaggagaccattcagcctaaggaaggagatattcccaaggcacctgaggagacgatccaatctaagaaagaagacctaccaaagtccagcgaaaaggccatacaacctaaggaatccaacatccccaagtcctctgccaaacctatacagcccaaactcggcaatatccctaaagcatctgtgaaaccctcacagcccaaagaaggggacattccaaaggcgcccgaggagaccatccaaagtaagaaggaagacctgcctaaatcatcagaagaagctattcagccgaaagaaggcgacatccctaagtcgtcagcaaaacctatacaacccaagctgggtaatatcgccaagacttcagttaagccctctcagccaaaggagtctgatattcccaagagtcctgaagaaacgatccagcccaaggagggcgatatccccaagagttcagctaaaccaattcagcccaaactaggaaatattcctaaagcatccgtgaagccttctcagcccaaggagggcgatatctccaaatcacctgaggaggctatccagccaaaagaaggcgacctacctaagagcttagaagaagctattcagcctaaagaaggtgacattccaaaatctctggaagaagccatccagcctaaagagggtgacatacctaagagccctgaggagactatccagcccaaaaagggagacattcccaagagtcctgaggaagcaattcaacctaaggaaggcgacattcccaagtctcccaagcaagcgatccagcctaaggagggtgacatcccaaagagtttggaagaggccattccccccaaggagatcgacatccctaagagcccagaagagaccattcagccgaaggaggatgatagccctaaaagtctggaggaagcaactcccagtaaagagggcgatattctgaagccagaagaggagaccatggagttcccagaaggcgacaaggtcaaggtgattctctccaaagaagacttcgaggctagtctaaaagaagctggtgaaaggctggtagcggtggacttcagcgctacgtggtgcgggccatgccgtactatacgaccctttttccacgctctgtcggtgaagcacgaggacgtcgtcttcctggaggtcgacgcggataattgcgaggaggttgtgagggagtgtgccattatgtgtgtgcctacctttcagttctataagaaggaagaaaaagtggatgaactgtgcggcgctctgaaggagaaactggaggccgtcatcgctgaattgaaatag

SEQ ID NO: 25603 - DNA, 153 bp, synthetic construct
  source 1..153: mol_type = other DNA; note = Synthetic coding sequence
atggccagcgaggagctgcagaaggacctggaggaggtgaaggtgctcctggagaaggcgacgagaaaacgtgtgagagatgccctgactgcagaaaaatctaagatcgaaactgagattaagaataagatgcaacagaaatctcagaaatag

SEQ ID NO: 25604 - DNA, 1527 bp, synthetic construct
  source 1..1527: mol_type = other DNA; note = Synthetic coding sequence
atggccaccgactggctgggcagcatcgtgagcatcaactgcggcgattccctgggcgtttaccaaggcagggtctcagctgtggaccaggttagccaaactatctctctgactaggccctttcataatggcgtcaagtgtctggtacctgaagtgacatttagggcaggcgacataactgagttgaaaatcctagagatcccgggacctggggataaccagcacttcggtgacctgcatcagacggagctggggccttccggagcgggatgccaggttgggatcaaccaaaacggcacaggtaaattcgtcaagaaaccggccagcagctctagtgcaccccaaaacataccgaagagaacagatgtaaagtcacaggacgttgccgtgtctccgcaacagcagcagtgttccaaatcttacgtcgatcggcatatggaatcgttaagtcaatccaagtcctttaggagaagacacaactcatggagtagctcgagtagacaccccaaccaagcaaccccaaagaagtccggtctcaagaacgggcagatgaagaataaagatgatgaatgttttggagacgacatcgaggaaattcctgacactgacttcgattttgaaggcaacctggccctgttcgacaaagcagcagtgttcgaggagatagatacatatgagcgacggtccgggactaggagcaggggcatccctaacgagagacccacaagataccgacatgacgagaatattctggagtccgagcccatcgtctaccggagaatcattgtgccccacaatgtctccaaagagttttgtacagacagcggtttggttgtgccctctatatcatatgagcttcacaaaaaactcctgtcagttgccgagaaacatgggcttactcttgagcggcgcctggaaatgactggcgtgtgcgcatcccaaatggcattgaccctgctgggcgggccaaatagacttaaccccaaaaatgtccaccagaggccgaccgtggccctgctctgcggcccccacgtgaagggagcacagggcatttcgtgtggccggcatctcgcgaaccatgacgtgcaagtaatactgttcttaccgaatttcgtgaaaatgctagagtcgatcactaacgaactctccctgttttctaaaactcaaggacagcaagtgtcaagtctgaaggacctgccaacctctcctgttgacttagttatcaattgtctagactgtcccgagaatgtcttcctgcgtgaccagccatggtacaaggccgcagtagcctgggcaaatcaaaatcgggcccctgtgctaagtatcgaccctcctgtgcatgaggtggagcagggaatcgacgcaaagtggagccttgccctaggcttgccattacctctgggtgagcacgccgggcgcatctacctctgtgacatcggcatcccgcagcaggtgttccaggaggtcggaatcaattatcattcaccctttggctgtaagtttgtgatacccctgcattccgcatag

SEQ ID NO: 25605 - DNA, 3846 bp, synthetic construct
  source 1..3846: mol_type = other DNA; note = Synthetic coding sequence
atgaccttctacagctggatcccctaccaccggcaggcccccctgaatcacaggcgggtttgttctgctgaaggagccggttcccctgggccagccctcgatcctaggtggctgccaacggaggctcacctgctggaggctcaccgcttattgctccagagcgtgctctgcgatagacccagagaaagcatccaacttcattttcggctgtcaatggcttctcaactccaggtgtttagccctccatcagtttctagttcagctttctgtagcgcaaaaaagctaaagattgaaccgtcaggatgggacgtgagcggacagtcttctaacgacaaatactacacacactctaagactcttccagcaacacagggacaggcaaacagctcccaccaggtggccaactttaacatccccgcctacgatcaaggactgctgttgccagcacccgcggtggagcacatcgtagttaccgccgctgatagctccggctctgctgccacctccactttccaaagctcacagaccctcacacacagatccaacgtgagtcttcttgaaccctatcaaaaatgcgggctaaagcgaaagtccgaggaggtggattccaatgggtccgtgcagataattgaagaacaccctccacttatgctccagaaccggactgtggtcggtgcagccgctacaaccacaacagtcacaactaagagttctagcagctccggcgagggagattatcaacttgtgcaacacgagattctgtgcagcatgaccaattcatacgaagtgctggaattcctcggccgaggcacattcggccaggtcgccaagtgctggaagcgtagcacaaaggaaatcgttgctattaagatcttgaaaaatcatccctcttatgcccgacagggacagatcgaagtgagcattctgtcccgcctgagctccgagaatgcagacgaatataactttgtgagatcctacgagtgtttccagcacaagaaccatacatgtcttgtgttcgagatgctagaacagaacctctatgattttttgaagcagaataagttctcccccctgccactgaagtatatcagacccatcctccaacaggtggcgacggccctgatgaagctgaagtctttagggctaattcatgcagacctgaagccagagaatataatgttagtggaccctgtccggcagccttatcgcgtgaaggtgattgattttgggtcagcctcgcatgtgagcaaagccgtgtgttcaacttacttgcagagccggtattatcgggcccctgaaataatcctcggcttgcctttttgcgaagccatagacatgtggtctctcggatgtgttattgctgaattgtttctgggttggcctctataccccggggcctctgaatatgaccaaatcagatacatctcccaaactcaaggcctgcccgccgaatatcttttgtccgcaggtaccaagacaacaaggtttttcaatcgagaccccaacctagggtatcctctgtggcgcttgaaaaccccagaggagcatgagttagagaccggcattaagtccaaagaggcccgaaagtatatcttcaattgcttggatgatatggcacaagtgaatatgtctacagatctcgagggaaccgatatgcttgctgaaaaggcagaccgcagagaatatatagatttgctaaagaagatgctgacaattgatgctgacaagcgcataactccgttgaagacgctcaaccatcagtttgtgacgatgacacacctcctggactttccacacagtaaccacgtgaaaagttgtttccaaaatatggaaatttgcaagcgaagagttcacatgtacgacacggtctcccagataaagagcccgtttactacccacgtggcccctaacacttctaccaatctgaccatgagtttctccaatcaactgaacacggtgcacaaccaggccagcgtgctggcatccagcagtacagccgccgcggctactctgagtctggctaacagcgatgtgtcccttcttaactatcagagcgccttataccctagctccgcagccccagttccaggcgtagcacagcagggggtcagcctccagcccggcacaactcagatctgtacacagacggacccgttccagcagacctttatcgtgtgccctcccgccttccaaaccggcttgcaggccaccacgaaacattctggcttccctgttaggatggacaacgctgtgccaatcgtccctcaggcccccgctgcccagcccctacagatccagagcggcgtgctgacccagggtagttgtacacccctaatggtagccactctgcatccacaggttgccacaatcacgcctcagtatgccgtgcctttcactctctcgtgcgcagcaggccgtccagctctcgtcgaacagaccgccgcagtgcttcaggcctggcccggcggcacgcagcagatattactgcccagcacatggcaacagcttcctggcgtggctctgcataatagcgtgcagccgacagctatgataccagaggccatgggctccggtcagcagttggcagattggaggaatgcacactctcacgggaaccaatattctactattatgcagcagcccagtctgctgacaaaccatgtgaccttggctaccgcccagcctctgaacgtgggcgtggctcacgttgtgcggcaacagcagtccagtagcctgcccagcaagaagaataagcagtctgccccagtctcgagtaagtctagcctagacgtgctcccctcccaagtctatagcctggtgggtagctcacctttgcgaactacatctagctacaatagcctagtccctgtgcaggaccagcaccagcccataataatccccgacacacctagcccaccagtgtctgttatcactatcagaagtgatacggacgaggaggaagacaataagtacaagccttccagcagtggactgaagcccagaagtaacgtgatctcatatgtcacagttaacgatagccctgattcagattcttctctgagtagcccctactctactgacacgctgagtgccctcagaggcaactccggctccgtcctggaaggtccgggaagagtggtggccgatggtactggcacgcggaccatcatcgtaccgcccttgaagacccaactcggagactgcactgtcgccacccaggcttcaggcctccttagcaacaaaacaaagcccgttgcgagcgtgtccggccagtccagtggatgttgcatcacacccacggggtacagggctcagaggggcggaacgtctgccgcacagcctcttaatctttcacagaaccagcaatctagcgcagccccgacgtcacaggagagaagctctaaccccgccccacgccgtcaacaggcgttcgtcgctcccttaagtcaggctccatatacattccagcatggcagcccattacattctacaggtcatcctcacctggcccctgctcccgctcacctcccctcgcaggcgcacctgtacacatacgctgccccaacgtcggcagcggcactgggctcaacatcttccatcgcccaccttttttctccgcagggcagctctcgacatgcagctgcatatacgacacacccttcaaccctagtccaccaagttcctgtttccgttgggcccagtctgctgacctctgctagtgtcgccccagctcagtaccagcatcagttcgccactcagagctatattggatcttcaagaggctcgactatctacacgggttaccctctgtctccaacgaagatatctcagtattcttacctgtag

SEQ ID NO: 25606 - DNA, 1071 bp, synthetic construct
  source 1..1071: mol_type = other DNA; note = Synthetic coding sequence
atgaccagcgtgacccggagcgagatcatcgacgagaagggccccgtgatgtccaaaactcacgaccaccagctggagagtagccttagtccagtggaggtgttcgccaagacttcagcctccctagagatgaaccagggtgtctcggaagaaaggattcatctgggcagcagcccaaaaaaggggggtaactgcgacctatcccaccaggaacgcttgcaaagtaagtcgctccacctgagcccacaagagcagagtgctagctatcaggatagaaggcaatcttggcggcgagcctccatgaaagagactaataggaggaaaagtctgcatcccatccaccagggaatcactgagctgtctcgaagcatttccgtcgacctggctgagtctaaaagactcggttgtctactgctgagctcattccaattctctattcaaaaactggagcctttcctgcgggacacaaagggattcagtttggaatcgtttcgcgcaaaggccagctccctcagcgaggagctgaagcactttgccgatgggctggagacggacggcacattgcagaagtgttttgaggactccaacggtaaggcttcagactttagcctggaagcctctgtggctgaaatgaaggagtatatcacaaagttcagtctcgaacgccagacatgggaccagctgctactgcattaccagcaggaggctaaagaaatcctttcgaggggttccacggaagctaagatcacagaagttaaggtcgaaccaatgacctacctcggctcatcgcagaatgaggtgctgaataccaaacccgactaccagaagatcttgcagaaccagtctaaggtctttgactgcatggagctcgtgatggacgaactgcagggttcggtcaaacaacttcaggctttcatggacgagtctacacagtgtttccagaaagtctcagtgcagcttggaaagcggtccatgcaacagctggatccgagcccagcccggaaactactaaagctgcagcttcaaaacccgcctgccattcacggaagcgggtcgggttcttgccaatag

SEQ ID NO: 25607 - DNA, 2748 bp, synthetic construct
  source 1..2748: mol_type = other DNA; note = Synthetic coding sequence
atgcagggccccgacgcccccctgctgctgagcgcccgggagctgggtcccggtagacgagggtccgcctcctggtatagacaagaggggggcgccgtgtgtaactggcttcggaagccgcagcccctggagccccgaacgagctttccctctgctcgccggagcgaattccgtccaccccgccgactgccctgggcggggcccgcaagcgcacaatctgaagaagggcatgcaggtggcagatgtcaggccggaagtcctgcccccgccagacgcctatcaggggccttcaaaactctcgttccgggaactcacgcgcagggggctagtgacacccacccactggggccccctcacacccctgtgctcgatcctagccctcaagacggctttccagtcctttggcgcgggtcaagcaaagcttcccatatgaatcgactcaggaacgcaaaaatctatgtggagcgggccgtgaaacagaagaaaatctttactattcagggttgttatccggtgatcagatgcctgctccgaagaaggggatgggtggaaaagaagatggtgcatcggtcaggccctacactgctgccacctcagaaagaccttgattcctccgcaatgggcgactcagacaccacagaagacgaagacgaagacgaggacgaagagttccagccaagccagttgttcgatttcgatgacttgctgaaatttgatgaccttgatggcactcatgcgctaatggttgggctgtgcctaaacttgcgcaatctgccatggttcgacgaagtcgacgcaaattctttttttccccggtgttactgcttgggagcggaggatgataagaaggctttcatcgaagatttctggcttaccgcagcgcgaaatgtgctcaagctagtcgtgaagtctgagtggaaaagctaccctatccaggcagttgaggaggaggccagtggagacaagcagcccaaaaaacaggagaaaaaccccgtccttgtgagtccggagtttgtagatgaggccctctgcgcatgtgaagaatatttaagcaatctggcacatatggatatcgataaagatctcgaagctcccctttacctcactcctgaaggctggtcactcttcttgcagcgatattaccaggtggttcatgaaggtgctgagctgcgccatttggacacccaggttcagaggtgcgaagacatcctgcagcagctgcaggccgtggtaccacagattgatatggagggcgatcgaaatatctggattgtgaaacctggggccaagtcccgcgggaggggtatcatgtgcatggaccacctggaagaaatgctgaagctggtcaacggtaacccagtagttatgaaggacgggaagtgggtggtccagaaatacattgagcggcccttgctcattttcggtactaagtttgacctgcggcagtggtttctggtcaccgactggaacccccttactgtatggttctatcgggattcctatatccgcttcagtacacaacctttcagtcttaagaacctggacaattccgtacacctctgtaacaattctatacagaaacaccttgagaattcctgccatcgacatccgttattaccacccgacaatatgtggagcagtcagcgcttccaggcccacctgcaggagatgggagcccctaacgcctggtccaccattattgtacctggcatgaaagacgcagtcatccatgccctacaaactagtcaggatacggtccaatgtaggaaagcttcctttgaactgtatggcgccgattttgtttttggagaagattttcagccatggctcatcgaaataaacgcttcccctacgatggctcctagtacagctgtgacggctcgtctgtgcgcgggtgtgcaggccgacactttgcgagtggtgattgatcggatgctggatcggaattgcgatactggcgcttttgaactcatttacaagcagcccgccgttgaagtaccacaatatgtggggatacgcctgttagtggaaggcttcaccattaaaaaacccatggcaatgtgtcacaggcgcatgggcgtgcgccccgcagtgcccctacttactcagaggggctccggggaagctcgccaccattttccaagtctccataccaaggcacagttaccctcaccccatgtgctgaggcatcaaggccaggtacttcgcagacagcatagcaagctggtcgggaccaaggctttgtccacaacgggaaaggcgttacgcacactgccaacagccaaagtatttatttcgctcccccccaatctggactttaaagtagctccatctatcctcaagcctaggaaagccccggccttgctgtgtttgcgcgggccacagttggaagtgccttgctgcctctgccctctgaaaagcgaacagttcctggcccctgtgggccgctcgaggcccaaagccaactcccggcctgattgtgataagcctcgcgccgaggcttgcccaatgaaaagactgagtcccctgaaacctctgccgctcgttggaacatttcagcgtcgccgtggactaggagacatgaaattggggaaaccactcttgcggttcccaactgcactggtgttagaccctacccccaataaaaaaaagcaggtcaagtacctgggacttgattcaatcgccgtgggcggaagccgtgtggacggcgcacgaccatgcaccccgggtagcaccgctcgggcatag

SEQ ID NO: 25608 - DNA, 2463 bp, synthetic construct
  source 1..2463: mol_type = other DNA; note = Synthetic coding sequence
atgcggatcagcagctgcagcgacgagagcagcaacagcaacagctcccggaagtccgataaccattcccccgcggttgtgaccaccaccgtgtcgagcaagaagcagccgagtgtgttggtcacttttccaaaagaagaacgtaagtctgtgtctggaaaagcctcgatcaagctgtccgaaacgatttccgagggcacctccaacagcctgtcaacatgcacaaaatcaggaccctcaccactgagtagccccaacggtaagctgactgttgccagccccaaacgcggccagaagagggaagaggggtggaaggaggtggtgcgacggagcaaaaaggtgtcagttcccagtaccgtgattagcagagtcatcggccgaggaggctgcaacattaatgccatccgggaatttactggggcccacatagatattgacaagcagaaggacaaaaccggtgaccgtattatcaccataagaggagggaccgaatctacacgccaggctacccagcttatcaatgctctgattaaggaccccgataaggagatcgacgagcttatccctaagaatcggcttaagagctcatctgccaacagtaaaatcgggagctcggctcctaccacaacggccgccaacactagcctaatgggaataaaaatgactaccgtcgcactatcctctacttctcaaacagctacagccctgacagtgcctgcgatttcttcggcatcaacacacaagacgatcaaaaatcctgtgaacaacgtacgcccaggctttcccgtgagcctgccattggcttatcctccaccgcaattcgctcatgctctactggctgcccagaccttccagcagataaggcccccacggctgcccatgacccatttcggaggcacatttccgcctgcacaaagtacttggggcccattccctgtgcgtccactgagccctgcccgagcaacaaactccccgaaaccccatatggtccccaggcacagtaaccagaattcatctggttcacaagtgaacagtgcgggatcgctgacgagctcgcctactaccacaacctcatcctctgcttctactgtgcctggcacctcaacaaatggctccccttcaagccccagcgtgaggagacagctctttgtgactgtcgttaaaacctccaacgctaccactaccaccgttaccactactgctagtaacaataataccgcccccaccaacgctacctatcctatgcctaccgccaaggagcactatcccgtatcatcccccagctcccccagccccccggcccagcccggaggagtgtctcgaaatagtccgctcgactgtggcagcgcctctcccaacaaagtggcttccagtagcgagcaggaggccggaagtccgccagtcgtggagaccaccaacaccagaccccccaactcttcgtcttcttctggaagttcaagtgctcactctaatcaacaacagccgccaggatccgtctcccaggagcctcggcccccactgcaacagagccaggttcccccacccgaggtccgcatgaccgttccacctctggccactagctcggcccccgttgcagttccatctacagcgcctgtcacttacccgatgcctcagacccccatgggctgcccgcagccaacacccaagatggagactccggcgatccgccccccaccccatggaaccactgccccccataagaactctgccagcgtacagaatagtagcgtcgccgttttatccgtgaaccacattaagagaccacactccgtacctagcagtgttcagttgccttcgaccctgtccacccagtccgcctgccaaaattcagtgcatcctgcaaataaacctatcgcgcctaacttctctgcccctttgccattcgggccattctccacattgttcgagaactcccctacttccgcccatgccttttggggtggctctgtcgtgagttcccagagcacacccgagtccatgctgtctggaaagtcaagttacctgccgaattctgaccctctgcaccagtctgatactagtaaggcaccaggcttcaggccacctcttcagaggcctgccccatccccctctggcatcgttaacatggactcgccatacggctcagtcacaccctcctcaactcatctgggaaatttcgcctcaaacataagcggagggcaaatgtatggaccaggggcaccgttgggcggtgcacccgcggccgccaacttcaatcgccagcatttttccccactctcacttcttacaccgtgctccagcgcctccaacgactcctccgcccagagtgtgtctagtggcgtgagagctcctagcccagcacccagctccgttccacttgggtcagaaaaaccttcgaacgtgtcccaggacattgtggcaagtggcccactgaaaggactggtggccatcaagaccaagtag

SEQ ID NO: 25609 - DNA, 6033 bp, synthetic construct
  source 1..6033: mol_type = other DNA; note = Synthetic coding sequence
atggagaaggccaccgtgcccgtggccgccgccaccgccgccgagggagagggcagtccaccggctgtggctgccgtagccggccctcccgccgccgccgaggtcggaggaggtgtgggagggtctagccgagccaggtctgcgagctccccccgcgggatggtgcgcgtgtgcgatctccttctaaagaagaagccccctcaacagcagcaccataaggccaaaaggaacaggacctgtcggcccccctcctcgagcgagtcttcctccgactcagacaactccggagggggagggggcggcggcggcggaggaggggggggaggtggaacgtcttccaacaatagcgaggaagaggaggacgacgatgacgaagaagaggaggtcagtgaagtggagtcttttatactggaccaggatgacctggagaaccccatgctggaaaccgcctcaaagctccttctctctggtacagccgacggtgctgaccttagaaccgtggatcctgagacccaggcacgtttagaagcccttctggaggcagcggggattggcaagttaagcacagctgacggtaaagcgttcgcagaccccgaggtgctgagaagactgaccagcagcgtgtcttgtgccctggatgaagcggccgccgccctgacccgcatgcgggcagagtctacagcaaacgctggacagtccgacaaccgatccctggccgaggcatgttcggagggcgacgtgaatgccgtccgaaagcttcttattgagggaagaagcgtgaacgaacataccgaggagggagagtctttgctgtgtctggcatgcagtgccgggtactacgagcttgcacaggtcctactcgctatgcacgcaaacgttgaagatagaggcattaagggggacattaccccactaatggctgcagctaacgggggacatgtaaaaatcgtgaaattgctgctggcccacaaagctgacgtgaacgctcagtccagtactggcaatacagctctgacatatgcttgtgccgggggctacgtggatgttgtgaaggtgctcctggagagcggcgcatccatagaagaccataatgagaatggtcatacgcctcttatggaggctggcagcgccggacacgtagaggtggctcgtcttcttctggagaacggggctgggattaacacacactccaacgagtttaaagaatcagccctgacactggcttgttacaaaggacaccttgaaatggtgcggtttctgttggaggctggagccgaccaagagcacaaaacagatgagatgcatactgcattaatggaggcatgtatggacggccacgttgaggtggccaggctactgttggatagtggtgcacaggtcaacatgcctgccgattccttcgagagcccactgaccttggcagcatgcggtggtcatgtagaactggccgccttacttattgagcgaggcgcgagcctggaggaggttaacgatgagggatatacaccactgatggaagccgctcgagaggggcacgaggaaatggtggcgcttctgctcggccagggcgctaacattaatgctcagacggaagagacccaggaaacagccctaaccttggcctgttgcggtgggtttttagaggtagctgattttctgatcaaagcaggtgccgatatcgagctggggtgcagtacccctcttatggaagccgctcaggagggtcatttagagctggttaagtatctgctggcagcgggagcaaatgttcatgcaacaacggccacgggcgacactgccttaacttatgcctgcgagaacgggcatacagatgtggccgatgtgttgctgcaagcaggggcagacttggagcacgaaagcgaggggggcaggacccctctgatgaaagcggcgagggccggtcacgtctgtaccgtgcagtttttgattagcaagggagcaaatgtcaaccggaccaccgctaacaacgaccacacagtcttgtctctggcctgcgcgggagggcatctcgcggtagtcgagctcctactagcccacggagcagacccgacccacagactgaaagacggttctactatgctgattgaggcagccaagggaggacatactagcgttgtgtgctacctgctcgattaccccaacaatctcttgtctgcacctcccccagatgttacacagctcactccaccgtcccacgaccttaatcgcgctccgcgagtgccagtgcaagcccttcctatggtggttcccccacaggaaccagacaagcctcctgcgaacgtggcgactaccctgcctattagaaataaagcagcgtccaaacagaagtcctcctcccacttgcctgcaaattcacaggacgtgcaaggttatattaccaatcagtctcctgaatctattgtggaggaagcccaggggaagctgacagaactcgagcagcgaatcaaagaagccatcgagaagaatgctcagttacagtcgctggaactggctcatgcagatcagctgaccaaagaaaagatcgaggagctaaataagacccgggaagagcaaatccaaaaaaagcagaagatcctggaagagctccaaaaagtggagagagaactgcagctgaaaactcagcagcagctgaaaaaacagtatctggaggttaaagctcagcgcatccagctccagcagcagcagcagcagagctgtcagcatctcggattgctgaccccagtgggcgttggtgagcagctgagcgagggagactacgctcggcttcaacaagttgatcctgtccttctgaaagatgaacctcagcaaaccgcggctcagatgggatttgctcctatccagcctttggctatgccacaggcccttccattggctgctggacctttaccccctggatcaatcgctaatcttactgagctgcaggtgctgagttcactcttgcagccttgtttcctgtccacgttaccgttaatactgatgcatagactgcgggttattatgacacgccctaagtccagtagtaccagcgaatctggcgatagtgataacatgcggatttcctcctgttccgacgagtccagtaatagtaactccagccgcaaaagcgacaaccactcccctgccgttgtgactactacagtgtcttctaaaaagcagcctagcgtgttagtgacattccccaaggaagagcgcaagtcagtgtcaggcaaggcatccattaaactgtcagagaccatcagtgaaggaacttccaacagcctgtcaacctgtactaagtccggcccttctcctctcagtagtccaaatggtaagttgacagtggcgtcccctaaacgagggcagaagagggaggagggatggaaggaagttgtccgtcggtctaagaaggtgtccgtcccaagtacagtgatctcacgcgtgatcggcagaggggggtgcaacattaatgcaatcagggaatttacgggggcccatatagatatagacaaacagaaagataaaacgggggacagaatcataactatcagggggggaacagagagcactcgccaggccacacaactcattaatgctttgatcaaagacccagacaaggaaattgatgagctcattccaaagaatcgattgaaatctagctcggccaacagtaagattggctcctccgccccgactacaacagctgccaacacaagcctgatgggcatcaagatgaccacagtggctcttagctcaacttctcagactgctacggctctgacagtgccagcaattagcagcgctagcacccacaagacgatcaaaaacccggtaaataacgtgagacccggcttcccagtgtcactgcctctggcttatcccccaccccagttcgctcatgcgctcctagcagcacagaccttccagcaaatacggccaccgagactgcccatgacgcacttcggcggcacatttcctcccgctcagtcaacatgggggccattcccagtcaggccactgagcccagcccgcgctactaattcgcccaaacctcatatggtgcccagacatagcaaccagaattctagcggaagtcaagtaaacagcgcgggtagcctgacctcttcaccaaccaccaccacctcatctagtgcatccactgtacccggcacaagcacaaatggttctccaagctccccctccgttcggagacagctcttcgtaactgtggttaagacatccaatgccaccaccaccacggtgacaacaacagcaagcaacaataatacggcgcccacgaacgccacctatccaatgcctacagccaaggagcattacccagtttcctcccctagttccccaagtccacccgcacaacccggcggggtttctcgaaatagtcccctggactgcggcagtgcatcaccgaacaaagtcgccagttcttcagaacaggaggccgggagtcctccagtagttgaaactacaaacaccagacctccgaacagcagttcctctagcggaagttcttcagcgcattccaatcagcagcagcctccagggagtgtctcccaggagcctagacctcctttacaacagtctcaggtacccccacctgaggttcgcatgacagtgccccctctagctacttcgtccgcccccgtggctgtaccctccaccgcccctgtgacatacccaatgccacagacccccatgggttgcccccagcccactcctaagatggaaaccccggcaatccgcccacctccccacgggacaaccgctccccacaaaaactcagcttccgtgcaaaactcttcagtagctgtgctctctgtgaatcacattaagagacctcattctgtgccctcctcagtccaattacctagtacacttagtacccaatccgcctgtcaaaatagtgttcaccctgccaataaacctatcgccccaaactttagcgcgcccctgccattcggcccgtttagcacgttgtttgagaactcaccaacgtctgctcacgcattctggggaggcagtgttgtgtcgtcgcagagtacacccgagagtatgcttagtggaaaatcttcttatctgcctaactccgatccgctacaccagagcgacacgtcaaaggctccaggcttccgccccccgcttcagcgccccgccccaagcccttcagggatagtgaatatggattccccatatgggtcggtgacccctagctctacccaccttggcaattttgccagcaacatatccggagggcaaatgtacgggcccggcgccccactcggcggcgcccccgctgcagccaattttaataggcagcatttttctcctctgtctcttctcaccccttgctccagcgcttcaaatgacagcagtgcccagtccgtatccagcggagtaagggctccttccccagcaccctcaagtgtccccctgggatcggaaaagcccagtaacgtgtcccaagatcggaaagtgccagtgccgattggtaccgaacggtctgcccggattagacaaaccgggacttctgccccaagtgtgatcggctctaacctgtctacctcggtcggccactctggtatctggtccttcgagggaatagggggtaatcaggacaaagtggattggtgtaaccctgggatgggcaacccaatgattcaccgccccatgtccgatcctggggtcttttcacagcatcaagctatggaaagagacagcacaggaattgtgactccttctggaacatttcatcaacacgtgcctgccggatatatggattttccaaaggtgggaggcatgccattcagtgtgtatggtaatgccatgatccctcctgtagctcccatcccggacggtgcaggtgggcccatctttaacgggccccacgccgcggacccctcctggaatagcctgattaagatggtgtcatctagcacggaaaacaacggcccacagaccgtttggaccggcccctgggcgccacacatgaactctgtccacatgaatcagctgggatag

SEQ ID NO: 25610 - DNA, 1446 bp, synthetic construct
  source 1..1446: mol_type = other DNA; note = Synthetic coding sequence
atggccagcgccgccagcgtgaccagcctggccgacgaggtgaactgtcctatttgccagggaacactccgagaaccagtgactatcgattgtggccataacttttgtcgagcatgcctgacccgttactgtgagattccagggcctgacctcgaagaatcacctacctgccccctttgcaaagagccgttcagacctgggtcatttcgccccaactggcagcttgccaatgtagtagagaacattgaaaggctacagctggtttccactctgggtctgggcgaggaagatgtatgccaggagcatggcgagaagatttattttttttgcgaagacgatgagatgcaactttgcgtcgtctgtcgtgaggcaggggaacacgccacccacacaatgaggtttttagaggacgccgccgcaccatacagggagcagatccacaaatgcttgaagtgtctacggaaggagagagaggagattcaagagattcagtcgcgcgaaaataaacgcatgcaggtgctcctgacacaggtgagtactaagaggcagcaggttatttctgagttcgcacacctccggaaattcctggaggagcagcaatccatactgcttgcccagttagaatctcaagatggcgatatcttgcgccagcgtgatgagttcgacctcctagtggctggtgagatatgccgcttttctgccctgatcgaggagttggaggaaaagaacgaaaggcctgcgcgcgagcttttaaccgatatccgcagtactttgattcgttgcgagacccgtaagtgccggaagccagttgccgtgtcccccgagttgggacagcggattcgcgatttcccgcaacaggctctgcctttgcaacgggaaatgaagatgttcctggaaaaactgtgctttgagcttgattacgagcctgcccacatttccctcgacccacaaacctcccatcccaagttacttctctccgaagaccaccaaagagcgcagttcagttacaagtggcagaattcgcccgataatcctcagcggttcgatagggcaacctgtgtacttgcacatactggcattaccggcggccggcacacgtgggtggtgtcgatagacctggcacacgggggctcttgtaccgtgggagtcgtttctgaggacgtccaacggaagggcgaactgagacttaggcccgaagaaggggtttgggctgtcagattggcctggggattcgtttcggcactggggtctttcccgactagactgaccctgaaggagcaacccagacaagtgagagtgagccttgactatgaggtgggctgggtcacgtttacaaacgccgtaacgcgagaaccaatctacacattcaccgcctctttcactaggaaagtcatcccattttttgggctttggggtcgcgggtcaagtttttctctcagttcatag

SEQ ID NO: 25611 - DNA, 1566 bp, synthetic construct
  source 1..1566: mol_type = other DNA; note = Synthetic coding sequence
atgcccagcccccagctgctggtgctgttcggcagccagaccggcacagcccaggacgtatcggaacgcctcggacgggaagcccgtcgtcggagactcggctgccgcgtacaagcactggatagttaccctgttgtgaacctaattaatgaacctttagttattttcgtgtgcgccaccactgggcagggcgaccctcccgacaacatgaaaaacttttggagatttattttcaggaaaaacttgccatctaccgcactctgccaaatggatttcgctgtccttgggctcggcgattcttcctatgctaagtttaattttgtcgcgaagaaactgcaccgccggctcctccagctgggcggatcagcgctgttaccagtttgtctgggcgacgatcaacacgaactgggattgccgtcaaagttcacacttctcttcctgcaggaggccccctccacggggagtgaaggacaaagagtcgcacatcccggatctcaagaaccaccctcagagtcaaagcccttcctcgcacccatgattagcaatcaacgcgtgacaggcccctcccatttccaggacgtgcggctgattgagtttgatatacttggctccgggatttccttcgcagctggtgatgtcgtgctgattcagccttctaactccgcagcccacgtccagaggttctgtcaggtgctgggccttgaccccgaccagctgttcatgctccaacctcgggaaccagacgtgtcatccccaacgagacttcctcagccctgcagcatgagacatcttgtgagtcattacttagacattgcttcagtccccaggcgctcattttttgaactgctggcatgtctgtcattgcatgagttagagagggagaagttgctggagttttcatctgcacagggacaggaggaactttttgagtactgcaatagaccgagacgcacaattctagaggtactctgtgactttcctcataccgctgcggcaatccccccagattatttattggacctcatccctgtaattaggcctagggcattctctatcgcttcttcattgctgactcatccctcaagactccagatcttggtcgccgtggttcagtttcagactaggctgaaggaacctaggaggggactgtgtagctcctggcttgcttctctcgaccctggacaggggcccgtgcgggtgccactgtgggtccgccccggctcgctcgcctttccggagacacctgacaccccggtcatcatggttgggccaggcaccggtgtggccccctttagagcagcgatccaggagcgcgtagcccaaggtcagaccggtaacttccttttttttggatgtcgatggagagaccaagacttttattgggaggccgagtggcaggagttggagaaaagggactgtctcactctcatcccggcattttcaagagaacaggagcaaaaggtgtacgttcaacaccggcttcgggaactggggagccttgtgtgggagctgctggaccgccaggccactccatctccatgccagcgcacctcaagaaagccctag

SEQ ID NO: 25612 - DNA, 753 bp, synthetic construct
  source 1..753: mol_type = other DNA; note = Synthetic coding sequence
tgacagcccagccccgtggagccccggggccccttctacttctgcagactcctcctcgacgatttaggtatgaactcttgggacagacgaaagaatttccacctcctgaaaaagaactccaaattactcagggaattgaaaaacctggacagtagacagtgcagggagactcacaagattgccgtcttctatattgcggagggtcaggaggacaagtgttccatcctatctaacgaacgtggctcccaagcctacgaagacttcgtggccggtctcggatgggaagtggatctctcaacacactgcggctttatgggggggttgcaacgcaatgggagcaccggccagacggcgccttactacgccacctctactgttgaagttatcttccatgtatcgaccagaatgcctagcgactcagacgattcgcttacgaaaaaacttcggcatctcggcaacgacgaggtgcatatagtgtggtccgagcactctcgggactacaggcgtgggattatccccactgcgttcggggatgtttcgatcatcatctatcccatgaagaaccatatgtttttcatcgcaattacaaaaaagcctgaggtccctttctttgggcctctgtttgatggagctatcgtctctggaaagcttctgccctcactggtgtgtgcgacatgcatcaacgctagccgagcagttaagtgcctgattccactttatcagagcctgtacctcttcgctctgaacgtgtag

SEQ ID NO: 25613 - DNA, 345 bp, synthetic construct
  source 1..345: mol_type = other DNA; note = Synthetic coding sequence
atggtgctgatcctgggccggcggctgaaccgggaggacctgggcgttagagactctcctgctaccaaacggaaggtgtttgagatggaccctaagtcactcactgggcacgagttttttgactttagttccggatcatctcatgccgaaaatatccttcagattttcaacgagtttagggactcccggttgttcactgacgtcatcatatgtgtggagggcaaggagttcccttgtcaccgtgccgttctgagcgcttgtagttcctatttccgggcgatgttctgcaatgatcacagagaatctcgtgaaatgcttgtcgagatcaacggaatactggcctag

SEQ ID NO: 25614 - DNA, 1830 bp, synthetic construct
  source 1..1830: mol_type = other DNA; note = Synthetic coding sequence
atggccagcctgagccgggccctgcgggtggccgccgcccaccccaggcagagtccgacaagaggcatgggcccatgtaacctcagctcagccgctggcccaacagctgagaaaagtgttccctatcagcgcacactcaaagagggtcagggcacaagcgtagtagcccagggcccaagtaggcccctgccctcaaccgctaacgtcgttgtcataggagggggctctttgggctgccagacactgtaccaccttgctaaactgggcatgagcggcgcagttcttctggagcgcgagaggttaacatctggcacgacttggcacacagctggcttgttatggcagctgcgtccttctgacgtagaagtcgagcttctagcccacacgagaagggttgtgagcagagaactggaggaggaaaccggccttcatacaggctggatccagaacgggggcttgttcatagcaagcaataggcagagactcgatgagtataaacgcctcatgtcattaggcaaggcgtatggcgtcgagagccacgtgctgtctcctgctgaaacgaaaaccctgtaccccctgatgaatgtcgacgacctatatggcaccctgtatgtaccacacgacggaaccatggatcctgctggaacttgtactactcttgctagggccgcttccgcccgcggcgcgcaggttatcgagaactgccccgtaacagggatccgcgtatggacagatgattttggagtcaggagagtggccggcgtagaaacacagcacggctctatccagaccccttgcgtggtcaattgcgccggagtatgggccagcgctgtcggccgcatggctggggtgaaagttcccttagtggcgatgcaccatgcttatgtggtgacggagcgtatcgagggaatccagaatatgcctaatgtaagagaccacgacgcttcagtctatcttagactccagggcgatgccctgagtgtcgggggttacgaggccaatcctattttttgggaggaggtgagtgataaatttgccttcgggctgtttgatttggactgggaagtgtttacccagcatatcgaaggcgctatcaaccgcgttcctgtgcttgaaaaaactgggatcaagtctactgtatgtggccccgagtccttcactcccgaccacaagccacttatgggcgaagctcccgagctgcggggattctttttgggctgcggattcaacagcgccggaatgatgctgggcggcggatgcgggcaggaactggcacactggattatccacgggcgccccgagaaggatatgcatggctacgatatccggcgattccaccactcactgaccgatcacccccgatggatccgagaaagatcccacgagagttatgcaaaaaactacagtgtcgtcttccctcacgatgagccccttgcaggacggaacatgagacgtgacccattacatgaagagctcctgggccagggctgtgtgttccaggaaagacatggttgggagaggccaggttggtttcatccacgaggtcctgcccccgtgctggagtacgattactatggggcttatggttctcgagcgcacgaggactacgcatatagacgtttgctggctgatgagtacactttcgcctttcctccccaccacgacaccataaagaaggagtgtctggcctgtcgcggggctgcggcggtcttcgatatgtcatacttcggcaagttctatctcgtcgggctggacgctaggaaggcagccgattggctcttctcagctgatgtgtcccgaccccccggcctgcatcgggttcacgtttag

SEQ ID NO: 25615 - DNA, 129 bp, synthetic construct
  source 1..129: mol_type = other DNA; note = Synthetic coding sequence
atggacaacatgagcccccggctgcgggccttcctgagcgagcccatcggagaaaaagatgtgtgttgggttgacggcatcagtcacgagcttgccattaacctggtgaccaaaggcatcaataaatag

SEQ ID NO: 25616 - DNA, 3120 bp, synthetic construct
  source 1..3120: mol_type = other DNA; note = Synthetic coding sequence
atggtgagcagcgcccagatgggcttcaacctgcaggccctgctggaacagctgtcccaggacgagcttagcaaatttaaatatctaatcactactttctcactagcccatgaactacagaagattcctcacaaagagatggcctctctgcaagtttttgaaaagatgcatcgcatggacctttctgagcgtgcaaaagatgaggtccgggaagccgccctgaagagttttaacaagcgaaagcctctgtctcttggcataactcggaaggaaaggcctccactggacgtggatgagatgttagaaaggttcaaaacggaagcacaggcgttcacagaaactaaaggtaatgtcatctgtttaggaaaggaagtatttaaaggtaaaaagccagataaagacaacagatgtcggtacatcctaaaaactaaattccgggaaatgtggaagtcttggccaggagattccaaggaggtccaggtaatggccgaacggtacaaaatgctaatcccattttccaacccaagggtgctgcccgggccattttcctatactgtggtgctgtatggccctgccggactcggtaagaccaccctggcccagaagctgatgttggattgggccgaagataaccttatccataagttcaaatacgccttctatctgtcctgccgtgaactctcccgccttggaccatgcagttttgcagagcttgtgttccgagactggccggaacttcaggatgatatccctcacatcctggctcaggctcgtaagatactattcgtcatcgacgggttcgatgagttgggcgccgcgcccggggctctgattgaggatatttgtggcgattgggagaaaaaaaaacccgttcctgttctattgggctcgctgctgaatcgcgtgatgctaccaaaggctgcacttctggttacaaccaggccacgggccctgcgcgacctgcggatactagcggaagagccgatctacattcgagtggagggtttcctggaggaagatagaagagcatactttctgcgacacttcggagatgaagaccaagcaatgagggcattcgagcttatgagatccaacgcagccctgtttcaattggggtccgcgccggcagtgtgttggatcgtttgcacaaccctcaagctgcagatggaaaagggggaggaccccgttcccacctgcctcacccgcaccggcctgttcctgagattcctatgttctagattccctcagggagcccagcttcgcggtgctttgcggaccctatctttattggccgcgcaggggctctgggcccagactagtgtcttacatagggaagaccttgagcggctgggagtgcaggaaagcgatcttagactgtttctggacggcgatatcctgaggcaagatcgagtaagtaaggggtgttatagctttatccatctttccttccagcagtttctcacagccctgttttatactcttgaaaaagaggaagaggaggacagggatgggcacacatgggatatcggtgacgtgcagaagctcctatcgggagttgaacgcctgaggaacccagatctgattcaggccggatactacagcttcggactggcgaacgaaaagcgcgcaaaggagctagaagccacctttggatgcagaatgtctcctgatatcaaacaagagctgctccggtgtgacatcagctgcaagggtggccattcaaccgtgacagacttgcaggagctgcttggatgcctgtatgagtctcaggaggaggagctcgtgaaggaggtcatggcacaatttaaagaaatcagcctgcacctgaatgcagtagacgtagtcccctcatctttttgcgttaaacattgtcggaatttgcaaaaaatgtccctgcaagtgatcaaggagaacttaccagagaacgtgacggccagtgagagcgacgctgaggtcgaaagaagccaggacgatcagcacatgcttcccttttggaccgatttgtgctctatctttggctcaaataaagacttgatgggattggcaataaatgacagctttctgagcgcctccctcgtgcgtatcctgtgtgagcaaatcgcttccgatacgtgccatctgcagcgggttgttttcaaaaatatctctcctgccgacgcacacaggaatctctgtctcgcactccgcggtcataagacagtgacttatctgaccctgcaggggaacgatcaggatgatatgtttccggctctgtgcgaggtgctgcggcatccagaatgcaatctgcggtatctgggactggtgtcatgctcggcgacgactcaacagtgggctgacctcagtttggccctggaagtcaaccagtctctcacgtgtgttaacctgagtgataatgaacttctggatgagggagccaagctgctatacacaaccctgcggcaccctaagtgctttttgcagagactcagcctggaaaactgccatcttaccgaggccaattgcaaggatctggccgcggttctcgtcgtgtctagggagttgacacacctgtgtctggccaagaacccaatcggaaatacaggagtcaaattcctgtgcgagggacttcgatatcctgagtgcaagctccagacacttgtcctgtggaattgtgacatcactagtgacggctgttgcgatcttactaagctattgcaggagaaaagctcacttctttgcctagacctggggctaaatcacatcggcgttaaaggaatgaagtttctctgtgaagctctccggaagccattgtgcaatctccggtgtttgtggctgtgggggtgcagcattccacctttctcctgcgaggatctgtgcagcgctctgagctgtaatcagtccctagtgacgctggacctcggacagaaccccctggggagctccggagttaagatgcttttcgaaaccctcacatgtagttcagggacattgcggaccctgagactcaaaattgacgattttaacgatgaactcaataagttgctggaggaaatagaggaaaaaaacccacagttaatcattgacaccgagaaacatcatccctgggctgaacgaccgtcttctcacgactttatgatctag

SEQ ID NO: 25617 - DNA, 1899 bp, synthetic construct
  source 1..1899: mol_type = other DNA; note = Synthetic coding sequence
atggacaccatgatgctgaacgtgcggaacctgttcgagcagctggtgcgcagggtggagatcctgagtgaaggtaacgaagtgcagttcatacagctggctaaggacttcgaagacttccgaaagaaatggcagagaacggaccacgagttaggaaaatacaaggatttactaatgaaagcagaaacggaacggagcgcgctcgatgtgaaactcaaacacgcccggaatcaggtggacgtggagatcaagcggcgccagcgggctgaggctgactgcgagaaactcgaaaggcagatccaattgattcgcgagatgctgatgtgtgacacttcgggcagtatccagctcagcgaggaacaaaagagtgctctggctttcttaaaccgtggacagccctcgtcttccaatgcaggcaataagcggctctctacaattgatgagtccggcagcattttgtctgatatcagcttcgataagactgatgaatcactggattgggacagcagcctggtgaagactttcaagctcaagaagagggaaaagcggaggagcacttcccggcaattcgtggacgggccacccggtcccgtcaagaaaaccagatccattggctccgccgtggaccaaggaaatgaaagcattgtcgcaaaaactacagtcactgtgcctaatgatggtgggcccatcgaggcagtatccaccatagagacagtaccctattggaccaggtctcgacgaaaaactgggacattgcaaccatggaactccgactcaactctgaactccaggcagctcgaaccacgtaccgaaacggacagcgtgggcacccctcagtccaacggcggtatgaggcttcacgatttcgttagcaaaacagtgatcaaacccgagtcctgtgtgccatgcggtaagcgaatcaagttcgggaaactgagtcttaagtgccgagactgtagagtggtgagccaccctgagtgccgagatcgctgcccgttaccctgcatccctacattgatcgggactccagtgaagatcggcgaaggaatgctcgccgacttcgttagtcagacatccccgatgatcccatccattgtagtacattgcgtgaacgagatagaacagcgtggactcactgagaccggcctgtacaggatttccggctgcgatcgaacagtcaaggaactcaaggagaagttcctgcgggtcaaaactgtaccactgttatccaaagtggacgatatccacgccatttgctctttgctaaaggattttctccggaacctgaaagaacctctcctgacctttcgcctgaacagagcctttatggaggctgcagaaatcaccgacgaagacaattcaattgctgcgatgtatcaggcggtgggagagctgccacaggcaaatcgagatacgcttgcattcttgatgatccatttgcaacgcgtagctcagtccccacatacaaagatggatgtggcgaatctggcgaaggtttttgggccaacaatcgttgctcatgctgttccaaacccagaccccgtgaccatgctccaggacatcaagcgccaaccaaaggtcgttgagcgccttttaagcttgcccttagagtattggagtcaattcatgatggtcgagcaggaaaacatcgacccgcttcacgtaatcgaaaactccaatgccttttctactccccagactcctgatattaaagtgagtttgctcgggccagtgacaacacccgagcatcagctcctgaagaccccctccagctctagcttgagtcaacgcgtgcgatcgaccctgaccaagaacacgcctaggttcggtagcaaatcaaagagcgctacgaatctcgggcgacaggggaatttctttgcctctccgatgctaaaatag

SEQ ID NO: 25618 - DNA, 189 bp, synthetic construct
  source 1..189: mol_type = other DNA; note = Synthetic coding sequence
atgagcatcagcagcgacgaggtgaacttcctggtgtaccggtacttgcaagagtctggctttagccatagcgcattcacctttggtatcgagtcccatataagtcagtctaatattaatggagcgctcgtgccccctgctgcactgatttccatcatacaaaagggcctccaatacgtggaggcctag

SEQ ID NO: 25619 - DNA, 417 bp, synthetic construct
  source 1..417: mol_type = other DNA; note = Synthetic coding sequence
atggagcccagcgcccagcagctgcagctggccgccagcctgcccgcaaatctgtcaaatttctgtcagggctcagagatgcctaccacctctcgccctgcactggatgtaaagggcggcacatccccggctaaagaggatgctaaccaagagatgtcctccgtggcttatagcaacttggccgtaaaggacaggaaggccgtggctattctgcattaccccggagtggcctccaatggaactaaagcgtctggagcccccacttcaagtagcggctcgcctattgggagtccgacaacgaccccccctacaaaaccaccttcattcaatctgcacccagccccccatctcctagcgtcgatgcacctgcagaagctgaactctcagtatcaggggatggccgcagccacaccgtag

SEQ ID NO: 25620 - DNA, 1473 bp, synthetic construct
  source 1..1473: mol_type = other DNA; note = Synthetic coding sequence
atgaacggcgccctggaccacagcgaccagcccgaccccgacgccatcaaaatgttcgtgggccagattccccgctcttggtccgagaaagagcttaaggagctgttcgagccctatggcgccgtctaccaaataaatgtgctgcgggataggagccagaaccctcctcaaagtaaaggatgttgttttgtaacgttctataccaggaaagccgctcttgaggcgcagaacgcgttgcacaacattaagacccttccagggatgcaccatcctatccagatgaagcctgccgactccgagaaatcaaacgccgtggaagaccgaaaactttttatcggcatggtctcaaaaaaatgtaatgagaacgatatcagggtgatgttctcaccatttggacaaatagaggaatgtagaattttgaggggccctgacggccttagccgcgggtgtgctttcgtgactttctctacccgggctatggcacaaaacgctatcaaggcaatgcaccaatctcagactatggaaggctgctcctcgcctatagtcgtgaaattcgccgacacacagaaagacaaagaacaaaggcgcctacagcaacaactggcccagcaaatgcaacagctcaacacagcaacctgggggaacctcacgggactcggcgggttgactccccagtatctggctcttctgcaacaggctacgagcagcagcaacctcggggctttcagtggcatccagcagatggccggaatgaatgctctgcaactccagaacctggctactctggcggctgctgccgccgccgcccagaccagtgcaacaagcaccaatgccaatcctctctccaccactagctccgcattgggggctttgacaagtcccgtagcagcctctacaccaaacagcactgccggcgccgctatgaactctctcacatccctgggaactcttcagggtcttgccggagcaacagtaggcttaaataatatcaacgctctcgccgtggcacaaatgctgagcggcatggccgctctgaacggtgggctcggagcgacaggcctgacaaacggcacagcgggcacaatggatgcacttacacaggcttattccggcatccagcagtatgcagctgccgccctccccacactgtactcccagagcctgctccagcaacagagcgctgccggaagccaaaaagagggaccagagggcgccaatctatttatataccaccttccacaggaatttggcgaccaagacatcctgcagatgtttatgccttttggcaatgttatatctgccaaagtatttatcgataaacagactaatctctccaagtgctttggtttcgtcagttacgataatccggtgtccgcccaggccgctatccaggccatgaacggttttcaaatcggcatgaagcgtctaaaagttcagctgaagcggtctaaaaatgattcgaaaccgtactag

SEQ ID NO: 25621 - DNA, 357 bp, synthetic construct
  source 1..357: mol_type = other DNA; note = Synthetic coding sequence
atggccagcagcgcccgggagcacctgctgttcgtgcggcggcggaatccacagatgagatacacgctctccccggaaaacttgcagagcctggcagcgcaaagctcaatgcctgaaaatatgactttgcaaagagccaactcagacacagacctggtgacatccgagtctcggtcttccctcaccgccagtatgtacgaatacaccctcgggcaggcgcagaatctgatcatcttttgggatatcaaagaggaggtagatccatctgattggatcggtctttatcatatcgacgagaatagtccagccaacttctgggactccaagaatagaggcgtaaccggaacacaaaagtag

SEQ ID NO: 25622 - DNA, 1620 bp, synthetic construct
  source 1..1620: mol_type = other DNA; note = Synthetic coding sequence
atggccaccagcgcccccctgcggagcctggaggaggaggtgacctgctccatctgtttggattacttgcgggaccctgtcaccatagactgcggccacgttttttgccgatcctgcacgactgacgtgagacccatctctggctcacgacccgtttgccccctgtgcaaaaaaccatttaaaaaagaaaacattcgacctgtgtggcagttagccagtctcgtggaaaatatcgagcgcctcaaggtcgataaaggtcgccagcctggggaagtcacccgcgaacagcaggacgccaaactgtgcgagcggcaccgagagaaactgcattactattgcgaagatgacggcaaactgctttgcgttatgtgtcgcgaatctcgagagcatcgcccccacacggctgtactgatggaaaaagccgcccaaccccatcgagaaaaaatcctgaaccacctgtccacactgcgccgcgacagagacaagatacaagggttccaagccaagggcgaggccgacatcctcgctgcattgaaaaagctgcaggaccagaggcagtacatcgtagctgagtttgagcagggacatcagttccttagagagagggaggaacatctcctggaacagttagcaaaattggagcaggagctcacggaaggcagagaaaagttcaagtctcggggagttggagaacttgccagactagccctggtgatttccgagttggaggggaaggcccagcagcccgctgcagagctcatgcaggatacacgcgactttctgaatcgataccctaggaagaaattctgggtggggaaacctatcgccagagttgtgaagaagaagaccggggagttcagtgataaattgttaagcctccagcgggggttgcgggagttccagggtaagctcctgagagatctagaatataaaactgtctcggttactctggacccacagtctgcttccggctacttgcaactatccgaggactggaaatgcgtgacctacacatccctgtacaaaagcgcttacttgcacccccagcagtttgactgtgagcccggggtgctaggatcaaagggattcacgtggggaaaggtgtattgggaagtcgaagtggagcgagaggggtggagcgaggatgaggaggagggtgacgaagaggaggaaggcgaggaagaggaggaggaggaggaagcaggatacggggacggatacgatgattgggaaactgacgaggatgaggagtccctgggggacgaggaggaggaggaagaagaggaagaggaggaggtccttgagagctgcatggtcggagtggcacgcgacagcgtgaagcgcaagggagatctctcacttaggcccgaagatggagtctgggcactcaggctgagcagtagtgggatttgggctaacacctcacctgaagccgaactgttccccgcactaagacccaggcgtgtaggcatcgctctggattatgaaggaggcaccgtgacatttacgaacgctgagagccaggagttgatatatacttttaccgccacttttacgagaagactcgtaccattcctgtggctgaaatggccaggtacgcggcttttactgagaccctag

SEQ ID NO: 25623 - DNA, 270 bp, synthetic construct
  source 1..270: mol_type = other DNA; note = Synthetic coding sequence
atgagcgagcagggcgacctgaaccaggccatcgccgaggagggcggcaccgaacaggagaccgcaaccccagagaacggcatcgtgaagtccgagagtctggatgaggaggagaagctggagctgcaacgcagactggaggcccaaaatcaggagaggcgcaagtctaaatccggggccggaaaggggaagcttacgcgcagcttagccgtatgcgaagagtcttcagccaggcccggaggggaatctcttcaagatcagacactctag

SEQ ID NO: 25624 - DNA, 909 bp, synthetic construct
  source 1..909: mol_type = other DNA; note = Synthetic coding sequence
atggtgaccgagcaggaggtggacgccatcggccagaccctggtggatcccaagcagccactacaggctaggtttcgggcactgttcactctgagaggattaggtggccctggcgctatcgcatggatcagccaggccttcgacgatgactcagccctgcttaagcacgagctcgcctattgtctaggccaaatgcaggatgcacgggctatacctatgctggtagatgtacttcaggacacacgccaggaaccaatggtcaggcatgaagcaggcgaggcccttggcgccattggcgatcccgaggttctagagattttgaagcagtattcatcagatcccgtcatcgaagtggccgagacctgccagctggccgtcagacgattggaatggcttcagcaacacggcggcgaaccagccgctggtccgtacctgtcagtcgatccagcccccccagcggaagagagagacgttggccgtctgcgtgaagcgctcctggacgaaagccggcctctgttcgagaggtatcgtgccatgtttgctctgcgaaacgccggtggcgaggaagccgccctggccctggctgagggattacactgtggcagcgctttatttcggcatgaggttggctacgtgttaggccagttgcaacacgaggccgccgtcccacagcttgctgccgcgctggcccgctgcaccgagaatcctatggtgagacacgagtgtgctgaggcactcggcgccattgcacgcccggcttgtttggctgccctccaagctcacgccgatgatccagaacgggtcgtaagagaatcttgcgaggttgctcttgatatgtatgagcatgaaactggacgggcttttcaatatgccgacggattggagcaactgcggggggctcccagctag

SEQ ID NO: 25625 - DNA, 1521 bp, synthetic construct
  source 1..1521: mol_type = other DNA; note = Synthetic coding sequence
atgagcgtgctgagccccggcgacctgaagcccaagcggggcagccctcaccgcgggtccctggataggactgatgcatccacagatttggcgatgcggtcctggccaagcgagctcgggtcccgtacatgtagtacaagcgctacaacaaccgccccatctaactctacgcccattgcacggcaccctggacgtacgaaaggctacaacagcgatgataacctctgcgaaccttcgttagagtttgaagtccctaaccatcggcagtatgtttccagacctagctctttggaatcttcccggaacactagcagcaatagcagcccattgaacttgaagggttccagcgaacaactgcatgggcggtctgagtctttctcgtcagaagatttgatcccgagccgcgacctggcaacacttccgcgagaggcatcgactcctgggcgaaatgcactagggaggcatgagtaccccctgccgagaaacggaccactccctcaggagggagcgcaaaagcgcgggaccgccccaccctacgtcggtgtgcgcccttgctctgcctcaccatcatctgagatggttactcttgaggagttcctggaagaatcaaacagatctagcccgacccacgacacaccttcctgtagagatgatctgctgagcgattactttagaaaggcgtccgatcccccagcgattggcggacaacccggcccccctgctaaaaaggagggtgccaaaatgccaaccaactttgtggctcctaccgtcaagatggctgcgccaacctccgaagggcgcccattgaagccggggcaatatgttaaacccaacttcagattgaccgaggcagaggcccctccatcggtcgccccacggcaggcgcagccaccgcaaagcctcagtttaggcagacctcgccaggcaccagaggcactgggcggaagagaaaccgggtcacacacactgcaatcacccgctcctcccagctcccattcattagccagagagcgaaccccactagtcggcaaggccggatcatcctgtcaagggccagggccaaggtccagacccctggatacgcgcagattctccctggcccctccaaaagaagaaaggctcgcacccctgcatcagtccgcaacagcgccagccattgctacagctggcgccggagctgctgctgcgggatctggtagtaactcccagttgctccatttctctcccgctgccgcacctgccgctcggaccaaacccaaggcccctcccaggagcggggaggtggcaacaatcacccccgtcagagcgggactgtcactttctgagggagacggcgtgccaggacagggttgttctgaaggactccctgccaagagtccaggccggtccccagacttggcgccacacctggggagggcactcgaagattgctctcgggggtcggtcagcaagagcagtcccgcatccccagaacctgggggcgacccccagaccgtttggtacgagtacggttgtgtatag

SEQ ID NO: 25626 - DNA, 678 bp, synthetic construct
  source 1..678: mol_type = other DNA; note = Synthetic coding sequence
atggcccagaccgtgcccccctgcgagctgccctgcaaggagtacgacgtcgcccgtaacacgggtgcatacacatcgtctggactggctacggcttcatttaggacatctaaatacctcttggaggaatggttccagaattgttatgcaaggtatcaccaggcttttgctgaccgggaccagtccgagcggcaaaggcatgagagtcaacagctcgccaccgaaacccaggcgctggcccagagaactcagcaggactctacacggactgttggagaacgcctgcaagatactcacagttggaagagcgaattacaaagggagatggaggctttggcagctgagactaatctgttattagctcaaaaacagaggctggagcgcgccctggacgccacggaagtcccctttagcataacaaccgacaacctacagtgtcgggagcggagagagcatcctaatctggtccgggatcatgtggagactgaactcctgaaggccctccccccagcactgtctcagtgtttaaagaactcgtgtagcagcagaaaattaagcgccagaaacaaaggcacatgccagctcatggaaaccctaaccgttcacggcgaggccaatccaggcatagaaggacgtcgcacccgggccttggcccataaggaagtgccatctggctag

SEQ ID NO: 25627 - DNA, 309 bp, synthetic construct
  source 1..309: mol_type = other DNA; note = Synthetic coding sequence
atggccaacgacagccccgccaagagcctggtggacatcgacctgtcctccctcagagatcccgctgggattttcgagctggtagaagttgtggggaatgggacctacgggcaggtgtataaagggagacatgtgaagacaggccagcttgcagcgatcaaagtgatggacgtgacggaggatgaggaggaggagatcaaactggagatcaatatgctgaaaaagtacagtcaccacaggaatatcgccacatactacggggccttcatcaaaaagtcccctcctggacacgacgatcagctatggtag

SEQ ID NO: 25628 - DNA, 369 bp, synthetic construct
  source 1..369: mol_type = other DNA; note = Synthetic coding sequence
atggccaccagcgcccccctgcggagcctggaggaggaggtgacctgttctatttgtctagattacctgcgcgatccagttacaatagactgtgggcatgtcttttgccggtcttgcaccacagatgtaagaccgatctctggctcgagacctgtctgtcccttgtgtaagaaaccttttaagaaggagaacattagacccgtatggcagctggcgagcttagtggaaaacatcgagaggctgaaggtggataagggtcgccaaccgggcgaagtaacccgggaacagcaggatgccaagctgtgcgaacggcaccgcgaaaagttacattactattgtgaggatgacggtaaacttctgtgtgtttag

SEQ ID NO: 25629 - DNA, 312 bp, synthetic construct
  source 1..312: mol_type = other DNA; note = Synthetic coding sequence
atgagcggcggcctgctgaaggccctgcggagcgacagctacgtggaactatcccagtaccgagaccagcacttccgcggggataacgaggaacaggagaagctgctgaaaaaatcatacgccgagaatgctatgcgctacatcaatggaaccagactggatgacaggattatccgcaccgattgggacgccggttttaaggaaggacgacaatatgggcgcgggagatccggcgggcaagttagagacgagtacaggcaggattatgacgccggccgggggggctatggaaagctcgctcagaatcagtag

SEQ ID NO: 25630 - DNA, 894 bp, synthetic construct
  source 1..894: mol_type = other DNA; note = Synthetic coding sequence
atgtggcccttccccagccggagcctgttccccccccccacccaggcatggctccagaccgtttctagtgatcctgaagctcagggctggggcgcgtggaacgaaactaaggaaattctgggtcctgagggtggcgagggcaaggaggagaaggaagaggaggaggatgcagaagaagaccaggacggagacgcaggtttcctgctcagtctgcttgagcaggagaacctagctgagtgcccgctaccggatcaggaactggaagcaattaagatgaaggtttgtgcaatggagcaggctgaggggactcctcgccctcccggcgtgcagcagcaagcagaggaggaagaaggcaccgctgccggacaactgctctctccagagacggtgggctgtcctctttcaggtactcctgaagaaaaggttgaagccgaccaccggtcagtatacgtgggcaatctatgcctgcatcgcgtttgccatcaggggctgcgtgctggacgccggggcgctgggccggagcctctccctggtccaggccaccagggagccgctgagaaaaaccagttgccatgggaccagctgcatagaccaagaggccctagtaggactccccgtctgcaaggcgggacactgcccccgcagcggccccccgggcaagcgcccgcgcagacgactagagccgagcctggaccttggaaaatcctgactatggtattcaccgttctcaagggtcggccagactttgaacgaggggctggagcctggattagaagcaagcctcttgtcctgcatcccggagctggggcgggttcaggagcaggcgcccgtccggaggagaggggagtgcagagctcacactggccacctctgggaggcgggatggctcagtag

SEQ ID NO: 25631 - DNA, 1059 bp, synthetic construct
  source 1..1059: mol_type = other DNA; note = Synthetic coding sequence
atggacatcgacaaggacctggaggcccccctgtacctgacccccgaaggatggagcctgtttcttcagcgatattatcaagtggtgcacgagggcgccgagttgcgacacctggacacccaggttcagcggtgcgaggacattctgcaacaactgcaggccgtagttccccaaattgacatggagggggatcgcaatatctggatagtaaaacccggggctaagtccaggggcagaggcattatgtgtatggatcacctagaggagatgcttaagttggttaacggaaatcccgtggtgatgaaagacgggaaatgggtggtgcagaaatatatcgaaagacctctgctaattttcgggactaaatttgacctcagacaatggttcctggtgacagattggaacccgctgaccgtgtggttctacagggacagttacatacgtttttcgacccaacccttctctctcaagaatcttgacaactccgttcatctctgcaacaactccatccagaaacacttggagaacagctgccacaggcatccgctgctcccacccgacaacatgtggtctagtcagagatttcaggctcatctacaagaaatgggagcaccaaacgcgtggagcaccattattgttccgggcatgaaagatgccgttattcatgccctgcagacaagccaggacacagtgcaatgtcgcaaggcttccttcgagctatatggagctgatttcgtgttcggcgaagactttcagccatggctgattgaaattaacgcctcccccaccatggcaccaagtaccgcagtcaccgcacgactgtgcgcaggggtacaagcagacaccctccgcgtcgtcattgataggatgctagacagaaattgtgatacgggcgccttcgagctcatttataagcagccagttacaactagcccagcaagcacaccacgcccgagttgtctcctacctatgtacagcgacacacgcgcccgcagttctgatgattctacagcttcttggtgggccctgcggccgtgtcgaccccaggcacgtccctag

SEQ ID NO: 25632 - DNA, 363 bp, synthetic construct
  source 1..363: mol_type = other DNA; note = Synthetic coding sequence
atggagctggacctgttcctgggcctggacgacgtgttcccccggctgcttcatgggctgctgcatcgtgctttttccgtgtttctcttcaataccgagaataagctcctgttgcagcagcgaagtgacgcgaagattaccttccctggttgctttacaaacacttgctgcagccaccctctgtcaaatcccgcggaacttgaggaatcagatgctctgggagtgcgacgtgcggcccagcggagactgaaggccgagctcggtatcccactagaggaggtgacctccagccctactcagccttacaagctgaagcccaagcataccataaaaagattcctgatcaagttcctgaacagctag

SEQ ID NO: 25633 - DNA, 339 bp, synthetic construct
  source 1..339: mol_type = other DNA; note = Synthetic coding sequence
atggaggagatccccgcccaggaggccgccggcagcccccgggtgcagttccagtcactggagacacaaagtgagtgtctcagccccgagcctcaatttgtccaggacaccgacatggaacagggactgacgggcggctttcctatctctaaaccagacggcatctcacagttggaacaagacctccaagtgttcgacctcgaaacaaagactagggaggtcctgcgggacgattgtagcgacggcgaaactcgcgaggaaaacaaactgctgatcccgaaacagaaaatctccgaagaggtccacagctacaaggtgagggtgggtcggcttaaatag

SEQ ID NO: 25634 - DNA, 1818 bp, synthetic construct
  source 1..1818: mol_type = other DNA; note = Synthetic coding sequence
atgagcgagatcctgaagcagaaggacaccgagcccaccaacttcaaggtcgctgccggaacgcttgacgcctctaccaagatttacgccgttcgtgttgacgcagtgcacgcagacgtgtaccgcgtcctcgggggcctcggtaaggacgccccaagtctggaagaagtcgaggggcatgtagcagatggctcggcaaccgagatgggtacaacaaaaaaggccgtgaagcccaagaaaaagcacctacaccgcacaatcgagcagaatataaataacctcaatgtgtcggaggccgacagaaagtgcgaaattgatccaatgtttcagaaaaccgccgcgtctttcgatgagtgttcaaccgccggtgtgttcctgtctaccctccattgtcaggattaccgcagcgagctgttgtttccatcggatgtgcagactctttctactggtgagcctctcgaactgccagaactggggtgcgtcgagatgactgatctcaaggctcccttgcagcagtgcgccgaagacagacaaatctgtccttccctcgcaggatttcaatttacccagtgggactccgagactcataacgagtcagtgtcagcgctcgtggataagtttaagaaaaacgatcaggtgtttgatataaatgccgaagtcgatgagtcagattgtggggatttccccgacggctcactcggtgatgactttgacgccaacgacgagccagatcacacggcagtgggcgatcacgaagagttccgtagctggaaagaaccatgtcaggtacaatcatgtcaggaagagatgatctcgctcggtgatggagacatccgcacaatgtgcccgctactgtccatgaaaccaggggaatatagctactttagtcctaggacaatgtccatgtgggcgggacccgatcattggcggttcagaccacgtaggaaacaggacgccccatctcaatcagagaacaagaaaaagtcaaccaagaaagatttcgaaattgatttcgaggatgatatcgattttgatgtgtatttccgtaagactaaagcggccactatccttacaaagtctacgctcgaaaatcagaattggagagccactactctgcccacagatttcaattacaatgtggacactctcgtgcagctccacctcaagccagggacccgtctacttaaaatggctcaagggcatagggtagaaaccgagcactacgaggaaatcgaggactatgactataacaatcccaacgacacctccaatttttgtcccggcctgcaggctgcagacagtgatgacgaagacctagacgacctattcgtgggccccgtgggtaactccgatttgagtccctacccatgtcacccccccaaaacagcccagcagaacggcgatacaccagaagcccagggattggacatcaccacctacggggaaagtaatctggtggccgagccacagaaggtgaacaagatcgaaatccattatgcaaagacagctaaaaaaatggacatgaaaaagctgaagcaatcgatgtggtctctgttgacggctctctcagggaaagaagccgatgctgaagccaatcacagagaagccggcaaagaggcggctctcgccgaggtcgccgacgagaaaatgctcagtggactcacaaaagacctgcagcgaagcctgccaccagtgatggcccagaacctgtccattccattagcctttgcatgtctcctgcatctcgctaacgagaagaaccttaagcttgagggaaccgaagacctgagtgacgtgttagtcagacagggcgactag

SEQ ID NO: 25635 - DNA, 2253 bp, synthetic construct
  source 1..2253: mol_type = other DNA; note = Synthetic coding sequence
atgagcagcagccccgtgaacgtgaagaagctgaaggtgagcgagctgaaggaagaactgaagaaacgcagactctccgataaggggctgaaggccgagcttatggaaaggctgcaggctgctctggacgatgaggaggcgggaggacgccctgcaatggagccggggaatggggacgaccagggatttcaagagggagaggatgaactgggcgacgaggaggaaggggcaggcgacgaaaatgggcacggcgagcagcagcctcagcctcctgccacccagcagcagcagccccagcagcagcgcggggccgccaaagaagctgccggcaagagcagcggcccgacatcgctgttcgccgttaccgtcgcccccccaggggcccgccagggccagcagcaagctgggggaaagaagaaagccgaaggcggcggcggcgggggaagaccgggcgctcctgccgccggggatggcaagaccgagcagaagggtggagataaaaaacggggggtaaagcgccccagagaagaccatggtcgcgggtatttcgagtacatcgaagaaaacaagtactcccgagcaaaaagcccacagcctcctgtggaggaggaggacgaacatttcgacgacactgtcgtgtgccttgatacttataattgcgacttgcactttaaaatcagtcgcgacagactgagtgcgtcctcgctgacaatggagagcttcgccttcctgtgggcggggggcagggccagctacggtgtgagtaaaggcaaggtttgtttcgaaatgaaagtcacagagaagattcccgttcgccatttgtacaccaaagacattgatatccacgaagtacgtataggctggtccttgaccaccagcggtatgcttcttggtgaggaagaattcagttacgggtactctcttaagggcattaaaacatgtaattgcgagaccgaagattatggggagaaattcgacgaaaacgacgttattacctgctttgctaacttcgagagtgatgaggttgagctttcatatgctaagaatggccaagatctcggtgtggcattcaaaataagcaaagaggtcctggccggtaggccgctgttcccccacgtcttgtgccacaactgcgccgtggagtttaattttggccaaaaagagaaaccatacttcccgatacctgaagaatataccttcattcagaacgttcctctcgaagaccgcgtccggggcccaaagggaccggaggagaagaaggattgcgaagtcgtgatgatgattggtctgccgggcgcagggaagactacatgggtaaccaaacacgccgcggagaacccgggcaaatataatatcctggggacaaatacaatcatggacaaaatgatggtggctggttttaagaagcaaatggcagacacggggaagctgaatacattgctgcagcgagctcctcaatgtctcggtaagtttattgaaattgctgcacggaagaagaggaatttcattctggaccagactaatgtgtctgctgccgcccagcggagaaagatgtgcctgttcgccgggtttcaacggaaagctgtggtcgtctgcccaaaagacgaagattataaacagcggactcagaagaaggctgaagtcgaaggcaaggacttaccagaacacgccgtgctcaagatgaagggaaacttcacgcttcctgaagtggccgagtgtttcgatgaaattacgtacgtcgagctgcagaaagaagaagctcagaaactgctggaacagtacaaagaggaatcaaagaaagcactccccccagaaaaaaaacagaacacagggtctaagaagtccaataagaataagtccggcaagaatcaatttaacagaggcgggggccataggggccgcggggggtttaatatgcggggtggaaatttccggggtggcgcacctggtaatagaggagggtataacaggagaggcaatatgccccagcggggtggtgggggcggaggcagcggcggaataggttatccctacccgcgggcacccgtgttccccggtcgtggctcgtactccaataggggcaactacaatcgtggagggatgccgaacagggggaactacaaccaaaatttcaggggacggggcaacaaccgcgggtacaagaatcaaagtcaggggtataaccagtggcagcagggtcagttttggggacagaagccttggtcccagcactatcaccaaggctattactag

SEQ ID NO: 25636 - DNA, 804 bp, synthetic construct
  source 1..804: mol_type = other DNA; note = Synthetic coding sequence
atgtgggaccagcggctggtgaagctggccctgctgcagcacctgcgggcattttatggtatcaaggtgaagggcgtgaggggacagtgcgatcggcgcaggcatgagaccgcagccacagaaattgggggcaagatcttcggtgtgccattcaatgccttgccccacagcgctgtccctgagtatggccacatcccttcctttttagtcgatgcttgcacaagcttggaagagcacatccacactgaaggtctgttcagaaagagcgggagcgttatcaggttgaaagccctcaagaataaggtcgaccatggcgaggggtgccttagctcagcaccaccctgtgatatcgctggactgctgaagcaattttttcgcgagttgccagagcctatcctgcctgcagacctgcatgaagcactacttaaggcccagcagctgggaacagaagaaaagaataaggccattttgctgctctcctgcctcctggccgaccacaccgtccacgtgttgagatacttttttaatttcctccggaatgtgtccttgaggagtagtgaaaataagatggactctagcaatctggctgtgatctttgctcctaacttactccaaaccagcgaaggccatgaaaagatgagtagtaatgccgagaaaaagggtgtgtaccagaccctatcttggaagagatatcagccatgttgggtcctgatggtgagtgtgttgttgcaccattggaaagccctgaagaaggtgaatatgaagctcttggtgaacatcagagagcgcgaagataatgtgtag

SEQ ID NO: 25637 - DNA, 600 bp, synthetic construct
  source 1..600: mol_type = other DNA; note = Synthetic coding sequence
atgccccacaagatcggcttcgtggtggtgagcagcagcggccacgaagacgggttttcggctagggaactgatgatccacgccccaacggtatccggctggcgctcaccttcatacgtttcactatgcgataacgaaaaaactggctgcaaggctagagagctgaaatctgtttacgtggacgcagtcgggcagttcctgaagcttatatttcatcagaatcacgtaaataaatacaatatttataaccaggtcgccttagtggcaattaacattattggcgaccctgctgacttctccgacgaatccaacacggcatctcgcgaaaagctcatcgatcattatctaggtcataattcagaagatccagccctggaaggaacctatgcgagaaagtctgattacataagtccactggacgacctggcctttgatatgtaccaggatccagaagtggcccagatcataaggaagctcgacgaaagaaaacgtgaggctgtgcagaaggagcggtatgactacgccaagaaattgaagcaagccattgccgatttgcagaaggtgggcgaacgcctggggagatacgaggtagagaagtag

SEQ ID NO: 25638 - DNA, 471 bp, synthetic construct
  source 1..471: mol_type = other DNA; note = Synthetic coding sequence
atgaccgaggacagccagcggaacttccggagcgtgtactacgagaaggtaggcttccgcggcgtggaagaaaaaaagagtcttgagatcctgttaaaggacgaccggttagataccgagaagctttgcaccttttcccagaggttcccccttcccagcatgtaccgcgctctggtgtggaaagtgctgttgggcattctacctcctcatcacgagtctcacgcaaaggtcatgatgtatagaaaggagcaatatttggacgtccttcatgctctgaaggtggtgagatttgtgagcgacgctactcctcaggctgaagtctaccttcgaatgtaccagctggaaagcgggaaactgcctcggtccccctccttccccctcgagcccgacgacgaggtgtttttggcaatcgctaaagctatggaagagatggtggaagactccgtcgattgctactggatcacacgttag

SEQ ID NO: 25639 - DNA, 2730 bp, synthetic construct
  source 1..2730: mol_type = other DNA; note = Synthetic coding sequence
atgatccggcacgccggcgcccccgcccggggcgaccccaccggcccagtgcccgtagtggggaaaggggaagaggaggaggaagaagatggtatgcgtctgtgcctgcctgctaaccctaagaactgcctgccccacagacggggcatcagcatactggaaaaacttatcaaaacctgcccagtgtggctgcagttgtccctgggtcaagccgaggttgcccgtatcctgcaccgggttgtggcggggatgttcctcgtgcggagggattcctctagcaaacagctggtgctgtgcgtgcactttcctagcctgaatgagtcttctgcagaggtgctcgagtatactattaaagaagagaagagcatcctatatctggagggctccgccctcgtcttcgaagacatcttcaggctgatcgcattctactgcgtgagtcgggatctcctgccattcacactgcggctaccccaggccattctggaagccagcagcttcactgatctggaaacaatcgctaaccttggattgggattctgggatagtagcctcaaccccccacaagaaagaggcaaacccgctgaacctcctagagaccgcgctcccggattccctctcgtgtcgagtctgaggcccactgcccacgacgctaattgtgcatgcgagatagagctatctgtgggtaatgatagactctggttcgtgaatccgatcttcattgaagactgttccagcgcactgccaacagaccaaccccccctgggaaattgccctgccagacccctcccgcctacgtccgatgctacaagccccacctctaggtgggcccctagacgacctcccccaccaccgccagtgctaccattgcagccctgtagcccagcacagccacctccgcttcctgctaaaaagaatctacccaccgctccgcccaggcgacgcgtatctgaacgggtttcacttgaggaccagtccccagggatggcagcagagggggaccaattatcacttcccccccagggaacatctgacggcccagaggatacgcccagagaatctaccgaacagggccaggatactgaggtcaaggctagcgatcctcactctatgcccgagctgccccgtacagctaagcagcccccagttcctcccccccgcaaaaagaggatttctcgccagttagcttctacactccccgccccacttgagaatgctgaactctgtacacaggccatggcgctagagacccccacacctggccctcctagggaaggtcaatctccggccagccaggccggcacccaacatcctcctgcacaagccacagctcatagtcagtccagtccagagttcaagggtagtctggcctccctatccgactctctgggagtctcagtcatggcgaccgatcaggattcctacagtaccagtagtacagaagaggagctggaacagtttagttcaccttctgtaaagaagaaaccttccatgatcctgggtaaggccagacatcgcctgagctttgccagcttttcgtccatgttccacgccttcctatccaacaaccgcaaactttacaagaaggtcgtcgaactcgcccaggataaggggagctatttcggatctctggtgcaggactacaaagtatatagcctggagatgatggcccgtcagaccagctccaccgagatgctccaagaaatacgtaccatgatgacacagctaaaatcttatttgctccaatcgactgaactcaaagctcttgtggatccagccctgcatagcgaggaggagctcgaggcgattgtggagtccgcactctataagtgcgttctcaagccattaaaggaagcaatcaactcttgcctccatcagatccattcgaaagatggttccctgcaacagctaaaagaaaaccaactagttattctggccactacaactacagatctgggagtgactacctctgtgcccgaggtgccaatgatggagaaaatacttcaaaaattcactagcatgcataaagcttactcccctgaaaaaaagattagcattctgttaaaaacgtgtaaattgatatacgactccatggcgctgggcaatcctggcaagccgtacggcgcagatgatttcctgccggtgctgatgtatgtgctggcccgctccaacttaacagaaatgctcctgaatgtggaatacatgatggaactaatggaccccgccctgcagctgggagaagggtcttattatcttactactacatacggcgcactggaacacatcaagagttatgacaagatcaccgtgactagacaattatccgtggaggttcaggactcaattcaccgctgggagaggagaagaaccctgaataaggctcgggcgagccgctccagtgtccaggattttatctgcgtgagttacttggagcctgaacagcaggccaggacgctagccagccgcgctgacactcaggctcaagcgttgtgtgcccagtgcgccgagaagtttgctgtggagcgcccccaggcccatagactgtttgtccttgtggacgggaggtgctttcaactcgctgacgatgctctgccgcactgcattaaaggctatctgctcaggtccgagccgaaaagagacttccacttcgtttataggcccttggatggtggaggaggagggggcggagggagccccccatgcctcgtggttagggagcccaatttcctctag

SEQ ID NO: 25640 - DNA, 1728 bp, synthetic construct
  source 1..1728: mol_type = other DNA; note = Synthetic coding sequence
atgagcagcgacgaggagaagtacagcctgcccgtggtgcagaacgattcgtcccgagggtcgtcagtgtcctcaaacttgcaggaggagtatgaagagttgttgcattatgcaatcgtcaccccgaacatcgaaccatgtgccagccagtcaagtcaccccaaaggagaactggtgccagacgtgcgaatctcgacaattcatgacattcttcatagccagggtaataatagcgaggttcgcgagaccgcaatcgaggtaggcaaggggtgcgacttccacatttccagccactccaaaacagacgagtcctccccggtactttctccgcgtaagccctcacatcccgtgatggacttcttcagctcccacctattggccgattcctcctcccctgctaccaatagttcacacacagacgcgcatgaaattctggtgagcgactttctcgtttcagatgagaatctgcagaagatggagaacgtgcttgacctgtggtcctccggtcttaaaacgaatatcatttcagagctgagcaagtggagattgaatttcatcgactggcataggatggaaatgaggaaggaaaaagaaaagcacgccgcccatcttaagcagctgtgtaaccagattaatgaactgaaggaacttcagaaaacattcgagatcagcatcggcagaaaagacgaggttatctcttcattatctcatgctattggtaaacagaaagagaagattgagctgatgcgaaccttcttccactggcgcatcgggcacgtccgggcccgccaagatgtttatgaggggaagctggccgaccaatactatcagcggaccctgctgaagaaggtgtggaaagtttggagaagcgtggtccagaagcagtggaaggacgttgtcgagcgggcgtgccaagcgcgtgctgaagaagtgtgcatccagatcagcaacgactacgaggcgaaagtggcaatgctgagcggagctctggaaaatgccaaggctgagatacagcgcatgcagcacgagaaggagcatttcgaagactccatgaaaaaggcattcatgagaggggtgtgcgccttaaacctggaagctatgactatattccaaaacaggaatgatgccggaattgatagcactaataacaagaaggaggaatacgggccaggagttcaaggcaaggaacattctgctcatcttgatccatccgccccccccatgcctctgcccgtgacatcccccctgctccctagccctccagccgctgtagggggcgcctctgccacagccgtacctagtgccgcaagtatgacgagcaccagagcagcctctgcgtcttccgtgcacgtgccagtaagcgccctgggagcgggctcagcggccacagccgctagtgaagagatgtatgtccctcgagtggtgacatccgcccagcagaaggccggaagaacaataactgcaagaatcacagggagatgtgacttcgcttcaaagaacaggataagctcctccctcgccatcatgggagtgtcaccccccatgagctcagtggttgtagaaaaacatcaccccgtcaccgtacagactattccccaggccacagcagccaaatacccgaggacaatacatcccgaatcaagcacctctgcctctcggtccctcggaacccgatcagcgcatacccagtcgctcaccagtgttcactcaatcaaggttgtagactag

SEQ ID NO: 25641 - DNA, 2091 bp, synthetic construct
  source 1..2091: mol_type = other DNA; note = Synthetic coding sequence
atggccaactaccggaacaccagcgagatccccctggtgctggtgggcacccaagatgccatcagtagcgcaaaccccagagtgatcgacgatgcccgagctcgaaagctctccaatgatcttaagcgctgcacctattacgaaacgtgcgccacctatggtctcaatgtcgagcgcgtgttccaagatgtggctcagaaaatcgtggcaacccgtaaaaagcagcaactgtccatcggcccctgtaagtctcttccaaatagtccttctcacagctccgtctgtagcgcacaggtatccgccgtacatatttcccagacatcaaatggaggcggcagcttaagcgattacagctcttcggtcccgagcacaccctccacttcgcagaaagaacttagaatcgatgtgccccccacagccaacaccccaacacctgttaggaagcagagtaagagaaggtcaaatctcttcacgagccgcaaaggctcggatcctgacaaagagaaaaaaggccttgagagtcgggcagatagcattgggtccggcagagctattccgatcaagcaggggatgctactgaaaaggtctgggaagagcttgaataaggagtggaagaaaaaatatgtgaccctctgtgacaacggggtcctgacctaccatccatcacttcatgattacatgcaaaacgtgcacgggaaggagattgatttgctgcgaaccacagtgaaagtgccaggcaagaggccaccccgtgctacatcagcctgcgcccccattagctcaccaaagactaacggacttagtaaggatatgagtagtctccacatttctcctaattcgggcaacgtaacaagcgcatctgggtcacaaatggcatcggggataagcctggtctcttttaacagtcgcccagatggcatgcatcagcgatcttattctgtttcatctgccgatcagtggtctgaagccaccgttattgccaacagtgctatctctagtgacacaggcttaggtgactcagtttgttcaagtccatccatttcaagcacaaccagtcccaagctcgaccccccaccttccccccatgcaaatcgcaagaagcacaggcggaagaagagcaccagcaacttcaaagccgatggattgagtggcacggctgaagagcaggaggagaactttgagttcattattgtatcgctcacaggccagacctggcacttcgaggcaacaacctatgaagagcgtgatgcctgggtgcaggcgatcgaaagccagatcttggcatcgcttcaatcttgcgaatcaagcaagaacaaatcgcgcctcacttcccaaagtgaagccatggccttgcagtctataaggaacatgcgagggaatagccactgcgtggattgcgaaacacagaatccaaactgggcctcactcaacttaggcgcactaatgtgcatcgagtgcagcggcattcatcgaaacctcggaacccatttgagccgggtgaggtctctggatctggacgattggccagttgagctgattaaggtgatgagctctatcggcaatgagctggcaaatagcgtctgggaagagtcatcacaaggcagaacgaagccctccgttgattctactagggaagaaaaggagagatggatcagggcaaagtatgaacagaaactgtttctcgccccactgccttgcactgagctgtcccttggtcaacacctgctgagagccactgctgacgaagatcttagaaccgctatactgttgctggcccacgggtcgagggacgaggtgaacgaaacctgcggtgagggggacggtcggaccgccctgcatttggcctgcaggaagggaaacgtggttctagctcagctcctcatttggtatggggtagatgtgacagcacgcgacgcacatggaaacactgccctggcctacgcaagacaggccagcagccaggaatgcattgacgtactgttgcagtacggctgccccgacgaacggttcgtgcttatggcaaccccaaatctgtccagacggaacaataaccgcaataacagctctggtcgggtgcctacgatcatctag

SEQ ID NO: 25642 - DNA, 270 bp, synthetic construct
  source 1..270: mol_type = other DNA; note = Synthetic coding sequence
atgagcgagcagggcgacctgaaccaggccatcgccgaggagggcggcaccgaacaggagactgcaactccggagaacgggattgtgaagtctgagagtctggatgaggaggagaagctcgaactgcagaggcggcttgaggcccaaaatcaggagcgccgcaaatctaaaagcggagccggaaaagggaaacttacgcgctctctcgccgtgtgcgaggaatcctcagctcgccctggcggagaatccttgcaggatcagacactatag

SEQ ID NO: 25643 - DNA, 1785 bp, synthetic construct
  source 1..1785: mol_type = other DNA; note = Synthetic coding sequence
atgaccgacacccggcggcgggtgaaggtgtacaccctgaacgaggataggcagtgggatgatcggggtaccggccacgtgagtagtggatatgtcgagaggctcaagggcatgtctctgctggtccgggccgagagtgatggttctcttctgttagagagcaaaattaaccctaatacagcataccagaagcagcaggaagatgagaaattcctgacggatttgttcgcccagctgacagatgaagcaaccgacgaagagaaaagacaggaactcgtcaacttcttgaaggagttctgtgcattctcacagacactccagccccagaatcgcgacgcctttttcaagacattgtctaatatgggaatattgcccgctctggaagtgatcttaggaatggacgatacgcaggtcagatctgctgctacagacatcttttcttacctggtcgagtacaacccatctatggtgagggaatttgtgatgcaagaggcccagcagaatgacgacgtgtcgaagaaacttaccgagcagaagatcaccagcaaagacattttgctaataaatttgattatcgaacacatgatctgcgacactgatcctgaacttgggggcgcagttcagctcatgggccttctgcggaccctcgtggacccggagaacatgctggctactgcgaataagacagaaaaaactgagttcctaggcttcttctacaaacactgcatgcatgtcctcacagctccactcctggcgaatactaccgaggacaagccgtctaaggatgactttcagactgcccagctgctggctctggtcttggaactgttgactttttgcgtggaacaccacacttaccatatcaagaactatattattaacaaagacatattgcggcgggtgctggtcctcatggcctccaagcacgcctttctggctctgtgtgcgctccggttcaaacggaaaatcattgggctgaaagatgaattttataatcggtatattatgaaaagttttctttttgaaccggttgttaaagctttcctcaacaacggatcccgatataatctgatgaactctgctattatagaaatgttcgagtttatcagggtagaagacatcaagtctctcaccgcacacgtcatcgaaaactactggaaggcgctggaggatgttgattatgttcagacatttaaaggactaaagctccgttttgagcagcagagagagcgccaggataacccaaagctggactccatgagatctatcctgcggaatcatcggtataggcgggatgctcgtacactggaagatgaggaggagatgtggttcaacaccgacgaggacgatatggaggacggcgaggccgtggtaagtccaagtgacaagacaaagaatgatgacgatatcatggatcccatcagtaaattcatggagcgcaagaaattaaaagaatcagaggaaaaggaggttctcctgaaaacaaatttgtctggaaggcagagtcccagcttcaagttgtctctgtctagcggcacaaagaccaatctcacctcacagagttcgactacgaatctacctggatcccctggctccccaggtagtccggggagtcctggttcaccgggatcagtgcccaaaaacacaagtcagactgctgccatcacaactaagggtggtctcgtgggtctggtggattaccctgatgatgacgaggacgatgatgaggatgaggataaagaggacacgcttcctctgtcgaaaaaggctaaatttgattcttag

SEQ ID NO: 25644 - DNA, 522 bp, synthetic construct
  source 1..522: mol_type = other DNA; note = Synthetic coding sequence
atgttcaccgagggcgaggagatgtacctgcagggcagcaccgtgtggcatcctgattgcaagcagagtacaaagaccgaggaaaagcttagacccaccagaacatctagtgagtctatctacagccgtccagggtctagcatacccggctcccctggccatacgatctacgccaaggttgacaatgaaatcctggattataaggacctggccgcaataccgaaagtcaaggctatatacgatattgagcggccagatctgattacctacgagcctttttacaccagcggctatgatgataaacaggaaagacaatcgctgggggaatctcccagaaccctgtcaccaaccccgagcgccgaagggtaccaagacgtgagagacagaatgattcatcgcagtacaagtcagggcagtatcaacagtccggtctactcaaggcacagttacacacccacaacaagtcgttctcctcaacattttcatcgtccggatcagggtattaatatttacagaaaatag

SEQ ID NO: 25645 - DNA, 1620 bp, synthetic construct
  source 1..1620: mol_type = other DNA; note = Synthetic coding sequence
atggccaccagcgcccccctgcggagcctggaggaggaggtgacctgttcaatctgcctagattatctccgggacccagtcacgattgactgcggtcacgtgttctgtcgttcctgtactaccgatgtgcgtcccataagcggatcgagacccgtgtgtccgctatgcaaaaaacctttcaagaaagaaaatatcaggcccgtgtggcagcttgcatcactggtagagaacatagaacgccttaaggttgacaagggacggcaacccggagaagtgacacgcgagcagcaggacgcaaaactctgcgagcgccatagagagaagctgcattattattgtgaggatgacggcaaactgctgtgcgtaatgtgcagggagagccgggagcatcgcccccatactgccgtgcttatggagaaggctgctcaaccgcaccgggagaagattttaaaccacctgtccacgctaagaagagaccgggacaagatccaaggttttcaggccaaaggagaggctgacatcctggctgccctcaaaaagctccaggaccagcggcagtatatcgtagcggagttcgaacagggccatcagttcctcagggaaagggaggagcatttgttggaacaattagctaagttggaacaggagctcacagaggggcgcgagaagttcaagagccgtggagtgggcgaattagcccgccttgccctggtgattagcgagctcgagggaaaggcgcaacaaccagcagccgagctgatgcaggacactagggattttctgaacagatacccaaggaaaaaattttgggttggtaagccaatagcgcgggtggtcaagaaaaagaccggtgaattctccgataaactgttatctttacagagagggcttcgggaattccaaggaaaactccttagagacttggagtacaaaacggtgagcgtcactctcgacccacaatcagccagtgggtatctgcagctcagcgaggactggaagtgtgtgacctataccagcctctataagagtgcttatctgcacccccagcagttcgactgtgagcccggggtcttaggtagtaagggtttcacatggggcaaggtgtactgggaggtggaggtggaaagagaggggtggagtgaagatgaagaagagggggacgaggaggaggaaggcgaagaagaggaggaggaggaagaggccgggtatggggacggctatgacgattgggagaccgacgaagacgaagagagcctcggcgacgaggaggaggaagaagaggaagaggaggaggaagtcctggagtcatgtatggttggcgttgcgcgcgacagcgtgaagaggaagggagatctgagcctcaggcctgaggatggcgtttgggctcttagactgtcctccagtgggatttgggcaaatactagcccagaggccgagctcttcccggccctgagaccacgaagagttgggatcgcacttgactatgaaggaggaaccgtcacttttactaatgccgaatcccaggagctgatttatacttttaccgctacattcactaggcggctggtacccttcctgtggctgaaatggcccggcactaggttactgttgcgaccttag

SEQ ID NO: 25646 - DNA, 2112 bp, synthetic construct
  source 1..2112: mol_type = other DNA; note = Synthetic coding sequence
atgttccggtacgagagcctggaggactgccccctggacgaggacgaggacgcttttcaagggcttggcgaagaagacgaggagatagaccagttcaatgacgacaccttcggttctggggctgtagatgacgactggcaggaggctcatgagagactggccgagctggaagagaagctcccagtagcggtcaacgaacaaaccgggaatggggaaagagacgaaatggacttgctcggagatcacgaggaaaacctcgccgagagactttcaaagatggtgatagaaaatgaactcgaagatcctgcaatcatgcgggcggttcaaactcgacctgtgctgcagccacaaccaggtagcctgaattcaagtatctgggatggatccgaggttcttcgacggattaggggccctctactggcacaggaaatgccgacagtgtccgtgctggaatatgctctgcctcagaggcctccccagggacctgaggacgacagagatctgagcgagcgagctctgccccgacgaagcacctctccaataatcgggtcgccaccggtgcgggcagtacccattgggactccacctaaacagatggccgttccttcatttactcagcagatcttatgcccgaagcccgttcacgtccgaccacccatgcctccaagataccctgcaccgtacggagagcggatgtcaccaaatcagctgtgtagcgtgcccctgcagccaggacggatgtccccgtcacaatttgcgcgcgtccctgggtttgtggggagtccgctcgccgcaatgaacccaaaactgctgcagggaagagtaggacaaatgctgccccctgcccccggcttccgcgcattcttttccgcaccgccatcagctacaccccctcctcaacagcaccccccaggccctggcccacacctgcagaacctgagatcccaggcccccatgttccgccccgataccacccacctgcatccacagcaccgaaggctcctccaccagaggcagcagcagaataggtcacaacaccggaacctgaacggggcgggtgatcgtggaagccaccggtcatcgcatcaggaccacctgcgaaaagacccctacgccaacctcatgctgcagagggaaaaggattgggtctccaaaattcagatgatgcaactccagagcaccgatccttatctggatgacttttactatcagaactatttcgaaaaactggagaaactgtccgcggctgaggaaatccaaggcgatggaccaaaaaaagaacgcaccaaacttatcaccccccaggtggccaaattagaacatgcgtacaaaccagtacagttcgaaggatctctgggcaagctgactgtctctagcgttaataatccaagaaagatgattgacgctgttgtgacatcgcgatcggaggacgacgagactaaggagaaacaggttcgtgacaagcgccgaaagaccctcgtcattattgagaagacatatagtctgctactggacgttgaagattatgagaggcgctacctgctgagcttggaggaggagagacctgccttgatggatgatcggaaacataaaatttgcagtatgtacgataaccttagaggcaagctccccgggcaagaaagaccctccgacgaccactttgtccaaataatgtgtatcaggaaggggaaaaggatggttgccaggattctgccatttctctccactgagcaggccgctgacatactcatgaccacggccaggaatctgccattcctgatcaagaaagacgcacaggacgaagtgctcccttgtctcctttcaccttttagtttgctcctgtatcacctaccatctgtgagtatcacctcactgctcagacagcttatgaacctgcccagctccgatcccgcaaccgaaagtacacagaacaatcagtggaccgaagtgatgttcatggctacaagggaactgctgaggatcccccaagctgctctggctaaacctatatcaattcctacaaacttggtatctctcttcagccgctatgttgacaggcagaagctcaatctgcttgaaacgaagttgcagctggtgcaaggcatccggtag

SEQ ID NO: 25647 - DNA, 957 bp, synthetic construct
  source 1..957: mol_type = other DNA; note = Synthetic coding sequence
atgagcgcccacaaccggggcaccgagctggacctgagctggatctcgaaaatccaggttaaccatcccgccgtccttagacgggctgagcagattcaagcacgtcgcaccgtgaaaaaggaatggcaagccgcatggctcttgaaagccgttactttcatcgacctaaccacgctgtcaggcgatgacacaagttctaatatccagagactatgttacaaagccaagtaccctatccgggaagaccttttaaaggctcttaacatgcacgataagggtatcaccaccgctgccgtttgcgtctatcctgcaagagtgtgtgatgctgttaaagcccttaaagcagccggatgtaatataccagtggcttcagtcgctgctggcttccctgctggacagactcacctgaagactcgtttagaggaaatccgactcgccgtagaggatggagctactgagatcgacgttgtcatcaaccgctcactggtgctgacagggcagtgggaggccttgtacgatgagatcaggcaattcaggaaagcatgtggggaggcccacctcaagacaattctggctaccggggagcttgggacgttgactaacgtgtataaggctagcatgatcgcaatgatggccggctcagattttataaagacgagcaccggcaaggaaacggtgaatgcaacttttcctgttgctatcgtgatgttgcgtgccattcgtgattttttctggaagactggaaataagatcggctttaaacctgcgggaggcattaggagcgctaaagattctttggcctggttatccttagtgaaagaagagctgggagacgagtggttgaaaccagaactcttcagaattggggcgtccaccctgctgagcgacatagagcgtcagatttaccatcatgtgaccgggcgatacgccgcttaccacgatctccccatgtcgtag

SEQ ID NO: 25648 - DNA, 1188 bp, synthetic construct
  source 1..1188: mol_type = other DNA; note = Synthetic coding sequence
atggccagcgccgccagcgtgaccagcctggccgacgaggtgaactgtcctatttgccagggcacattgagggagcccgttaccatcgactgtggacacaacttctgtagagcctgtcttacacggtactgtgaaatcccaggtcctgacctggaggagtctcctacctgtcctctctgtaaagagccattcagaccggggtcatttaggcctaattggcaattggccaacgttgtcgagaacattgaaagacttcagctggtgtcaacccttgggctcggggaagaagatgtttgccaggagcacggggaaaagatttacttcttttgcgaggacgacgagatgcagctatgtgtggtgtgtagagaagctggggaacacgctactcatacgatgagattcctggaagacgctgccgccccttaccgtgagcagattcataaatgtttaaagtgccttcgcaaagaacgtgaagagattcaggagatacaaagtagagaaaacaagaggatgcaggtcctcctgacacaggtatccacgaaacgccaacaggtcatctccgagtttgcccatttgagaaaattcctggaagaacagcagtcaatccttcttgcccagctggaaagtcaggacggagatatactccgtcaacgagatgagtttgacttgctggtggccggggaaatttgtcgtttcagcgcgttaatcgaggagctggaggagaagaatgagcggcccgccagagagctgttgaccgacataagatcaacactaatccgttgcgaaactaggaagtgccgcaaacctgtggccgtctcaccggaactgggtcaaaggataagagatttcccccaacaggctctcccactccagagggaaatgaagatgttcctcgagaaactgtgtttcgagctggattatgagccagcacacatatctctcgacccccagacctctcatcctaaacttttgctcagcgaagatcaccagcgtgcccagtttagttacaaatggcagaatagtccggacaatccgcagcggtttgatcgggcaacttgtgtcctggcccataccggcattactgggggtcgccacacttgggtctggatggcgagggtgccaggcgactcggggtgctgccagttctgcagtcctccatctgtcctcggaactgaggtggcagcgtag

SEQ ID NO: 25649 - DNA, 3288 bp, synthetic construct
  source 1..3288: mol_type = other DNA; note = Synthetic coding sequence
atggccgagggcgccgccggccgggaggaccccgccccccccgacgcagctggtggagaggacgaccctagagttggacccgacgcggcgggagactgtgtcaccgccgctagtggcggtcgtatgcgggacaggcggtcaggtgttgctcttcccggtgccgcgggaacccctgccgattcagaggctggtctcctcgaggctgccagagctacccccaggcggagctctatcatcaaggatccatcgaaccagaaatgtggaggcagaaaaaaaacggtgagtttttcatcaatgccatctgagaagaagatctcttccgccaatgactgcatttctttcatgcaggctggttgcgaattaaaaaaggtccgacccaactctcgtatttataacaggttcttcacactggacacagatttacaggcactgcggtgggagccgagcaagaaagatttagagaaggccaaattagacatttcagcaattaaagaaattcggctagggaaaaataccgaaacctttcgcaataatggattggctgatcaaatctgtgaagattgcgctttctctatccttcatggcgaaaattacgaaagcctagatcttgtcgccaactccgcagacgtggccaatatttgggtctctggtctgagatatctagtgagcaggtctaaacagcccctcgatttcatggaaggaaatcagaacactccccggttcatgtggctaaagaccgttttcgaggctgctgatgtggacggaaatggcatcatgttggaggatacgtcagtcgaacttatcaaacaactgaatcctacactgaaggaagccaaaatcaggttaaaattcaaggagatacaaaaaagtaaagagaagctgacaacacgggtgactgaagaagaattttgtgaggctttttgtgaactctgcactcggcccgaagtctatttcctgttagtgcagatcagcaaaaacaaagagtacctggatgctaatgatttgatgttgttcctcgaagcggagcagggagtcactcatataacagaggatatttgccttgacatcattcgaaggtatgagctgtccgaggagggtcgacagaagggattcttggcaatagatggtttcacgcagtacctgttgtcatctgaatgcgatatcttcgaccccgagcagaagaaagtggcccaggacatgacacagcccctgtcccactactacatcaatgcatcccacaatacgtatctcattgaggaccagttcagaggacccgccgacatcaatggctatatacgggctctcaagatgggctgtcggagcgtggagcttgacgtgagcgacgggtctgacaatgagccaatcctgtgtaaccggaacaatatgaccacacacgtctctttccgatcggtcattgaggtcatcaacaagtttgcttttgtcgcctcggagtaccccttgatcctctgcctgggaaaccactgcagcctccctcaacagaaagtgatggctcagcagatgaagaaagtgtttggcaacaagctgtacaccgaagccccactgccttctgaaagttacctgccaagtcctgaaaagctgaagcggatgattatcgttaaaggcaagaaactaccaagtgaccccgatgtcctggagggcgaagtcaccgacgaagacgaggaagcagaaatgtcacgtagaatgtcagtggactataacggcgaacagaaacagatccgtctctgccgggagctaagtgatttggtatccatttgcaaaagtgtccagtatcgtgacttcgaactgtccatgaaatcacagaattattgggagatgtgttccttctctgagaccgaagcctcacgcatagcaaacgaataccccgaagattttgtcaattataacaagaagttcctctctcggatatacccttctgccatgcgtattgattcttccaacctgaacccccaagatttctggaattgcgggtgccaaatcgtggccatgaattttcaaaccccaggccctatgatggacctgcatacaggatggtttttacaaaacggcggatgcggttacgtgctgagacccagtataatgagagacgaggtcagttacttttccgctaataccaagggcatactgcccggagtaagcccgttagcactacacataaaaattatctccggccagaatttccccaaaccaaagggagcttgtgcaaagggggatgtcatcgatccttatgtgtgtatcgaaattcatggcatacccgccgactgttcagagcagcggactaagacagtccagcaaaacagtgataaccctatttttgatgaaaccttcgagtttcaagttaatctcccagagctggccatgatcagatttgtcgtgctggatgatgattacatcggcgatgagtttataggccagtatacaatcccgttcgagtgtcttcagcccggctaccgccacgtgcctctccgatctttcgtgggagacattatggaacacgttaccctgttcgtacacattgctattacaaacagatctggcggcggcaaggctcaaaaaaggtctctcagcgttagaatgggcaagaaagtgagggagtacacaatgctgcgcaatattgggctgaagactatcgacgatatttttaaaatcgctgtccacccgcttcgcgaagcgatagatatgcgggagaacatgcagaatgccattgtgtctattaaggaactctgtggattgcctcctatagcctctttaaagcagtgtcttctaacccttagttcacgcctcattacttcagacaacactccgagcgtgagcctggtgatgaaggactctttcccctacctggagccactcggcgctatccccgacgtgcagaagaagatgctgaccgcatatgatttgatgattcaggagagcagattcctcatcgaaatggctgacaccgtgcaggagaaaatagtccaatgtcagaaggccggaatggaatttcacgaagagctgcacaacctgggcgcaaaagaaggcctgaaggggcgcaagctgaacaaagccacagaaagttttgcttggaacattactgtcctcaagggccagggagacctcctgaagaatgcgaagaacgaggcgattgagaacatgaagcaaattcagctcgcttgccttagttgcgggcttagcaaagccccatcgtcatccgctgaagcgaagagcaaaagaagcctggaagcaatcgaggagaaagaatctagcgaagaaaatggtaagctgtag

SEQ ID NO: 25650 - DNA, 543 bp, synthetic construct
  source 1..543: mol_type = other DNA; note = Synthetic coding sequence
atggagcagcccaagggcgtggactggaccgtgatcatcctgacctgtcaatataaggatagcgtgcaggtgtttcagcgagagcttgaagtgagacaaaaaagagagcaaatccccgcggggacgcttttgctggccgtggaagatcctgagaagcgggtgggcagtggcggcgctaccctgaatgcattgttagtcgccgccgagcacctctccgctcgcgccggctttaccggtcgcgatttcccctttgatgattgcggtagggccttcacatgtttgcccgtggaaaatcccgaagccccggtcgaggcacttgtgtgtaatctggactgcctgctcgatatcatgacctacagactgggtccgggatccccacctggagtttgggtttgttccacagacatgctgctgtcagtcccggccaatccaggcgaaccggagacaacttgggactgtttgccttcctctcagcctcagcaggaagcgagctccgccctgttagcgcatccagcaagtgggccagcaccactaccctactag

SEQ ID NO: 25651 - DNA, 429 bp, synthetic construct
  source 1..429: mol_type = other DNA; note = Synthetic coding sequence
atgaacgaggtggtgcacaccagccccaccatcggcagcaacgtggaagaaatagttattaacaatacccggttcctgatgtgggacattggcgggcaggaatcgctgcggtcaagctggaacacttactacacgaacacggagtttgtgattgtggtggtggatagcaccgaccgggagcggataagcgtcacacgcgaagagctgtacaaaatgctcgctcacgaggacctgcggaaggcagggttgctcatattcgccaacaaacaggacgtcaaggagtgcatgactgtcgcagagatctcacaatttctgaaactcacttccattaaggatcaccagtggcatattcaggcatgctgcgcactcacgggagagggactgtgccagggactcgaatggatgatgagtagactgaaaatccggtag

SEQ ID NO: 25652 - DNA, 342 bp, synthetic construct
  source 1..342: mol_type = other DNA; note = Synthetic coding sequence
atggagggcgtgctgtacaagtggaccaactacctgagcggctggcagcctcgatggttcctactctgtggaggcatcttatcatactatgacagccctgaagacgcctggaaaggatgcaaggggagtattcagatggcagtgtgtgaaatccaggtgcattcagtggataataccagaatggatctcattatccctggggaacagtatttttacctcaaggcaaggagtgtggcagagcggcagcgttggctggtcgctctgggatcagctaaggcatgtcttactgatagtcgcactcagaaggagaagggtaatctgctgaagacactgaagacatag

SEQ ID NO: 25653 - DNA, 1119 bp, synthetic construct
  source 1..1119: mol_type = other DNA; note = Synthetic coding sequence
atggccagcaaccacaagagcagcgccgcccggcccgtgagccggggtggagtgggtctgaccggacggccaccaagtggaatccgtccactgtcagggaacatcagggttgccaccgcaatgccccctggtacagcgcgccccggatcgagagggtgtcccatcggcaccggtggagtgctgagctcgcagattaaggtggcgcacaggccagtgactcagcagggcttgactggcatgaaaacgggcacaaagggaccacagagacagattcttgacaaaagctattatctgggcctactgcgatctaagatctccgagctgacaacagaagtgaacaaactccagaaaggcattgaaatgtacaaccaggagaactccgtgtacctgtcgtatgagaagagagcagaaactctagccgtcgaaattaaggagctgcaggggcagctggctgactataacatgttagttgataagttaaacacgaatacggagatggaggaggtaatgaatgactacaacatgctaaaagctcaaaacgatcgcgagacccaatctctggatgtcatcttcacggaaaggcaggccaaggaaaaacagatccgcagcgttgaggaagaaatcgaacaggagaaacaggccaccgatgatataatcaaaaacatgagtttcgagaaccaggtcaagtatctggagatgaagacaacgaacgaaaagctgctgcaagaactggataccctgcagcaacagctcgacagccagaatatgaaaaaagaaagtctggaagcagagatcgcccacagtcaggtgaagcaggaggcagtgcttctgcatgagaagctttacgagctcgagtcacacagggaccaaatgatcgcggaagacaagagcatcggctcaccaatggaagaaagagaaaagttactcaagcaaataaaggatgacaaccaggagatcgcctctatggaacgccagcttacagatactaaggagaagattaatcagttcatcgaggagattcgacagctggatatggatctcgaggaacaccaagaccctacaaactacggatggaaaatcctcgagaagaacacggggagtttcaaaaagcaggtttag

SEQ ID NO: 25654 - DNA, 345 bp, synthetic construct
  source 1..345: mol_type = other DNA; note = Synthetic coding sequence
atgtggagcctgaccgccagcgagggcgagagcaccaccgcccacttttttttaggagctggtgatgaagggcttgggacgaggggaattggaatgcgaccagaggagtctgactctgaactcctggaggatgaggaagatgaggtcccccctgaacctcagattatcgtcggtatctgtgcgatgaccaaaaaaagcaaatcaaagccgatgacccagatactggagagactgtgcagattcgattacctcacagtggtgatattgggggaggacgtgatcttaaatgagccagtggaaaactggccaagctgtcactgcttaataagctttcattcaaaatag

SEQ ID NO: 25655 - DNA, 327 bp, synthetic construct
  source 1..327: mol_type = other DNA; note = Synthetic coding sequence
atggccatggcccccagccccagcctggtgcaggtgtacaccagcccggcggcggtagccgtttgggaatggcaggatggtctcgggacctggcacccctacagtgcaacagtgtgctctttcatcgaacagcagttcgtgcagcagaaaggtcaaagattcggactgggctctctggcccacagtatacccctcggccaggcagacccttctctggctccctacattattgatcttccatcctggacacaattcaggcaggatactgggactatgcgggcggtccggagacacctgttcccacagcacagtgcccctgggcgatag

SEQ ID NO: 25656 - DNA, 549 bp, synthetic construct
  source 1..549: mol_type = other DNA; note = Synthetic coding sequence
atgcgggagtgcatcagcatccacgtgggccaggccggcgtgcagatagggaatgcttgctgggagctatactgcttagagcatggaatacagcctgacgggcaaatgccctcagacaagaccattggtggcggggatgattctttcaacacctttttctccgaaactggagctggtaaacatgttccgagggcagtctttgttgacctcgaacctactgtcatagactggtgcccaactgggttcaaagtggggatcaactaccaacctccaacagtcgtcccgggcggagatctggctaaggtgcaacgggcagtctgtatgttgtccaacacaaccgccatcgccgaagcctgggccagactagaccataagtttgatctgatgtacgccaaaagggcctttgtacattggtatgtcggcgaaggcatggaggaaggagaatttagcgaggctcgggaagacatggctgctcttgaaaaagactacgaggaggtgggggtcgactctgtggagggggaaggcgaagaggaaggcgaggagtactag

SEQ ID NO: 25657 - DNA, 483 bp, synthetic construct
  source 1..483: mol_type = other DNA; note = Synthetic coding sequence
atggaggccgagcggccccaggaggaggaggacggcgagcagggccctccccaggacgaggagggctggccaccaccgaacagcacgacccggccctggagaagtgcaccccctagcccacccccacccggtacccgtcacactgccctggggcctagatctgcatccctactgagcctccagaccgaactgctgttggacttggtggcggaggcccagagtcgccgtctggaggaacagagagctaccttttacactccacagaatccttcctctctagctccagcccctcttagaccgctcgaagaccgcgagcagctttattccactatcctgtcccatcaatgccagcgcatggaagcacagcgaagcgaacccccattgccacctggcggacaggaactgctggaactgctgctgagggttcaaggtggaggccgtatggaggagcaacggtctcgacctcctacacacacctgttag

SEQ ID NO: 25658 - DNA, 3483 bp, synthetic construct
  source 1..3483: mol_type = other DNA; note = Synthetic coding sequence
atggcctgccggcggcggtacttcgtggagggcgaggcccccagcagtgagacaggcacctctctggactcaccctccgcctacccccagggccccctggtgcctgggagctcactgagccccgaccactatgagcacacatctgtcggagcctacggcctctacagcggaccaccaggccagcagcagaggactcggcgtcccaagcttcagcatagtactagtatcctccggaaacaggccgaagaggaagccattaagaggtccaggagcctatcagaatcttacgaactctcaagtgatctgcaggacaaacaggtggagatgctggaacgcaagtacggggggaggctggtgaccaggcacgccgcgagaacaatccagaccgctttccgccagtatcagatgaacaagaactttgaacgtctccgctcttccatgtcagagaaccgcatgtcccggcgcatcgtactaagtaacatgcggatgcaattctccttcgagggaccggagaaagtccatagtagctatttcgagggcaagcaagtatcagtgacgaatgatggctcccagttgggcgctcttgtgtcccctgagtgcggagacctttccgaacctaccactttgaaaagcccagcgccaagttccgactttgcagacgccattacggaattagaagacgccttctcaaggcaggtcaaatcccttgccgaatccattgacgatgccttgaactgtcgctctctacacacagaagaggctcctgctctggacgcagcccgagcccgtgatactgagcctcagaccgcgctgcatggtatggatcatcgtaagctcgatgaaatgactgcctcctatagtgacgtaactctgtacatcgacgaggaggagctcagccccccacttcctctatcccaggccggtgaccggccaagttcaaccgaaagcgacctgcgactgagggctggcggcgcagccccagactattgggcactagcacacaaagaagacaaggccgacacagatacatcttgccgatcaactccttccctcgaaaggcaggagcaacggcttagagtcgagcaccttcctctcctgacaatagaaccaccttcagattcaagtgtggacctcagtgacagaagcgaaaggggttcgctcaagcgccagagcgcgtacgaaagatctctgggaggccagcagggttctcctaaacatggccctcactctggtgccccaaagtcccttccacgcgaagaaccagagctgagacctcggccaccacggcccctggattctcatctggctatcaatggttctgccaatcgacagagtaaatccgaaagcgattacagtgacggtgataacgattccattaatagcaccagcaatagcaatgacactatcaactgctcttccgagtccagctcaagagactctctgagagaacaaactttgagcaagcaaacctaccataaggaggctagaaacagttgggacagtcccgccttttctaacgatgtgatccgtaaacggcattaccgcatcgggctgaacttgttcaataaaaaaccagaaaaaggagttcagtatctcattgagaggggctttgtgccagacacaccagttggcgtcgctcactttcttctccagcgaaaaggcctctcaagacaaatgattggagaattcttaggcaataggcagaaacaatttaatcgggacgtactggactgcgtggtggacgaaatggatttctccacaatggagctcgacgaagcactgcggaagtttcaggcccatattcgcgtccagggtgaggctcagaaagtcgagaggctgatcgaagcctttagccaacgttattgcatttgcaaccccggagtagtcagacagttcagaaaccctgatactatcttcatcctggcctttgctatcatcctgctaaacactgatatgtatagccccaatgtcaaacccgagagaaaaatgaagctcgaagacttcattaagaatcttagaggcgtcgatgatggcgaggacatcccccgagaaatgcttatggggatatatgagagaatacggaagagggagcttaaaactaacgaggaccacgtgtctcaggtgcagaaggtcgagaagctcatcgtcggaaaaaaacctataggctctctgcacccagggctcggttgcgtgctgtctcttccccacaggaggcttgtatgttactgtagactgttcgaggtgcctgatccgaataaaccgcagaagctcggcttgcaccagcgggaaatcttcctattcaatgatctcctggtagtgaccaaaatctttcagaagaaaaagaatagtgttacctatagtttccgacaatcctttagcctttatggtatgcaggttctccttttcgagaaccagtactatccaaatggcatccggcttactagttccgtacccggcgccgatatcaaagttctgattaatttcaacgcccccaacccacaggacagaaaaaagtttaccgacgacctgcgcgagtctatcgcggaagttcaggaaatggaaaaacaccggatagaaagcgagctggagaaacagaagggggtggtgcggccatcgatgtcccaatgcagctctttaaagaaagagtccggaaacggaactctgtcacgggcatgtcttgatgactcatacgcttccggcgaaggcttaaaaaggagcgctctatccagctctcttcgtgatttgtcagaggccggcaaacgtggccggcgctcaagcgccggctctctcgaatcgaacgtggagggctcgattatatcctctccccacatgcgaaggcgcgcaacctcaaccagggaatgcccttctcgccctcatcaaacaatgcctaacagcagctcattgctcgggagtctgtttggctccaagaggggcaagcccccaccacaggcgcatctgccatccgctcctgctttagcaacaccgccaccaacaggtggtccggccagccttgctgccctgtgcggctggcctccgcccggagcccctcggggagccgccgccggcaggcacgcgcgggcatcacacccagtcctgccccacgcagaaccctcacccgttcccccatcaccacctccaccgcccactcctgctcatcccgctagaacacctgtgccccctagaccgccctggggtcctccctctttgcggggcccctgtccacgccctccagctgcggcactggggccccggggagcacattcagcccctccatgggcagccccgtgcccagcagccccccaccaacagcagggtcagacacagagacatcagcataactgcgtcgattcactgggcaggggacctcgtctgccggaaacccccgctcatcatactggacacgcccgaggaagtcctgctgcgcatcaaacccggggaacatcagtggccatcagtccgctgtgtccttcgaggccaaactag

SEQ ID NO: 25659 - DNA, 378 bp, synthetic construct
  source 1..378: mol_type = other DNA; note = Synthetic coding sequence
atgaagaaggagcacgtgctgcactgccagttcagcgcctggtacccgttcttccgcggcgttacaatcaagtctgtaattctgcccctaccccagaacgtaaaagactatctgctagatgatggaacactggttgtgagtggccgagatgaccctcccacccactcacaacccgactcagacgatgaagccgaggaaatccagtggagtgatgacgaaaacactgccactttgaccgacgcttattggatcgcaatgaattcaagtcttaagtgtaagactctatcggacatctttttgttattcaagagctctgattttattaccagggattttacacaaccctttattcattgcactgatgatagcccagattag

SEQ ID NO: 25660 - DNA, 414 bp, synthetic construct
  source 1..414: mol_type = other DNA; note = Synthetic coding sequence
atgagcctgttcggcaccaccagcggcttcggcaccagcggcacctccatgttcggttctgctaccacggataaccataacccaatgaaggacattgaagtaacctccagccccgacgattctatcgggtgcctgagtttctctcctcctacccttcctgggaactttctcatcgcggggtcatgggctaacgacgtgagatgttgggaggtgcaggatagcgggcagacaattccaaaagcccagcagatgcataccggaccagtccttgacgtgtgttggagtgacgatggctctaaagtcttcaccgcttcctgcgataagacagccaagatgtgggacctgtcttccaaccaggcaatccaaatcgcacaacatgacgcccccgttaaaaccattcattggatcaagtag

SEQ ID NO: 25661 - DNA, 3222 bp, synthetic construct
  source 1..3222: mol_type = other DNA; note = Synthetic coding sequence
atggaggagcggaagcacgagaccatgaaccccgcccacgtgctgttcgaccggttcgtgcaagctacaacatgcaaggggacgctgaaagcctttcaggagctatgcgatcaccttgaacttaagcccaaggactacagatctttttaccacaagttaaaaagcaagttgaactattggaaggcaaaagcactgtgggccaagctggacaagagaggttcccacaaagactacaaaaaggggaaagcgtgcactaataccaaatgtctgataattggcgcaggaccttgcggcctgcggaccgccatcgacctttccctgctgggggcaaaggtggtggtgatagaaaagagagacgccttctcgcgaaacaatgtgcttcacttatggccattcaccatccacgacctgcgcggcctgggtgctaagaaattctacggcaagttttgcgccggggctatcgatcacataagtattcggcagctgcaactgatcttgctgaaagtggcattaatattggggatcgagattcacgtgaatgtggaattccagggccttatacagcctcctgaagaccaagaaaatgaacggattgggtggagagccttggtgcaccccaagactcatccagtttcagagtacgagtttgaggtgattataggaggagacggcaggcgcaacaccctggagggatttcgccggaaagagtttagaggcaagctggctatcgccataacggccaacttcatcaatcggaataccacggccgaagcaaaagtagaagagatcagtggcgtcgcttttatctttaatcagaaattttttcaggagctgagggaggcgaccggaatagaccttgagaatatcgtgtactataaggacgacacacactacttcgttatgaccgcaaaaaaacagtcactgcttgataagggggtgatcctgcatgattacgcagacaccgagctgctgttatcgagagaaaacgtcgatcaggaagcattgctgtcttatgcaagagaggccgccgatttttctacccaacagcagttgccctcactggacttcgccataaaccactacggtcagccggacgtggctatgttcgattttacatgcatgtacgccagcgaaaacgctgcactcgtgcgcgaacagaacggtcaccaattgttggtcgccctggtgggcgatagcctgctggagccattctggccaatgggtaccgggattgcgagagggtttttagctgctatggactctgcatggatggttcggagttggtccttaggcaccagccccctggaagtgctggctgagcgtgaaagcatctaccgtttgttgccccagactactcctgagaatgttagcaaaaatttcagtcagtattctatcgaccctgtgacccggtatcccaacattaatgttaactttctgcgcccaagtcaagtcagacatttatacgacaccggggaaaccaaagatatccacctggagatggagtctttagtcaattcgagaaccaccccgaagctgactcgaaacgaatctgtggctcgaagttcaaaactgttgggctggtgccaacgtcaaaccgatggttacgcaggcgtgaacgtgactgacttgacgatgtcttggaagagcggtctggcgctgtgcgctatcatccatagatatagaccggatctcatcgactttgactccctggatgagcagaacgtggaaaaaaacaatcagctggctttcgatattgccgaaaaagaattagggatttcccctataatgactggcaaggagatggcctcagtgggagagcctgacaagcttagcatggttatgtatctgactcaattctatgagatgtttaaggacagccttccctcctccgatacgcttgacctcaatgccgaagaaaaagccgtcctcattgcgagcactcggtcccccatttctttcctgtccaagctgggccagactatttctcgcaaacggtcccctaaggacaaaaaggaaaaagacctggacggcgcggggaaaaggcgaaaaacatcccagtctgaagaagaggaggctccccgggggcacagaggggaaagaccaaccctggtctccactctcaccgataggagaatggacgtcgcagtggggaaccaaaacaaagtcaagtatatggccacgcagttgctcgctaaattcgaagagaatgctcctgcgcagtccattggcatccggcgacaacagcgggaaaaggagtgtagcagaacttgtcccaaaaaagtgattactctgagtcctccccctacgccccccccttgccgggcccatggaggtcaacagacttatcgtgacctggatgccgacaatcgtgggaagcaatcccctcaccacgagcgccccgaaccagaaccccccagacgctttttcgtcgaccagtgggagctttccctctctttgcggtcaagtgccaggccagcctctccctcgagcgattctctcagacaaaagtatatcaaaatgtatacggggggcgtgagttcactggcggaacagattgctaatcaactgcagagaaaggaacagccaaaagctttgctggataagaaagaactgggaagtatgaaaaaggagttcccacaaaatctgggtggatctgacacttgctatttttgtcaaaagcgagtctatgtgatggaaaggctctccgccgaaggtaagttctttcacaggtcctgctttaaatgcgagtactgcgctaccaccctgcgattgtctgcctacgcgtatgatattgaggatgggaagttctattgcaagccccactactgttaccgcttgtctggatatgcacagcggaagagacccgccgttgctcctctgtctggaaaagaagctaagggcccacttcaggacggagctacaaccgacgccaatgggagagcgaatgccgtggcatcatcaactgaaagaacacctggctccctgactagcctttttggatgggttgctagacatagccttggtctctgtgataaagccaaggggatgtctcagcatctgcagtctaacatttcctcttttgggcagcaagtagctcagaaccccttagatagtttctttatgtgtcagcttctggccttcggcgtcccatttctttatgggttatctgaagtgctcgtgcaaattagaggcgaatttcattggcaggccgttgcccagtag

SEQ ID NO: 25662 - DNA, 543 bp, synthetic construct
  source 1..543: mol_type = other DNA; note = Synthetic coding sequence
atgttcctgagctgcggcagcctgcaccagcggggccccgagaccgacggtacagtcttccgaatccacaccaaggctgaaggatttatggacgtggatatcccattagagcttgtgtttcacctgccagtaaactaccccagctgcctgccgggcatcagtatcaactccgaacagctgacccgcgcgcagtgcgtgaccgtgaaggagaacctgctggagcaggcggaatccctgctgtctgagcccatggtgcacgaactcgttctatggatccaacagaacctaagacatatcttgagtcagcccgaaaccggcagcggtagtgaaaagtgtacgttttcgacctcaactaccatggatgacggcctgtggattactctgctgcatttggaccatatgagagccaagaccaagtatgtaaagatcgtggagaagtgggccagcgacctgaggctcacaggccgtctgatgtttatgggaaagatcattctcatactgctacagggtgacagaaataacctgaaagtccccaagtcctag

SEQ ID NO: 25663 - DNA, 1521 bp, synthetic construct
  source 1..1521: mol_type = other DNA; note = Synthetic coding sequence
atgaagcggcggagcgtgaccatgaccgacggcctgaccgccgacaaagtgacacgctcggacgggtgccctacttccacctcactgcccaggcctcgcgatagcattagatcatgtgcactatccatggaccagattcccgacctccacagtcccatgtcacctatctcggagtcaccctcctctcccgcttattctacggtcaccagagttcacgccgcccctgccgctccatcagccacagcgctccccgcatctcccgtagcccgacggtctagcgagccccagctgtgtccaggttcggctcctaaaacacatggcgagagtgacaagggcccacacaccagtccgtctcatacactggggaaggcctccccatcacctagcttatcgagctacagtgatccggactccggccactactgccaactgcagccacctgtgaggggctctagggagtgggccgcgaccgaaacttctagtcagcaggcccggtcctacggagagcgtctcaaggaactgtctgagaatggcgcccctgagggcgattgggggaaaacctttacagtacccattgtcgaagtcaccagcagttttaacccagctactttccagagcctgctaatacctcgcgataaccgccccctcgaagtagggcttttacgtaaggtgaaagagctgcttgctgaggtggacgctaggacactggccagacatgtcacgaaggtggactgcctggtggctagaatcctgggagtcactaaggagatgcagactctaatgggggtgagatggggtatggaactgctaactctgcctcacggtcgccaattacgactggatcttctggaacggtttcacactatgagcatcatgctcgcggtggacattctgggctgcacaggttctgccgaagagcgagctgcattactccacaaaaccatccagctggcagcagagcttagagggactatggggaatatgtttagtttcgccgccgtcatgggcgccctggacatggcccagataagtcggcttgaacagacatgggtgaccctgcgacagcgacataccgaaggcgcaatcctgtacgagaagaaattgaaaccctttctgaaatctttaaatgaagggaaggagggacctcccttgagtaacacaacattcccccatgtgctaccacttattaccttgctggaatgtgatagcgctcctccggaaggtcctgagccgtggggctctaccgaacatggagtggaagttgtgttggcccatctcgaagctgcccgaacagtcgcccaccatgggggcttgtatcacaccaatgctgaggtgaagctgcaaggctttcaagcccgtcctgagctgttggaggtattcagcaccgaatttcagatgcgcctgctttggggcagccagggagcttctagttctcaggctcgacgctacgaaaaatttgacaaggtgctaactgccctctcccataagctggaacccgctgttcgtagcagcgaattatag

SEQ ID NO: 25664 - DNA, 369 bp, synthetic construct
  source 1..369: mol_type = other DNA; note = Synthetic coding sequence
atggccaccagcgcccccctgcggagcctggaggaggaggtgacctgctcaatttgcctggactatcttcgggatcccgtgaccatcgactgtgggcacgtgttctgccggtcctgcaccaccgacgttaggcccatctccggcagccgaccggtctgtccgctgtgcaaaaagcccttcaaaaaggaaaacatcagacccgtgtggcagctcgccagtctcgtcgagaacatagaacgcttaaaagtagacaagggacggcagcccggcgaagtcactcgcgagcaacaggatgccaagctgtgcgagcggcatcgcgagaagctgcactattattgcgaagatgatggaaaactgttatgtgtgtag

SEQ ID NO: 25665 - DNA, 369 bp, synthetic construct
  source 1..369: mol_type = other DNA; note = Synthetic coding sequence
atgcccgagatcaacaccaaccacctggacaagcagcaggtgcagttattggccgagatgtgcatcttgattgacgagaatgacaataagatcggcgccgaaactaagaaaaactgccacttgaatgagaacatagagaaaggcctgttgcatcgagccttctcggtgttcctgtttaatacagagaataaactgctgctccagcagagatccgatgccaaaattacctttcctggctgtttcacaaatacatgctgctctcaccctctgagtaatcccgcagagttagaggaatcagacgcactcggtgtacgacgggccgctcagcgcagactcaaagcggaactgggcatccctctggaggagtag

SEQ ID NO: 25666 - DNA, 408 bp, synthetic construct
  source 1..408: mol_type = other DNA; note = Synthetic coding sequence
atggccgccctgcggcccctggtgaagcccaagatcgtgaagaagagaacaaagaaatttatccgccaccaatccgatcggtacgtgaaaatcaaacgtaattggcggaagccgcgcgggattgacaatcgtgtgaggcgaaggttcaaagggcaaatcctgatgcctaacatcggctacggtagcaacaaaaaaaccaagcacatgctccccagtggcttcagaaagttcctggtgcataatgtgaaagagttggaggtcctgcttatgtgtaacaaaagctattgcgcggagattgcacacaacgtgtcttccaaaaataggaaggccattgtggaacgagctgcgcagttggccattagggtcaccaatcctaacgctcgcctgcgatccgaggaaaatgagtag

SEQ ID NO: 25667 - DNA, 3282 bp, synthetic construct
  source 1..3282: mol_type = other DNA; note = Synthetic coding sequence
atgggcaccggcgacttcatctgcatcagcatgaccggcggcgccccatggggatttcggctccaggggggaaaggaacagaagcagccattgcaggtggctaaaatccgaaaccagtccaaagctagtggctcaggcctatgcgagggcgacgaagtggtgtcgatcaacggcaatccatgtgctgatctgacctatccagaggtcataaaactaatggagtccattacagatagcctacagatgttaataaaacgccctagctcagggatcagcgaagccctgatttcggaaaacgagaataagaacctggagcatctcacccacggcggctatgtcgagtctaccactctgcagatcaggccggccaccaaaacacagtgcactgaattcttcctggccccagtaaaaacagaagtgccactggctgagaaccagcgaagtgggcctgattgcgctgggtcgttgaaggaggaaacaggaccttcataccagcgcgcaccccagatgcccgacagccagcgcggccgcgttgctgaggagctgattttacgagagaaggtagaggctgtgcaacctgggcctgtggttgagctacaactgagtttgtcccaggaacgtcataagggcgccagcggcccattagtggcgctgccgggcgccgaaaagagtaagtctccagatcctgaccccaacctaagccatgatcgcatagtgcacattaattcgataccaactaatgaaaaggcggacccattcctgcggtcctcaaagatcatccagatctccagcgggcgcgaacttcgcgtgattcaggagtctgaggccggagacgccggattaccgagagttgaagtaatcctggattgttctgaccgccagaagacggagggctgtaggctgcaagccggtaaggaatgcgtcgattccccagtggaagggggacagtctgaggcccccccgtctctcgtcagcttcgccgtgtcaagcgaggggaccgagcaaggcgaggacccccgatcagagaaagaccactccaggccccacaagcatagggcaagacacgcgcgtcttagacgctctgagtctctgtctgagaagcaggttaaagaagcaaaaagtaaatgcaagtcgatcgcgctcctgttaaccgacgcgccaaaccccaactcaaagggcgttctgatgtttaaaaagagacggagacgcgccagaaaatatactttggtgagctacggtaccggcgagctggagcgggaagcagatgaggaggaggagggcgacaaagaggacacatgtgaagttgccttcctaggagccagcgaatccgaagttgatgaggagctgctcagcgacgttgatgacaacacacaagttgtgaatttcgattgggacagcggcctcgtggacatcgagaagaagttgaaccgcggagataagatggaaatgttgcccgataccacaggaaagggcgcgctcatgttcgctaagagaagagagcgaatggaccaaatcaccgctcagaaggaagaggacaaggtgggaggcacgccgtccagggagcaggacgccgcccaaactgacggtctgagaaccaccacgagttaccagcgcaaggaagaggagtccgtgagaacacagagttctgtgtcaaaatcctacatagaagtttctcacggattggggcacgttccacaacagaacggattcagcggcaccagcgaaacagccaacatccagaggatggtgcccatgaaccggacggccaaaccatttccaggctccgtcaatcaaccagcgacacctttcagccctacaaggaacatgacatcccccatcgcagactttccggcccccccaccttactcggccgtcacccctccgcctgacgccttctctagaggcgtgtcatcccctattgcagggccagcgcagccaccgccatggccacagccagccccttggtctcaaccagctttttatgattccagcgaacgtattgcttccagggatgaaagaatttccgtaccggccaagaggaccggaatcctacaggaagctaagcggcggagcaccacgaagcctatgtttactttcaaggagccgaaggtgtctccgaacccagagttactttctctgttgcagaattcggaggggaagcggggcactggcgcaggtggagactctggacctgaggaggactatttgagcctgggcgctgaggcttgcaatttcatgcaatcatccagcgcgaagcaaaaaacaccccctcctgttgctcccaaaccagctgtcaaatccagcagctcccagcccgtgaccccagtcagcccggtctggagtccgggcgtcgccccaacacaaccccctgccttcccaacaagcaatccaagtaaggggacagtggtgtcttccatcaagatcgcacaaccatcttatcccccggcgcgccctgcgtccacgctgaacgtagccgggcccttcaaaggccctcaagctgccgtcgctagtcagaattacactccaaagccgaccgtttctacccctaccgtgaatgctgtgcagcctggagccgtgggacctagcaatgagctgccaggcatgtccgggaggggggctcagctgttcgccaaaaggcagtcccggatggagaaatatgtcgttgacagtgacaccgtccaagctcacgcagccagagcccaatcacctaccccttctctgcctgcatcttggaaatactcaagcaatgtgcgggccccaccacctgtggcttacaatcccatccatagtccctcttatcccctagccgcccttaagagccaaccatcggctgcgcagccatccaagatggggaaaaagaaaggcaaaaaacccttgaacgcattggatgtaatgaaacatcaaccatatcaactgaatgcctctttgttcactttccaaccccctgacgccaaggatggactgcctcaaaaatcttccgtgaaggtcaattccgcgctggcaatgaagcaagctctgccgccccgtcccgtcaatgccgcaagtcccacgaacgttcaggcatcaagcgtgtattcggtgccggcgtacactagtcccccatcattctttgccgaggcctcatcccctgtctcagcgagccctgtcccggtaggcattcccacctcgcctaagcaggagagcgctagtagctcctacttcgttgctccgcggcccaaatttagcgctaagaagtcaggcgtgacaatacaagtgtggaagccatcggtagtggaagagtag

SEQ ID NO: 25668 - DNA, 600 bp, synthetic construct
  source 1..600: mol_type = other DNA; note = Synthetic coding sequence
atggccatcgtgcagaccctgcccgtgcccctggagcccgcccccgaagctgccacagctccacaagcgccagtaatggggtccgtgagcagtctgatatctggccgcccctgtccaggaggccctgctcccccccgccaccacggaccgcccggccctacattcttcaggcagcaggatgggctgctgaggggtggatatgaagcccaggagcctctgtgtccagccgttcctccaaggaaagcagtgccagttacctcctttacgtacatcaacgaagattttcggactgagtctcccccctcgccaagtagcgatgtcgaagatgcccgtgagcagagggcgcacaacgcccatctccgggggccgcctcccaaactcataccggtctctggaaagcttgagaagaacatggaaaagatccttattcggccaaccgctttcaagcctgtgcttcccaagccgaggggcgccccttccctgcccagttttatgggcccacgcgctaccgggctgtctggctcacaaggatctttgacacagttattcgggggtccagcgtcaagcagttccagcagctcgtcttcgtctgcagcctag

SEQ ID NO: 25669 - DNA, 612 bp, synthetic construct
  source 1..612: mol_type = other DNA; note = Synthetic coding sequence
atgcccagcacccccgccagcaccatcagcgcccgggaggagctggtgcaacgcatcccagaggctagtctcaatttccagaaagttcctcctggcagcctaaacagtagagactttgatcaaaacatgaacgactcttgtgaggatgccctagctaataaaactcgcccccggaacagagaagaggtcatatttgataatttgatgcttaaccccgtcagccaactaagccaagcaattagagaaaatactgagcatctagcagagaaaatgaagattctcttccagaacactggccgagcctgggaggatctggaggctcgaataaacgctgagaacgaagtgcccattttgaagacctccaacaaggagatctctagcatcctgaaggaactcaggcgggtccaaaagcagcttgaggtcattaatgctattgtggacccttcgggctcactagaccttctgttgcctacattgagctcttttgtccctccaccacctgctttcgcttgggaactggtgttggtgtgccgcgcaagtcgcagagtgcattgtacattcgttcttcggtggtcatgcggttgtctctccgagaatggatattttatttag

SEQ ID NO: 25670 - DNA, 321 bp, synthetic construct
  source 1..321: mol_type = other DNA; note = Synthetic coding sequence
tgacccaccaccagccggcccgccctggacgtgaagggcggcacctctccagctaaggaagacgcaaaccaggagatgtcttctgtcgcttattctaatctggcagttaaggatcggaaggccgtggcaatcttacattaccctggcgtggcctcaaatgggacaaagagccctgcaatcatagattccgatcctgtggacgaggaagtgctgatgtctttggttgtcgagcttggactggaccgagccaatgagcttcccgagctctggttaggacagaatgagtttgatttcacggcagattttccatcttcctgctag

SEQ ID NO: 25671 - DNA, 456 bp, synthetic construct
  source 1..456: mol_type = other DNA; note = Synthetic coding sequence
atggccgccttccgggacatcgaggaggtgagccagggcctgctgtctctgttgggcgccaatcgtgcagaagcgcagcagagaaggttgttgggccggcacgagcaggtggtggagcggcttctcgaaactcaggatggggccgagaaacagctgcgggaaatcctcacaatggaaaaagaggttgctcaaagcttgcttaacgcaaaagagcaggagaggcaggaaaaggaggttgatgaggataccactgttacaatcccctccgcagtgtatgtggctcagctgtatcaccaagtgtctaagatcgagtgggattacgagtgcgaacctggcatggtgaagggtatccaccacggtccaagcgtcgcccagccaatccacctcgatagtacgcaacttagccgaaaattcatctccgactacctgtggtcgctcgtggatacagagtggtag

SEQ ID NO: 25672 - DNA, 444 bp, synthetic construct
  source 1..444: mol_type = other DNA; note = Synthetic coding sequence
atgctgcggtgcggccagatgatcttcgcccaggccctggtgtgcaggcatttaggtcgagactggagatggacccagcgaaagcgacagcccgatagttacttcagtgtgctgaacgccttcattgatcggaaagattcctactattccattcaccaaatcgcccaaatgggcgtgggtgagggcaagtcaattggacaatggtacggacccaacaccgtggcccaggtgcttaagaagctggcggtgtttgacacgtggtcttccctggcagtgcacatcgcgatggacaatacagttgtgatggaggagatcaggcgtctgtgtaggactagcgtcccttgcgccggagcaaccgcattccccgctgactcggataggcattgtaatgggtttcctgccggcgctgaggttaccaacaggcctagtccctggcgcccttag

SEQ ID NO: 25673 - DNA, 1482 bp, synthetic construct
  source 1..1482: mol_type = other DNA; note = Synthetic coding sequence
atggagaagtacgagaacctgggcctggtgggcgagggcagctacggcatggtgatgaagtgtaggaacaaggacacaggacgcatcgtggccattaaaaagttcctggagagtgacgacgataagatggtgaaaaagatcgccatgcgggaaataaagctgctgaaacagctacgtcatgaaaaccttgtcaatctcctcgaggtgtgtaagaagaaaaagaggtggtatctggtattcgaatttgtcgaccatacaatcctcgacgatcttgagctctttcccaacggactggactaccaggtggtccagaagtatctttttcagatcataaacggcataggcttctgccacagccataatattatccatcgcgatattaagccagagaacatactggtctcccagagcggcgtggtcaagctctgcgacttcggtttcgcaaggacattggccgctcccggggaagtctacaccgattacgtggccacacggtggtatagagccccagagttgctggtcggggatgtgaagtacggaaaagccgttgacgtgtgggccattggctgtttggtgactgaaatgtttatgggtgagccgctgtttccgggtgactcagatatcgatcagctctaccacataatgatgtgcctcggcaatctcatccccaggcaccaagaactgttcaacaaaaatcccgtttttgcaggcgtgagacttccggaaattaaagagcgggagccacttgagcgaaggtatccgaagttgtcagaggtagtcattgatctcgcaaagaagtgcctgcacattgacccggacaagcggccattttgcgctgagctcctacaccacgactttttccagatggacggattcgcagagaggttttcacaagagctccaactgaaagtgcaaaaagatgcccgcaatgtgagcctttccaagaagtcccaaaatcgtaagaaggagaaagaaaaagatgatagtctggtggaagagcgtaagaccctggttgtgcaggacacgaacgctgaccccaagatcaaggactacaaactgtttaaaatcaaaggctccaagattgacggtgaaaaggccgagaaaggcaaccgggccagtaacgcgtcatgtctgcatgacagtcggacctcccataataagatcgtcccctccacaagtcttaaagattgctctaatgtgtctgttgaccacacccgtaatccatcggttgcaattcctcctctcactcacaatctgagcgcagttgctcccagtattaatagtggcatgggaactgaaaccatccctatccaaggatatagggtggacgagaaaaccaagaagtgttccattcctttcgtgaaaccaaaccgccattcgccctcagggatatataacataaacgtgacaactctggtgagcggtccccccttgtccgatgacagcggagcagatttgccccagatggaacaccagcattag

SEQ ID NO: 25674 - DNA, 6189 bp, synthetic construct
  source 1..6189: mol_type = other DNA; note = Synthetic coding sequence
atggacggctgcctggacaccgagacccccaccgtgagcatccaggagaacgtcgatgtagctagcctgaaacctatttccgattcaggcataaacttcacagatgccatttggtctcccacttgcgaacggaggacatgtgagtgccatgagagcatcgagaagaacaaggataagactgacctccctcaatcagtggtctaccaaaacgaggagggccggtgggtaactgacctggcgtactatactagcttcaactctaagcagaatctgaatgtttcgctgtctgacgaaatgaatgaggactttagaagcggttcggaggccttcgacctgatcgcgcaggacgaggaagaatttaacaaggaacaccaattcattcagcctagtttcggatactttattcggtctccagaaaaaagggagcccatcgcgttgatccggaagagcgacgtttccagaggcaacctcgagaaagagatggcacacctgaatcatgacctgtattccggggatctgaatgagcagtcccaggctcagctcagtgaggggtccatcacactgcaggtggaagctgttgaatccaccagccaggtcgacgagaacgatgtgactctgaccgccgataaaggaaagacggaggataccttcttcatgtccaacaagcctcagcgttacaaggataagctacccgacagtggtgacagcatgttgaggattagcacaattgcatccgcgattgctgaggcctccgtgaatactgatccatcacagctggccgccatgataaaggccctgagcaacaagacacgggataagacatttcaggaagacgaaaaacaaaaagattacagtcacgtgcgccactttctccctaatgacctggagaagtccaatggctctaatgccctagacatggagaaataccttaagaagacagaggtcagccggtatgagtcagctctagagaacttttctagggctagtatgtctgatacatgggacttgtcccttccaaaggagcagaccacgcaggatatccaccccgttgacctctctgccacttcagtctccgtccgagctcccgaagaaaataccgccgcgatcgtatatgttgagaacggagaaagtgaaaaccaagaatcatttcgcacaatcaattctagtaatagcgtgaccaaccgcgagaataatagtgccgtggttgatgtcaaaacctgtagcattgataacaaactccaggatgtgggcaacgacgagaaggccacttctatcagcactcctagcgactcctactcatccgtccggaatcccaggattacatcattatgcttgctcaaagattgcgaagaaatccgggacaaccgcgagaaccagagacagaacgagtgtgtctcagaaatttccaactcggagaaacacgtcacattcgagaaccaccgcatagtcagtccgaagaacagcgacctgaagaacacaagccccgagcacggtggccgggggtctgaggacgagcaagagagtttccgtccatccacctcgccactgtcgcacagcagccctagcgaaatctccgggacatcatcttctgggtgcgccctggagtcttttggttcagcagctcagcagcagcagcctccatgtgagcaggaattgtcccccttagtgtgctcaccagctggtgtgtcacgcctgacttatgtctccgaacccgaatcttcctatccaactacggccactgacgatgccctggaggatagaaagtctgatataacctccgaactgtccactacaataatacagggctcccccgctgcgcttgaggagagagccatggagaaactgagagagaaagtccccttccagaaccgcggcaagggaacactgtcgtcaatcatccagaataatagcgataccagaaaagcaaccgagaccacatcactctcctccaagcccgagtacgtgaaacccgattttagatggagtaaagacccttcatcgaagtcaggcaatctgttagagacttccgaagtcgggtggaccagcaatccagaagaactggaccctatccggctggccctgctggggaagagcgggctcagctgtcaagtgggctccgcaacttctcacccagtaagctgccaggaacccatcgacgaggaccaaaggatttcgccaaaagacaaaagcacagccggcagggagttttctggccaagtgtctcatcagaccactagcgaaaatcagtgtactccaattccttcaagtaccgtgcactcctccgtggctgatatgcagaatatgcctgcagccgtgcatgctttactcacacagccctctctcagtgcagctccgtttgctcagagatacctggggacattgccgtccacagggtccaccaccctcccccaatgtcacgcaggcaatgcgacggtctgtggctttagcggtggcctgccgtaccccgccgtggccggcgaaccggtgcagaacagcgtcgcagtcggcatatgcttgggaagcaatatcggcagcggttggatgggaacctccagcctgtgtaatccctattctaatactctaaaccagaatcttctgtccacaaccaagccgttccctgtccctagcgtcggaaccaactgtggcattgaaccctgggattccggcgtgacgtcggggctgggaagcgtacgagtccccgaggaattaaagctgccgcacgcctgctgcgtgggaattgcaagtcaaacactcttgtcagtcctgaaccctaccgacaggtggctgcaagtgagtatcggggtcctgagcatctccgtgaacggtgaaaaagtggacctaagcacctaccgctgccttgtatttaaaaataaggcaattattcggccacatgccaccgaggagattaaggtattgtttatcccctcttctcccggggtgttccgctgtactttttctgtggcaagttggccctgtagcaccgacgctgagaccatcgtgcaggctgaggctctggcaagcaccgtgacgctcactgctatcgcagagtctcccgtgattgaagtggagacagagaagaaagatgttctagatttcggtgacctgacatacggtggatggaaggccctccctcttaagttaataaatagaacacacgccaccgtgcccatacggctcatcatcaacgcgaatgcagtcgcttggcggtgcttcacttttagcaaagaaagtgtccgggccccggttgaagttgcaccttgtgccgacgtcgtgacaagactggcaggacccagcgttgtgaaccacatgatgccagcctcatatgatggccaggatccggaattcctcatgatatgggtactgtttcatagccctaagaagcagatctcctcgtccgatattctggattcggctgaggaatttagtgccaaggtcgatatcgaggttgacagcccaaaccctaccccagtactgagaagcgtttccctgcgggcacgagccggtatcgccagaatccacgccccaagggaccttcaaaccatgcacttcctagccaaagtggcctcttctcgaaaacagcatctgcccctcaagaatgccggcaacatcgaggtttacctggatatcaaggtgccagaacagggaagccatttcagcgtggacccaaagaacctgctgttgaagcccggagaggagcatgaagtcatcgtttccttcacacccaaagatcctgaggcctgtgaggaacgaattctaaagatttttgtgcaaccttttgggccccagtacgaggtggtactgaagggcgaagtgatttcaagcggtagcaagccgttatccccaggcccttgtttggacataccaagtatcctttccaataagcagtttttggcctggggcggcgtgcccctgggcagaacccagctccagaagctcgctctccgaaacaactccgcttctaccacacagcacctgcgccttctgattcgcggccaagatcaggattgtttccagctccagaacacttttgggtctgaacagaggctgacatctaactgtgaaatcagaattcaccccaaagaagacatttttatcagtgtactcttcgcccctacccgcttgtcttgcatgctggcaagactggaaatcaagcagctgggaaatcggtcccaacctggaattaaattcactattcccttgagtgggtatggcggaaccagtaacctgattctagagggcgtcaaaaaattatctgactcatacatggtgaccgttaatggtcttgtgccagggaaagaatcaaagatcgtgttctctgtaagaaacactggctctagagctgcctttgtgaaagcagttggttttaaagactcacagaagaaggtccttctggacccgaaagtgcttcggatctttcccgacaagttcgtgttgaaagaacggacacaggagaacgtgactctcatttacaatccatctgaccggggtattaacaacaaaacggcaacggagctttccaccgtctacctgttcggcggcgatgagatctctcgccagcagtacagaagagctcttctgcacaaacctgagatgatcaagcagattttgccagaacatagcgtccttcagaatatcaatttcgtcgaggccttccaggatgagttgctggtcaccgaagtatatgacctgcctcagcggccaaatgatgttcagctcttctatgggagtatgtgcaagatcattctttccgtgattggggaatttagggattgcatttcaagcagagagttcctccagccgtcctcaaaggccagtctggaaagcactagcgatctgggggcttcaggcaagcatggtgggaatgtgtcattggatgtgttacctgtcaaaggtccccaggggtctcccttactatccagggcagcccgtccgccacttgatcagctggcatcggaggagccatggaccgtgctgccagagcacctgatccttgtggctccttctccctgcgatatggcaaagactggacgattccagatagtgaataattccgtgcggctgctgagatttgagctgtgttggccggcacactgtctcactgtgacccctcagcacggttgcgtagcccccgagtccaagttgcaaattcttgtttcacctaacagcagcctgtctaccaaacagagtatgtttccatggtccggtctcatttacattcactgcgacgatgggcagaaaaagattgtaaaggtgcaaatccgagaagatcttacacaggtggagctgttaacaaggctcacatccaagccattcggtattctgagcccagtgtcagaacccagtgttagccatctggtcaagcccatgactaaaccaccctcaaccaaggttgagattaggaacaagtccataacctttccgaccactgaacctggcgagacgtccgaatcctgcctcgagctggaaaaccacggtacaaccgacgtgaaatggcatctctcttctctggccccaccttacgtgaagggggtcgatgaatcgggggatgtctttcgcgctacttatgcagcatttagatgttctccaatctctggccttctagaaagccatggaattcaaaaggtttcaattactttcttacccagagggagaggtgattatgctcagttctgggacgtagaatgccaccctttgaaagaaccccatatgaagcataccctgcgttttcagctgtctggtcaatccatagaagccgagaacgaaccggaaaacgcctgtctttctacagattcactaataaaaatagaccacttggttaaaccaaggagacaggccgtctctgaagcatcagctagaatcccagaacagctcgatgtaacagcgaggggggtttacgcccctgaggacgtttatagattccgacccaccagcgtgggtgagtctagaactctgaaagtgaatctccgaaataactcctttatcacacatagtttgaaattcttgtcgccacgggagccattttatgtgaagcactccaagtatagcctgcgcgcgcagcactacatcaatatgccagttcaattcaagcctaaaagtgcagggaaattcgaggccttgctggttatccagactgatgagggtaagtcaattgctattaggcttataggcgaggcgctcggcaagaactag

SEQ ID NO: 25675 - DNA, 1545 bp, synthetic construct
  source 1..1545: mol_type = other DNA; note = Synthetic coding sequence
atgagcatcagcagcgacgaggtgaacttcctggtgtaccggtacttacaggagtcagggttctcccacagcgccttcaccttcggcattgaaagccatattagccagtcaaacatcaacggtgccttggtccctccggctgccctcatatccatcatccaaaaagggttacagtatgtcgaagcagaggtgagcatcaacgaagacggcactttgtttgacggtcgtcctatcgaatcattgagtttgattgacgccgtgatgcccgacgtcgtgcagaccagacagcaggcataccgcgataaacttgctcagcaacaggccgccgccgccgccgcagccgcagctgcagccagtcagcagggctccgccaagaacggggagaacacagctaacggtgaggagaatggggctcatacgatcgcaaataatcacaccgacatgatggaagtggacggagatgtggaaattccaccaaataaggctgtcgtgctccgggggcatgaatccgaggtgtttatttgcgcctggaacccagtgagcgatctgctcgcatccgggagtggcgactccactgcccggatctggaacttgagcgaaaattctacctccgggagcacacaactcgtcctccgccactgtatcagggagggcggacaggatgtgccctctaataaagacgttacaagccttgattggaattctgaggggactttgctcgcaaccgggagctacgatggtttcgctaggatttggacaaaggacgggaatctggcatccacccttggccagcataagggacctatcttcgctcttaaatggaacaaaaaagggaacttcattctgtctgctggcgtggataagaccactatcatatgggatgcacacactggagaggcgaagcaacagtttccatttcacagcgcccctgccctggatgtggactggcagtctaacaatacattcgcttcatgtagtacagacatgtgtattcatgtgtgcaaacttgggcaggacaggcctattaagacatttcaaggccacaccaatgaggttaacgcaattaagtgggaccccaccggcaacctgttggcctcttgctccgatgatatgaccctgaaaatatggagcatgaaacaggataattgcgtgcacgatctgcaggctcacaacaaagagatttacaccattaagtggtctcccacaggaccaggtaccaataacccaaatgcaaacctcatgttggcatctgcctcatttgattccacggtccggttgtgggacgttgatcggggtatttgcattcacacactcacaaagcatcaggagcccgtttactccgtggcctttagtccagacggtcggtacctggcaagcggctctttcgataaatgcgttcacatttggaatacacagactggtgcccttgtgcacagttacaggggaaccggaggcatttttgaggtgtgctggaatgccgctggggataaggtgggcgcctccgcctcggacggatcagtctgtgtgctggatctgcgaaagtag

SEQ ID NO: 25676 - DNA, 2034 bp, synthetic construct
  source 1..2034: mol_type = other DNA; note = Synthetic coding sequence
atggaggagaccatgaagctggccaccatggaggacaccgtggagtattgcctgttcctcataccagacgagagtcgcgattccgacaagcacaaagaaatacttcaaaagtacatagagaggataatcacccgattcgctccaatgttggttccgtatatttggcagaaccagccatttaatttgaagtataaacctggcaaaggcggcgtaccagcacacatgttcggagttactaagtttggtgacaacatagaagacgagtggttcatcgtgtatgtaatcaagcagattacaaaagagtttccagaacttgtcgcaagaatcgaggataatgacggcgagttcctgctcatcgaggcagcagactttcttccaaagtggctcgatccagaaaactccaccaaccgggttttcttttgtcacggcgaactgtgtatcatacctgcaccacggaaatctggggcagagagctggttgcctacaacacctcctacaatccctcaagccctgaacattatcaccgcacactccgagaagatcctggcatccgagtccatccgagccgccgtcaaccgcagaattcggggataccccgagaaaatccaggcctcgcttcatcgtgcacattgtttcttgcctgcaggtatcgtggccgttttgaagcagagacctcgtctggtagcagccgcggtccaagccttctaccttcgtgatcctatcgacttacgagcttgccgggttttcaagacattcctccctgaaacaagaatcatgacatcagtcacctttaccaaatgcctgtacgctcagttggtccagcagcggttcgttcccgatagacgctccggttatagattacctccaccatccgaccctcagtatcgcgctcatgaactgggcatgaaactagctcacggtttcgagatactctgcagcaagtgttcacctcatttctctgattgcaaaaagtccctcgtgacggcctcacctctgtgggccagctttctcgagtcactcaaaaaaaacgattacttcaagggtctcatcgagggctccgcacagtatcgggaacgcctcgagatggcagagaattactttcagttgagtgttgattggccagaacggctcgaggttcagtggcgtgacccgggcctgttgcaggccccccccccaggctttacaccgttcatttgcctgtccctcctgtctacttgggacaactcatccctggccatgtcgccaggcgaggagatcttgaccctattgcagacaatcccattcgacatagaagatctgaaaaaggaggcggccaatcttcctccagaagacgatgatcaatggctagacctaagccccgatcagctggaccagttactgcaggaagcggtcgggaaaaaggagtcagagtctgtgtcaaaggaggaaaaggagcaaaactatgacttgacggaggtatctgagtcaatgaaagcatttatttctaaagtgagtactcacaagggcgcggaactcccccgggagccaagcgaggcccccatcacattcgatgcggattccttcctcaactacttcgacaagatcctcggaccacgacctaacgagagcgattccgatgacctagacgatgaggattttgaatgcctagactcagatgacgacctcgactttgagacccacgagcccggcgaagaggcctctctcaaggggacactggacaacctcaagagttatatggcccagatggaccaggagctggcacacacttgcatctctaagtccttcacaactagaaaccaagtcgagccggttagccaaaccactgataataattcagacgaagaagactctggaaccggggaatccgtgatggctcccgtggatgttgacctgaatctggtgagtaacatacttgaaagctactccagccaggctggcttggccggtcccgcttctaatcttctccaatcaatgggcgtccaattgccagacaataccgaccacaggcccacctctaaacctacaaagaattag

SEQ ID NO: 25677 - DNA, 1821 bp, synthetic construct
  source 1..1821: mol_type = other DNA; note = Synthetic coding sequence
atggaggagagccccctgagccgggcccccagccggggcggcgtgaatttcctgaacgtggcgcggacatatatacctaatacaaaagtggagtgtcattatacactgcctcccggtaccatgccctcagcttcggattggattggaatcttcaaagtggaagcagcttgcgttcgagattatcacacctttgtttggtctagtgtccctgagtctactaccgatggcagtcccattcacaccagcgtccagtttcaagaacctcgccccatggatgaactggtcactctggaagaggctgacggcggctccgatattctgctggtagtgcctaaagccactgtactgcagaatcagctagacgagtcgcagcaggaacgtaacgacttaatgcaactgaagctgcagctggaaggccaggtgactgaactgagatcccgagttcaagagttggaacgagcattggctactgctagacaggaacatacagagctgatggagcagtacaagggaattagtcggagccacggcgagatcacagaggagagggacattctgtctcgccagcagggagatcatgtcgcaaggatattagaactggaagacgacatccagaccattagtgagaaagtactcacaaaggaggtcgagcttgacaggctaagggacactgtcaaggccctcactcgagagcaggagaagctgcttgggcagctaaaggaagtgcaagccgacaaggagcagagcgaggctgagctggagcccctcaaggaacagctgcgtggcgcacaggagttggccgcatcttcccagcagaaggctacgttgctaggtgaagagctggccagtgctgctgccgctcgagacaggactatcgccgagctgcaccggtcccgcctggaggtggcagaggttaacgggagactggccgagctcgggctgcaccttaaggaggaaaagtgtcagtggagtaaggaacgagcgggcctgctgcagtcagtggaagctgagaaagacaaaatcctcaagctttctgcagagattttacgcctggaaaaggccgtgcaagaggagagaacccagaaccaggtattcaaaactgagttggcccgcgagaaggacagtagcctggtccaactgtcggagtcaaagcgggaattaacggagctgagaagtgctctccgggtgctgcagaaagaaaaggagcaactccaagaggaaaaacaagaacttttggaatacatgcgcaagttggaggctcgcctggagaaagtggctgacgaaaaatggaacgaagacgcgactaccgaggacgaagaggctgctgttgggcttagctgtccagccgcactcaccgattcagaagacgagagcccagaagacatgcgtttgccaccgtatgggctgtgcgagcgcggggaccctggaagtagccccgcagggcccagggaggcatcccccctggtcgtgatcagccaacccgccccaatcagtccccacttatccggccccgccgaagactcgtcctcagactccgaagctgaagatgagaaatctgtattaatggcggctgtacagagcgggggcgaggaggcaaatctactcctgcctgagctggggtctgcattctacgacatggcatccggctttacggtcggaacgctgtccgagacatcaacagggggacccgcgactccaacctggaaagaatgtccaatctgtaaggagaggtttccagccgaatctgataaggacgccctcgaagaccatatggatgggcacttcttctttagtactcaggacccgtttacctttgagtag

SEQ ID NO: 25678 - DNA, 2997 bp, synthetic construct
  source 1..2997: mol_type = other DNA; note = Synthetic coding sequence
atgaaccggcggcggaagttcctgctggccagcgtgctggccctgcagaacagtagtttcatttacccttcatgccaaaagtgtttcagccggattatcctagtgagcaagcgttctaactgtccaaagtgtggctccaccggggagagtgggaatgcgaattaccgctacaagcttagtcttaaggtggctgagtccaacaaactgttcgttataactgtgtttgggagctgtctggatactttcttcgggctgacagccactggcctacacaggtacattcaggatcccaataaaattccagagaccctggacaatgacaccacccagaacctgcttacgaaggcggtcgaaacatgcttcgtggggcagtccttcatctttggggttactaacttcgaaaaccagcccggtcaagggtcagatgcatccaacttccttcaacagtgcagcgatcataaaaggaaggctaaggctcttgtggcttgtcagatcgtcctccccgaccctggaattgctgggtttactgtgatcgattacttccaccagctcctgcagacattcaactttagaaaactacagtgtgatagccaggcccctaataaccatctgttggctctggaccactccaacagtgatctgagctctatatatacctccgattcaacctcagatttttttaaatcctgttcaaaagatacattctctaaattttggcagcccagtctagaatttacatgcatagtttcgcaactcaccgacaacgatgacttcagcgccagtgagcagtcaaaggcttttggtaccctccagcagaacagaaaatctatctcgatcgctgaggcaaccggatccagcagttgtcacgatccaatccaagactcttggagtctagtgtcttacatggacaaaaaatcaacagctgaaaaactggggaaggaactgggtctgcaggccaaggagctcagtgcagtccatagttcacaccatgagataggagtcaacgacagcaacctattctcacttgaaatgagggagcctctggagtccagcaatactaagtcttttcattcagcagtagaaataaagaaccggtctcagcacgagttgccttgttttcagcaccacgggattgacacgcccacttccctgcagaaaagatctgcgtgctgccctccttcccttttgcgactggaagaaaccgcaagttctagccaggacggcgatccccagatttgggatgaccttcctttcagtgagtctcttaataagtttttagctgttttggagtccgagatagccgttacccaggctgacgtgtcttctcgtaagcatcacgtggataatgatatagacaaattccatgcagatcattccaggctctctgtcaccccacaaagaactaccggggcactgcacactccgccaatcgctctcagatcctcacaggtgatcgtgaaggccaattgttctaaggatgactttctgtttaattgcaagggcaacctttctcccagtgtcgaaaaggaatcccagcctgataataaagtggaggcggtatctgtgaaccacaatggtcgggacatgagtgagtacttcctcccaaatccttacctctctgccctgtcatcttcgagtaaagatctggagactattgtgacccttaagaagacaattagaataagcccccacagagagagtgaccattccagcctaaataacaaatacctgaacggctgtggcgaaataagcgttagcgagatgaacgagaaactaacgacgttgtgttatcggaaatacaacgacgtcagcgacttgtgcaagctcgaaaataagcagtactgtcggtggtctaaaaatcaagacgattcttttacaatttgccgcaagctgacttaccccttggagaccttgtgtaattcacctaatcgaagcaccaacacgctgaaggaaatgccttgggggcacatcaacaacaatgtgactcagtcatatagcatcggctatgaagggagttatgatgcttctgctgacttattcgatgatattgctaaagagatggacattgccactgagattactaagaagtcacaggacatcctgctgaaatggggtactagcctcgctgagtcacacccatctgagtctgacttcagtcttcgctccctgtccgaggattttatccagccttcccagaaattgtcccttcagagcctgagcgatagcagacatagcaggacctgttcccctacaccccactttcagtcagacagcgagtacaatttcgaaaactcccaagacttcgtgccttgctcccaatccacccctataagtgggttccaccaaacacgaatacatggcatcaatagagcattcaagaagcccgtcttctattctgatctagatggaaactacgaaaagattaggattttccccgaaaatgataagcagcaggcttcgccatcttgtcccaaaaatatcaagacccctagccaaaagattcgtagcccgatagtttctggggtgtcccagcctgatgtttttaatcattacccttttgcagagtgccatgaaactgatagcgacgagtgggtgccccccaccactcagaagatctttccttccgatatgttagggtttcagggcattgggcttggcaagtgcctggctgcttaccactttcccgatcaacaggaactcccccgcaagaaactcaaacatatcagacagggaaccaacaagggtctgatcaaaaagaagctaaagaatatgctggcggccgttgtaaccaaaaaaaagacccataaatacaattgcaaatcctcaggttggatctcgaaatgccctgatattcaggttctggcagcgccacagctacacccaatcctcgggccggattcatgctcggaagtaaagtgttgccttcctttctccgaaaagggaccacctagcgtgtgtgagacacgtagtgcatggtcccccgagctttttagttag

SEQ ID NO: 25679 - DNA, 471 bp, synthetic construct
  source 1..471: mol_type = other DNA; note = Synthetic coding sequence
atggccgacagccccggcggctacaaggagtgcggcaccaacgagggtccccaggaggacgaaaacggcagcagtgcgagcggctcttccaaggtgcggcagctgtggtctgaagactcctgcgagtctgggaagctacctgctacccggaccgtttattgtatgaatgaagctgagatagtagacgtggccctcgggattttaatagaatctcgcaagcaggaaaaggcctgtgagcagccagcgcttgctggcgctgacaacccagagcatagtccaccatgttctgtgtctccccatacttcgagcggaagtagtagtgaagaggaagatagcgggaaacaggctctcgccccaggtctcagcccatctcagaggccaggcggaagctcctccgcctgttcacgcagtccagaggaggaggaagaggaagatgtgctcaaatatgtacgggagatcttcttttcgtag

SEQ ID NO: 25680 - DNA, 1377 bp, synthetic construct
  source 1..1377: mol_type = other DNA; note = Synthetic coding sequence
atggccgagctgcagatgctgctggaggaggagatccccggcggccgcagggccctgttcgacagttataccaatctggagagggtcgcggactactgcgaaaacaattatatccagtctgcggataagcagcgagcactggaggagactaaagcctacactacccagtctctggcttccgtggcttacttaataaacacgcttgccaataacgtgcttcaaatgcttgacattcaggccagtcagctcaggagaatggagtcaagcataaaccacatttctcagaccgtcgatattcataaggagaaagtagctagaagggaaatcggaatactgacaaccaacaagaataccagccggacacataagatcatcgctccagcaaatctggaaaggccagtgcgatacatccgaaaacccattgactacacaatcttggatgatataggtcacggagttaaagtaagcacacagaatatgaagatgggcggtctcccacgtacaacccccccgacccagaaacctccatcgccccctatgtccggtaagggcacactgggctcgtctggaagcagcggagggtcacacccctccagcaggagttcttctcgagagaattctggcagtggatcggttggggtgccaatagcggtacctacacccagccctccttctgtgtttcccgccccagcagggagcgccggaactccgcccctccccgccacctccgctagtgcccccgcgcctcttgtcccagctactgtaccatcctccacagctcctgacgctgccgcggggggggcacagacgttagccgatggatttacttcccccactcccccagtcgtctcgtcgactcctccgacggggcatcctgtgcagttttactcgatgaataggccggcctcaagacacacacctcctacaattggcggctccctgccatatagaagaccaccttccataacaagtcagacatccctccagaaccagatgaatggaggaccattttattcccagaaccccgtgtccgacactccacccccccctccgcctgttgaagaaccagtttttgacgagagcccgccgcccccccctccacccgaggactacgaggaagaggaggctgcagtggtggagtatagcgacccttacgccgaagaagatccgccttgggcgcctcgctcctacctggagaaagttgttgctatttacgactacaccaaagacaaggaggatgagctgtcatttcaggaaggcgcgatcatctacgtcatcaagaagaacgacgacggctggtacgagggcgtaatgaacggggtcacaggtctgtttcctgggaactatgttgagagtatcatgcattatagcgagtag

SEQ ID NO: 25681 - DNA, 5223 bp, synthetic construct
  source 1..5223: mol_type = other DNA; note = Synthetic coding sequence
tgaaagatctaccccgaggagatcacccccctgctgcccgccatcagcggggagaagattgctgaagaccaaacgtgtttcttcctgcaaatcctgctcaagtatatggtaattcaggcagcctccctcgagtggaagaataaagagaaccaggataccggtttcaagtttctcttcaccctgtttcgcaagtattatctaccccacctgttccctagtttcacaaaactgaccaacatctacaaaccagtgctggacatccctcatttgcgccccaagccggtatacattaccactacaagagacaatgagaatatttattcgacgaagatcccgtacatggctgccagggtcgtgtttatcaaatggattgtgacatttttcctcgaaaagaagtacttgacagccacccagaacacaaagaacggcgtggacgttcttccaaaaatcatacagaccgtgggcggcggggcagttcaggagagagcccccgagctggacgggggcggacccacagagcaggataaatcccacagcaattctagtaccctctccgaccggaggttgtctaattcctctttatgtagtatagaggaagagcaccgtatggtgtatgagatggttcagcgcatattgctctccacacgaggatacgttaattttgttaatgaggttttccaccaggcttttttgctgccgtcctgcgagatagcggtgacccgtaaagtggtgcaggtgtatcggaaatggatcctgcaggacaaaccagtcttcatggaggagccggatcgtaaggacgttgcccaagaggatgccgaaaagcttgggttttctgaaaccgatagcaaggaggcctcctctgagtcctcagggcacaaacggtcctcatcttgggggaggacgtattcatttacttccgccatgtcccgtggttgcgtcaccgaagaggaaaatactaatgttaaagctggtgtccaggcactcttgcaagtgtttctgacaaacagcgctaacatttttttactggagccgtgtgctgaagttccggtgctgttgaaggagcaggtcgatgcatgcaaggcggtgcttataattttccggcggatgattatggagctgaccatgaataaaaagacatgggaacagatgctgcagatactgcttagaattaccgaggctgtcatgcagaagccaaaagataaacagataaaagacttattcgcgcaatcactggccggcttgcttttcaggaccctgatggtggcctggatcagggccaacttgtgcgtttatattagtagagagctctgggacgactttttaggagttctcagcagcttgacagagtgggaagagctaattaatgagtgggccaatatcatggacagcctcactgcagtgctggccaggaccgtttatggggtggagatgacaaatttaccccttgataagttgagcgagcaaaaggaaaagaagcaaagaggcaaaggctgtgtgctggatcctcagaaaggaactactgtcggaagatcttttagtctgtcatggcgttcgcacccggatgttaccgaacctatgaggtttcgctccgcaacgaccagcggcgcccctggcgtagaaaaagctagaaatattgttaggcagaaagccacagaggtggaggaatgtcagcaatccgagaacgccccagccgccggttccgggcatcttacagtcggacagcaacagcaggtgcttcggtcctccagcacctctgatatccctgagccattatgcagtgacagcagccaggggcaaaaggccgagaatacccaaaacagtagctcctcggaacctcaaccaattcaggagaataagggccacgtcaaaagagagcacgaaggtattaccattctggttagacgctcctcatctcctgccgaactcgatctcaaagacgacctgcaacagacccagggcaaatgcagagaacggcagaaaagtgagtcaaccaattcagacactacattaggatgcaccaatgaggccgagctgtcaatggggccatggcaaacatgtgaagaggatcctgagctgaatacacctacagatgttgtggctgatgcagacgcgcgccattggttgcagctttctcccactgatgctagcaatctgacagatagtagtgaatgcctaaccgacgactgcagcatcatcgccgggggcagtttgacgggatggcaccctgacagcgccgccgtgttatggcggagagtcctgggcatcctaggggacgtcaataacatccagtctcccaagatccacgcgcgtgtgttttgctacctttatgaactgtggtataagctcgcaaaaatccgtgataaccttgctatctcacttgacaatcagtcctctccgagtcctcctgtgctgatcccaccccttcgtatgtttgcgtcttggctgttcaaggccgcaaccctcccaaacgagtacaaagagggaaaattgcaagcataccggctcatctgtgcaatgatgactcggcgccaagacgtgctacccaattccgactttctggttcacttctacctcgtcatgcacctaggcctgacgtccgaggatcaggatatccttaacactattattaggcactgtccgccacgctttttctcactcgggtttcctgggttttccatgctggtgggcgattttatcacagctgccgcccgggtcctgtcaactgatattctgacggcccccagatccgaggcagtgacagttctgggtagcctggtctgttttcccaatacctatcaagagatacctctgctgcagagcgtcccggaggtaaatgaagcaatcactggcacggaagatgtgaaacattacctcatcaacatcctgctaaagaacgccacagaagaaccaaacgaatatgcccggtgcatcgctgtctgcagccttggtgtgtggatttgtgaggaattggcacagtgtactagtcacccccaagtgaaggaagccatcaacgtcatcggagtcacactgaaattcccaaataaaattgtggcccaggtggcttgtgacgtcctgcaactgctggtatcatactgggagaaactgcaaatgttcgagacgagtcttcccagaaagatggcagagatcctggtggccactgttgccttcctattgccaagtgccgagtattctagcgtggagaccgataagaaattcatcgtcagcctgcttctgtgcttactagactggtgtatggccctgcctgtctccgtgctcctgcaccctgtgagtaccgctgttcttgaggagcagcactctgcaagggccccgctactagattatatctaccgggtactgcactgctgtgtctgcggaagttccacctatacccagcagagccactatatccttacacttgcagatctaagctccactgattatgatccgtttctcccacttgctaatgttaaatcctcagagccagtgcagtaccattcatccgccgagctcggcaacctgctgacagtagaagaagagaagaagcgaaggagcctggagctcatccccctcaccgcccgaatggtgatggctcatctggttaaccatcttggtcactacccgctgtcaggcgggcccgccatcttgcacagcctggttagcgagaatcacgataatgcacatgtggaaggaagcgagctaagctttgaagtcttccggtctcccaaccttcagctattcgtattcaacgatagtacgttaatctcttatttgcagaccccaactgaggggccagtgggtggctctccagtaggaagcttgtccgacgtacgggtaatagtgagggatataagtgggaagtattcatgggatggcaaagtgctttacggccctcttgagggctgcctggcacctaacgggcggaacccttcatttctcatttcgtcttggcatcgcgatacatttgggccgcagaaagatagctcccaagttgaggagggcgacgacgtgctggacaaattgttggagaacataggccacacgtccccagaatgcctgcttccatcacagctcaatttgaatgagccttcccttacgccttgcggtatgaattatgaccaggagaaagagatcatcgaggttattctacgccaaaatgcacaagaggacgagtatattcagtcccacaactttgatagcgctatgaaggtgacctcacagggacagcctagtcctgtcgagcctcggggcccattctacttttgcaggctgctcctcgacgatctggggatgaactcctgggaccggagaaagaatttccaccttttgaaaaaaaacagcaaactcctgcgagagctgaaaaatctcgactcacgacaatgcagagagacccacaaaatagccgtgttttacatcgccgaaggccaggaagacaagtgttcgatcctctctaacgaaagagggtcccaggcttatgaagattttgtcgccggcttggggtgggaagttgatctgtctacacattgcgggttcatgggtggtctgcagcggaatggctcaacaggacaaaccgccccgtactatgccacgtcaaccgtggaagtgatttttcacgtgtctacgcgcatgccttcagactctgatgattcattgactaaaaagttgagacacctaggaaatgatgaagttcacatagtctggtctgaacattccagagattataggcgaggaatcattcccacggccttcggggacgtgagcatcatcatataccccatgaagaaccatatgttcttcatcgccatcacaaaaaaacccgaagtccccttcttcggacctctgtttgacggagccatcgtcagcggcaaattgctgccgtccctggtgtgtgctacctgtatcaacgcaagccgggcagtcaaatgtttgatacccctttaccaaagcttttacgaggagagggctctgtacctggaagcgataatccaaaatcatcgggaagtcatgacatttgaagattttgctgcacaggtttttagtcccagtccgagctattcactcagtggcacgggggccctcgccagcagcctgagtgctgaccttgaggagcccctcagcgaggaggaaacagagcatcctctgcttccactcccccgagccactaaaccaaggatcagcagaaaattcaggtgctgtacttccgccctgagccggtccagccactag

SEQ ID NO: 25682 - DNA, 1836 bp, synthetic construct
  source 1..1836: mol_type = other DNA; note = Synthetic coding sequence
atgccccacctggacatgaagacccacgtgtgccccagcgtggagggccccaaaaagaaaggcggaataacctgtttttgctgtggaggacccttccgagcagccgatcgctcaaagacccgcagcccaaagctcagccactccccacaacctccatctctcggggacccagtcgagcacctgagtgagaccagtgcggacagccttgaggctatgtccgagggtgacgcgcctacacctttctcgcgtggttctaggacgagagcctcactccccgtggtgcgttctacaaaccagaccaaagagagaagcctgggggtgctctatctgcagtacggggacgagactaagcagctcagaatgcctaatgaaatcacctctgccgatacgatccgggcactctttgttagcgctttcccgcaacagctgacgatgaaaatgctcgagagtccttctgtcgcaatctatattaaggatgagtcgcgcaatgtatactacgagttaaatgacgtgcgcaatattcaagatcgctcccttctgaaggtctacaacaaagacccggcccacgcctttaatcacactcccaaaacaatgaatggtgatatgcgcatgcagcgcgaactcgtctatgcccggggcgatggcccgggcgctccgcgccccgggtccaccgcccacccgcctcacgctattccaaacagcccaccttctacccctgtgcctcactcaatgcccccctccccctctcggatcccgtatggtggcactagatctatggtggtccctggcaacgccactatccccagggaccgaatctccagcctgcccgtgtcaaggcccatctcccctagtccaagcgccattctagaacgccgcgatgtgaagccagacgaggatatgtccggtaaaaatattgctatgtataggaacgagggcttttacgcggatccatatctttatcatgaggggcgtatgtctatcgcaagctcacacggtggccatcctcttgacgttcctgaccacatcatcgcgtatcaccgaacggctatcagatcagcgtcagcgtactgtaaccccagtatgcaagccgagatgcacatggagcaatcactctacagacaaaaatcccgaaaataccccgatagccaccttcccaccctcggctcaaagacacccccagcttctccgcatcgggtaagcgacttgaggatgatcgatatgcacgcccactataatgctcatggaccaccccacactatgcagccggatagggcatcacctagccgacaagcatttaagaaagagccaggcacccttgtgtacatagaaaaacctaggtccgccgccggcctatctagcctggtagatcttggaccccccttaatggagaaacaagtttttgcgtattcgacggccaccatccccaaggacagagaaacctctgaaaaaatgatgaagactacagccaacagaaatcacaccgactccgcgggcaccccccatgttagcggaggcaaaatgctttccgccttggagtccactgtgccccccagccaaccaccccccgttggtacttcagcgatacatatgtccctcctcgagatgcgcagatccgtcgccgagcttcgcctgcagttgcagcaaatgagacaactgcaacttcagaaccaggaactcctccgcgccatgatgaagaaagccgagctggagatctcgggtaaagtcatggaaactatgaagcgcctcgaagatcctgtccaacgacagagagttctggtagagcaggagcgccagaagtatcttcacgaagaggaaaagatcgttaagaagctttag

SEQ ID NO: 25683 - DNA, 189 bp, synthetic construct
  source 1..189: mol_type = other DNA; note = Synthetic coding sequence
tgagagaaccccctggtgtactgcgacggccacggctgcagcgtggccgttcatcaggcctgttacggcattgtccaggtccccactggaccctggttctgcaggaaatgcgagagccaggagcgcgcggctagggtggtgggcccaatgtggtttgtcccttgtatattccagcggtacaacctctag

SEQ ID NO: 25684 - DNA, 1869 bp, synthetic construct
  source 1..1869: mol_type = other DNA; note = Synthetic coding sequence
atggccatggcccccagccccagcctggtgcaggtgtacaccagccctgcagccgtggcagtgtgggaatggcaagatgggcttgggacctggcatccttattcagcgacagtatgctccttcatcgagcagcaattcgttcaacaaaaaggccaacgctttggacttggctccctcgctcatagtattcctctggggcaggcagatccctcactggccccttatatcattgatttaccgtcgtggacgcagttcagacaggatacggggaccatgcgcgcggttagaaggcacctatttcctcagcacagcgcccccgggcggggcgtcgtatgggagtggctgtcggacgacgggtcttggacggcatatgaggcatccgtgtgtgattacctcgaacagcaagtcgctagggggaatcagctggtcgaccttgcccccctggggtacaactataccgtgaactacaccacgcacactcagactaataaaacctctagcttttgccgctcggtgagacgccaggccggccctccataccccgtcaccaccattatcgctccaccgggccatactggcgtggcctgcagttgtcatcagtgcctctccggatctagaactggaccagtgtccggacggtatcggcatagcatgacaaatctccctgcatatcctgttccccaacatccccctcatcgaaccgcatccgtcttcggtacacatcaggcgtttgctccctataacaagccctcactgagcggcgcccgaagcgcccctcggctgaacacgacaaatgcctggggcgcggcacctcccagcttgggttcccaaccgctgtatagatcaagcctatcccacctcggacctcagcatctgccgcctgggagtagtacttcaggcgcggtgagcgcctctttgccctccggtccctcatcctcccccggcagcgtgccagcgaccgttccaatgcagatgcctaaacccagccgcgtccagcaggcacttgcagggatgacatcagtgctcatgagtgccatcggtttaccagtgtgcctgagtcgggccccacagcccactagtcctcctgcaagcagactcgcttccaagtctcatggctccgtgaaacgccttaggaaaatgtctgtcaaaggtgctaccccaaaaccagagccggagcccgagcaggtcataaagaactatacagaggaactgaaagtgccgcccgatgaagattgtataatttgcatggaaaaactgtccactgcttctggatactctgatgtaaccgattccaaggcaattgggtcactggcggtcgggcatctaactaagtgcagccacgcttttcacttgctatgtctgctggccatgtattgtaacggaaataaggacggatcgcttcagtgtcctagctgcaagacaatatatggagagaagactggaacccagccccagggcaaaatggaggtgctgagattccaaatgtcacttcctggccacgaggactgcggcacaattctgatcgtgtactctattcctcacggcatacaaggccctgaacacccaaatccaggcaagcccttcactgcacgagggtttcctcgtcagtgctacctgccagacaacgcacagggtaggaaggtgctcgaactgctcaaagttgcatggaagcggaggctgatcttcactgtggggaccagctctactaccggggaaaccgacacggtcgtgtggaacgaaatccatcataagactgagatggaccgaaacattacaggtcacgggtatccagatccgaactacctacagaacgtcctggccgaactggcagcccagggcgtgactgaggactgtttggagcaacagtag

SEQ ID NO: 25685 - DNA, 546 bp, synthetic construct
  source 1..546: mol_type = other DNA; note = Synthetic coding sequence
atgggcggccggagcgcccaggccggcctgggcacccggatcaccccaatgatggaactgaaaccaaatgccgggagcgaccgcgcctgggtgtggaacacccatgctgatttcgccgacgaatgccctaagccggagttactggccatcaggtttttgaacgctgaaaacgcccaaaaattcaagaccaagtttgaagaatgccgcaaagaaatcgaagagcgagagaagaagggtgatgtggtcccttgggtaggtggcctgctctgccggctgaccctgcacctaactatattacccggtggttgttttttttgtctccctgacaaacatagccgtgttctgtggcctccgcatgtttcgagagtaatgcaactccctggtgataccggggcctcctggggggccctgtccacttgccaatgctgctggccacagtcaaactgggccggcattggcgtgagggccctgcctggagcacaccagaaagtgctttacgatggacccagattcgtttcccaacgtgcttggtctcccttgccgtag

SEQ ID NO: 25686 - DNA, 378 bp, synthetic construct
  source 1..378: mol_type = other DNA; note = Synthetic coding sequence
atgagcagcagcggctacccccccaaccagggcgccttcagcaccgagcagagtcgctacccccctcattctgtgcagtacacattccctaatacacgtcaccagcaggaattcgccgtgcccgattatcggagcagccatctggaagtgtcccaggcttcccagctcctccaacaacaacaacagcagcagctgaggcgccgaccatctctcctctccgaattccatcccggctccgacaggccacaggagaggaggacttcttatgagccgttccatcccgggccaagccctgtcgaccacgactctctagaatccaagagaccccgccttgagcaggtgagtgacagtcatttccagcgagtcagtgcagcgtag

SEQ ID NO: 25687 - DNA, 318 bp, synthetic construct
  source 1..318: mol_type = other DNA; note = Synthetic coding sequence
atgctgcggtgcggccagatgatcttcgcccaggccctggtgtgcagacacctgggtcgggattggagatggacccagagaaagagacagcctgattcatacttctcagtactaaacgccttcatagatcgtaaagattcctactatagtattcatcagatcgcccagatgggtgtcggtgaaggcaaatccataggtcaatggtacggcccaaatactgtggcccaggtcctcaagaaacttgccgtgtttgacacatggagctccctggctgttcacatagctatggataatacagttgtcatggaggagatatag

SEQ ID NO: 25688 - DNA, 1305 bp, synthetic construct
  source 1..1305: mol_type = other DNA; note = Synthetic coding sequence
atggacatcgacaaggacctggaggcccccctgtacctgacccccgaaggctggtccttgtttttacagaggtattaccaggttgtgcacgagggtgctgagctgcgccacctggatacacaggtccaaagatgtgaggatatcttacagcagctccaggcagtcgtgccacagatcgacatggagggagacaggaatatctggatagtcaaaccaggcgcgaagagcagaggtcgcggaataatgtgcatggatcaccttgaagaaatgctgaaactagtcaatggcaatccagtggtgatgaaggatggcaaatgggttgtgcaaaaatatatcgaacggcctctgctcatctttggaactaagtttgacctacggcagtggtttctggtaacggactggaacccccttactgtttggttctatagggactcttatataagattctcaacccagccattttccttaaaaaacctcgataattcggtgcacctgtgtaacaactcaattcagaaacacttggaaaattcatgtcacaggcaccccttgctacctcccgacaatatgtggtcttcccagcgatttcaggctcacctccaggaaatgggcgcgccaaacgcctggagcaccataatcgttccaggaatgaaagatgccgttatacatgccctgcagacaagtcaggacactgttcagtgtaggaaggctagctttgagctgtacggcgctgactttgtatttggggaagacttccagccctggcttattgagattaacgcgagcccaactatggcgcccagtactgccgttaccgctaggttgtgcgccggcgtgcaagctgacactctgcgggtggtcatcgacagaatgttggatcgcaactgtgatactggtgccttcgaattaatctataagcagcctgctgttgaagtcccccaatatgtaggcatccgacttctcgtcgaaggatttacaatcaagaagcctatggcaatgtgccatcgaaggatgggcgtacggcctgcagtccccttactgacacagagagggagtggtgaagccagacatcattttccctctctccatactaaggcccaactgccctctcctcacgtgctccgccaccagggacaggtcttacgacggcagcactctaaattagtggggactaaagcactatccactaccgggaaggccctgcggacattgccgacggctaaggtgttcatctctctgcccccaaatctcgactttaaagtggccccaagcatcctaaaaccgagaaaggtgggcctcgacctttag

SEQ ID NO: 25689 - DNA, 576 bp, synthetic construct
  source 1..576: mol_type = other DNA; note = Synthetic coding sequence
atggccatcggcaagcggctggccaccctgcccaccaaggagcagaagactcagaggctgatatctgaactctccctgctcaaccataagctgccagccagggtgtggcttccaactgccggattcgatcaccacgtggtgcgggtgccccatacacaggccgtggtcctaaattctaaagacaaagcaccctatttaatttacgtggaggtccttgagtgcgaaaattttgacaccacgagcgtgccggctcggatcccagaaaacagaatccgcagcacacggagtgtcgaaaacctgcccgagtgtggaataacacatgagcagcgggcaggcagcttctctactgttcccaattatgataatgatgacgaggcctggtccgtcgacgacattggcgaattgcaggtagaactgcccgaggtccataccaatagctgcgacaatatttcccaattcagtgtggactccatcacatcacaggagagtaaagagcctgtctttatcgccgctggggacattagaagaaggctgtctgagcagctggcacatactccaacagcctttaaaaggtag

SEQ ID NO: 25690 - DNA, 903 bp, synthetic construct
  source 1..903: mol_type = other DNA; note = Synthetic coding sequence
atggccaagtggggccagggcaacccccactggatcgtggaggagcgtgaggacggcaccaatgtcaataactggcggtggaggacagaaagagatgcaacatccctgtctaaggggaagtttcaagagcttttagtcggcattgtggtggagaatgacgccggtcggggcgaaatcaacgagcttaagcaggtagagggcgaggcgagctgctcctctcgcaaagggaagctcatattcttttacgagtggaatatcaagctaggatggaaaggaattgttaaagagagcggtgtgaagcacaaaggactaattgaaatccccaacctgtccgaggagaacgaggtagacgatacggaggtatccctgtctaagaagaagggcgatggggtgatcttgaaagacctgatgaagaccgccggcaccgccaaggtcagagaggccctgggcgactatctcaaggcactgaaaacggaatttacaaccgggatgatcctgcccaccaaggcgatggccacccaggagctgacagttaagcgtaagctgagcggaaacacgttacaggtgcaggcttctagccccgtggctctgggtgtgcggattccaaccgtggctttacatatgatggaactttttgacacaacagttgagcagctgtacagcatctttacggttaaagaactgaccaacaaaaagatcattatgaaatggcggtgcggaaattggcccgaagaacattacgccatggtcgccttaaacttcgtgcccacattgggccagactgagttgcaactgaaggaatttttatctatttgtaaggaggagaacatgaagttctgctggcaaaagcaacactttgaagaaattaaggggtccctgcagctgacccctctcaatggctag

SEQ ID NO: 25691 - DNA, 1137 bp, synthetic construct
  source 1..1137: mol_type = other DNA; note = Synthetic coding sequence
atgaaggacgtgcccggcttcctgcagcagagccagaacagcggcccgggccagccggcagtatggcatcgcctggaggagctttataccaaaaactttatgaagacgctgtctgtcaacctgaatactggtaagtctctgagctctgtcttccactttgagaacgaatgcatcgatgcaaggaggtgctctaaggctggtggattctacttcagggttaaccccctttccttggtggaaatcattttacacgtggtcaggcagatgactgaccccaatgtcgcactgacttttttagaaaaaacccgcgaaaaagtgaagagctccgacgaagcagtaatcctctgcaagacggccataggagccttgaagctcaatatcggggatttacaagtaacaaaggaaacgattgaggacgttgaagaaatgctgaataacctacccggagttacttccgttcacagcaggttctatgacttatcaagtaaatattaccagaccattgggaatcacgcaagctattacaaagacgccctgcgatttctaggttgcgtagatattaaagaccttcctgtaagtgaacagcaagagcgggctttcaccctgggtcttgctggcctcctgggggaaggggtgtttaattttggagagcttttgatgcacccggtgcttgaatccttgcgaaacacagatagacagtggctgattgatacactgtacgcttttaattctggaaacgtggagaggttccaaactcttaagaccgcatggggacagcagcccgatcttgccgccaacgaggcccagcttctgcggaaaatccaactactgtgcctgatggaaatgactttcacaaggcctgccaaccacagacagcttaccttcgaggagatcgctaagtccgccaagattactgtcaacgaagtggaactactggtgatgaaggccctgtcggttgggcttgtaaaggggtcaattgatgaggtagacaagcgggttcacatgacttgggtccagcctcgtgtgctcgacttacagcagatcaagggcatgaaagaccgcctcgaattctggtgcaccgacgttaaatccatggagatgctcgttgagcaccaagcacacgatatattgacttag

SEQ ID NO: 25692 - DNA, 603 bp, synthetic construct
  source 1..603: mol_type = other DNA; note = Synthetic coding sequence
atgctgctggagcagaacctgatcaccgtggacatgcagaagcactccctgacattctggtggctggtggagtgctggccgcaggttttcaataaactgataagacggtacaaatatctcgaaaaggggttcgaggatgaagtgaagaagctccttctgttcttgaaaggctttagcgagtccgaacgcaataagctggctatgctgacaggcgtgttactcgctaacggtacactgaatgcctctatcctgaactccctgtataacgaaaatctggtaaaggagggcgtttctgcggccttcgcggtaaaactgttcaagagttggatcaacgaaaaggacatcaacgccgtggcagctagtctgcgaaaggtgagcatggataacagactcatggaacttttcccggcgaacaagcagtcagttgaacacttcacaaagtattttacagaggccggactcaaagagttatcggagtacgtgaggaaccagcaaacaataggtgcccgaaaggagctgcagaaagagctacaggaacaaatgtcccgcggcgatccctttaaggatatcatcctgtatgtgaaggaggagatgaagaaatag

SEQ ID NO: 25693 - DNA, 1446 bp, synthetic construct
  source 1..1446: mol_type = other DNA; note = Synthetic coding sequence
atggccagcgccgccagcgtgaccagcctggccgacgaggtgaactgcccaatatgccaaggtacgcttagagagcctgtgacaattgattgtggccacaatttctgcagagcctgcctgacacgctactgcgaaattcctgggccggatcttgaagagagccccacctgccctttgtgcaaggagccattccggcctggcagttttagacccaactggcagctcgcgaacgtcgtcgagaatattgagcgtctccagctggtcagcacactcggcctgggcgaggaagatgtgtgccaggaacacggggaaaagatttacttcttttgcgaggacgacgagatgcagttgtgcgtcgtctgcagagaagctggtgaacatgcgacgcacactatgcgttttctggaggacgctgctgccccctaccgagagcaaattcataagtgcctgaagtgccttcggaaggagcgagaggaaatccaggagatccaaagccgggagaataagaggatgcaggtcctgctgacacaggtcagcactaagagacagcaggtgatctccgaatttgctcatcttaggaagtttctggaggagcagcagtctattttgctggcccagctagagtcacaggacggagatattctgcgacagcgggatgagtttgatctcctggttgccggcgagatatgccgattttctgccctgatcgaggagctggaagaaaaaaatgaacgacccgcgagagaactactcaccgatataagatcgacactgattagatgcgaaacccgcaaatgtcgcaaaccagttgccgtgtcccctgaattgggacagaggattagggacttcccccagcaggctctgcccttacaacgtgaaatgaaaatgttcctggagaagctctgtttcgaactcgattacgagcccgcccacatctcacttgacccacagacgtcacatcccaagttactactctccgaagatcatcagcgcgcccagttttcgtataaatggcagaatagtccagacaatccacaacgattcgatagagccacgtgcgttctcgcccatacgggtattaccggagggcgccacacatgggtggtgtctattgatttagcccacggcggtagttgtaccgtgggcgttgtgtccgaagatgtgcagagaaagggggaactgaggcttcgtcctgaagaaggggtgtgggcagtgcggctggcctggggctttgtgagtgccctgggctcatttcccacacggctgacactcaaggagcaacccagacaggtccgagttagcctcgattatgaggtggggtgggtcacttttaccaacgcagtgacacgggagcccatatacacattcactgccagcttcacccgcaaagtgatccccttttttgggctttggggacgcggcagtagcttttcgctcagcagctag

SEQ ID NO: 25694 - DNA, 261 bp, synthetic construct
  source 1..261: mol_type = other DNA; note = Synthetic coding sequence
atgggcaagatggtgagcgtgatcaacaccgtggacaccagccacgaggacatgatacacgacgctcaaatggattactacgggactcgcctggctacatgttcctctgatcggagcgtgaagatctttgatgttcgtaatggcgggcagattctgatcgcagacttaaggggtcacgagggccccgtttggcaggtcgcatgggctcaccctatgtatggtaacattctcgctagctgctcctacgaccgaaaagtgtag

SEQ ID NO: 25695 - DNA, 660 bp, synthetic construct
  source 1..660: mol_type = other DNA; note = Synthetic coding sequence
atggagcccagcgcccagcagctgcagctggccgccagcctgcccgctaatctgagtaatttttgccaggggtctgagatgcctactaccagtagacccgctcttgacgtgaaaggagggacttctccagccaaggaggacgctaaccaggagatgtcttcagttgcatactctaatctggcagtaaaggaccggaaagctgtcgctatcttgcactacccaggagttgctagcaacggcacaaaggcttctggagccccgacatcctcttccggctcacccattggctcacccacaacaacacctcctaccaagccaccttcatttaacctgcaccctgccccccaccttctggctagtatgcacctacagaaactgaattcccagtaccaaggcatggccgctgctacacctggccagcccggagaggcaggccctttacagaactgggacttcggcgcacaggccggcggtgccgagtctttatctccttcagccggcgctcagagtccagctatcattgatagcgacccagtcgatgaggaggttctgatgtcattggtcgttgagctgggactggatcgtgccaatgaactgccagagctgtggctgggtcagaatgagtttgactttaccgccgacttcccctcctcgtgctag

SEQ ID NO: 25696 - DNA, 396 bp, synthetic construct
  source 1..396: mol_type = other DNA; note = Synthetic coding sequence
atgctgtgctggggctactggagcctgggccagcccggcatcagcacaaatttacagggcatcgtcgcagagcctcaagtctgtgggttcatttcagatcggtcggtgaaagaggttgcctgcggcggcaatcattctgtgtttctgctcgaggacggggaggtctatacttgtggcctgaacactaagggtcaactcgggcacgagcgagaaggcaacaaacctgaacagatcggcgctcttgcagatcagcacattatccacgtggcctgtggggaatcccatagcctcgctctgtccgacagagggcagctgttctcttggggagccgggtcggacggtcagctcggtctgatgacaactgaggatagtgtagcagtgccccggctgatctag

SEQ ID NO: 25697 - DNA, 3099 bp, synthetic construct
  source 1..3099: mol_type = other DNA; note = Synthetic coding sequence
atggagggcgccctgaccgcccgggacaaggtgggcgtgcaggacttcgttttgttggatgcgtatacaagcgagtctgcttttgtagataacctgcgcaaacggttttcagagaacctgatttacacttatatcgggactcttctggtctccgttaacccttaccaggagttaggaatttacaccgtcagccagatggaactgtaccagggggtgaacttctttgagctcccccctcacgtgtacgcgattgccgataatgcatataggatgatgtgcgcagagctgaataaccactttatcctgatctccggcgaatctggtgctgggaagacagaggcatctaaaaaaattctggagtacttcgccgtgacgtgtcccatgacgcaaagcttgcagattgcgcgggaccgactattattttctaatccggtcctggaagctttcggcaatgcacggacactcagaaacgacaactcaagccgttttggcaagtacatggatattcagtttgattttcagggaatccccgttgggggacatataatttcttacctaattgaaaaatcccgtgtagtttaccaaaatgagggcgaaagaaactttcacatcttctaccaactcctcgcaggcggtgaggaggaacgcctttcatatttgggattagagcgggacccccagctatacaagtatctgagtcagggccactgcgccaaggagtcctctatatctgataagaacgactggaaaactgtctctaatgcattttccgtcatcgatttcactgaggctgaccttgagaatcttttcggcattattgcttctgtgttacatttaggtaacatcggatttgaggaagacgaccagggatgtgctaccattccggatacacacgagatcaaatggatcgcaaagctgctgggagtgcacccgtccgtactactagaggccctgacacaccggaagattgaagctaagacagaagaagtgatctgtcccttaactctagagctctctgtctacgctcgggacgctatggctaaagccgtctacggcagaacatttacgtggctggtcaacaaaatcaacagttccctcgttaacaaggtggggcagcggattcttgatcccctgcttctcctgacatggaagacagtgatcggcctactggacatttatggcttcgaggtcttcgataagaacgggtttgagcagttctgcatcaactactgcaacgaaaagctgcagcagttgttgatcgagcgtacactgaaagccgagcaagctgagtatgagatggaggggatcgagtgggagcccatcaaatactttaacaataagattatatgtgatcttgttgaagaacgacataaaggcatcattagtatcctagatgaggagtgcattcggccaggccctgctacggatctgagcttcttggaaaagctggaggaaaaggtgggaaaacacgcacatttcgagactcggaagctcgctggacccaagggtcgcaagcggatcggctggatggaattccgcctcctacattatgccggcgaggtcacctactgtactaaggggttcctcgagaagaataatgacttgttgtaccggcacctcaaggaagtgttgtgcaaatcaaagaacattattctgcgcgagtgctttctgctggctgaattagagaacagacgccgaccacccaccgttgggacacagtttaaaaacagtcttagctccctgcttgaaaccctgattagtaaagaacctagctacatacggtgtatcaagcctaatgatcgtaaagaaccatccaagtttgatgactttctgattcgacatcagattaaatatctggggcttatggagcatctgcgcgtgaggcgcgccggttttgcatataggcgtaagtacgaacactttttacagagatacaagtcactgtgtcctgacacgtggccacattggcacggccccccagctgagggcgtggagagactgatcaaatacattgggtacaaaccggaagagtacaaactcggcaaaactaaaatctttatccggttcccccgaaccctgtttgccacagaagatgcttttgaattctccaagcatcaactggtggctcgaatccaggcaacctacaagcgctgccttgggcgcagggagtacgttaaaaaaagacaggcagctattaaattagaagcgcattggagaggagcacttgccaggaaagccatacagcgaagaaagtgggccgtgaggatcatacgcaagtttatcaagggtttcattagccgtaacaaacccctgtgccctgacaatgaagaatttattgtcttcgtacgcaaaaactacatcctgaacctgcggtaccaccttccgaagactgtgctggataagagctggttacgtcctcccggaattctcgagaacgcgtccgatttgctaaggaagatgtgcgtgagaaacctggtgcagaagtattgtcggggtatcaccgctgagaggaaagctatgatgcagcagaaggtggtcacttcagaaatctttagaggcaggaaagatggatacactgaatctcttaatcagccctttgtgaactcacgaattgatgagggggacatcaacccaaaggtgctgcagctgatatcacacgaaaaaattcagtacggggtgccggtcattaagtacgataggaaaggttttaaggcgaggcagagacagttgattctaacacaaaaggccgcatatgtggttgagcttgccaagatcaagcaaaagatcgaatactcagccctgaaaggcgttagcacctccaacctaagtgatgggattctcgtaattcacgtgtctccagaggattccaagcaaaaaggcgacgcagtgctgcagtgtgggcacgtattcgaagctgttacgaagctggtcatgctcgtgaagaaggagaacatcgtgaacgtcgtccaaggctcgctgcagttcttcattagccccggaaaagagggcacaatagtgtttgataccggcttggaagaacaggtctacaaaaataaaaatgggcagctgaccgtcgtatcagtgcgccgcaagtcgtag

SEQ ID NO: 25698 - DNA, 1176 bp, synthetic construct
  source 1..1176: mol_type = other DNA; note = Synthetic coding sequence
atgtgcagccagctgtggttcctgaccgaccggcggatccgggaggactacccacaagtgcaaatcctgcgcgcactgaggcagcgctgctccgaacaggatgtgcgcttccgtgccgtgctaatggaccaaattgcggtgactatcgtcggaggtcatctgggattgcagctgaaccagaaggcacttacaacgtttccagatgtcgtactagttcgagtgccaacaccatccgttcagtccgattccgatattacagttctccgccaccttgaaaagctgggctgtagactagtcaatcgccctcagtccatcctgaactgcataaacaaattctggacatttcaggagttggcggggcacggggtccccatgcccgacaccttctcttatggagggcacgaagacttttctaagatgatcgatgaggctgagcctttggggtaccccgtggtggtgaagagcacacgtggtcacagaggcaaagccgtgttcttggcgcgggacaagcaccatctgagcgatatctgccatttgattcggcacgacgtgccctatctcttccaaaagtacgtgaaggaatcccacggcaaagacatcagggtggttgttgtcggtgggcaggtcattgggtcaatgctaagatgtagcaccgacggcagaatgcagtcaaattgcagcttggggggtgtgggcgtcaaatgcccccttaccgagcagggcaagcagctggccatccaggtttctaacattctggggatggacttttgtggaatcgatctgctgatcatggacgacggcagctttgtggtttgcgaagctaacgccaacgttggctttctggcatttgaccaggcatgcaatcttgatgtcggaggcattatcgccgactacactatgtccctgcttcccaatcggcagaccggaaagatggctgttctgcccggcctcagctcccctagagagaaaaatgaacccgacggttgtgcttctgcgcagggcgttgcggagagcgtctacaccatcaatagcggatcgaccagcagcgagtctgaacctgaactgggcgaaatcagggacagttcggcctcaacaatgggagctcctccttccatgctgccggaacctggatataacataaataatcggatcgcctcagagttgaagctgaagtag

SEQ ID NO: 25699 - DNA, 1065 bp, synthetic construct
  source 1..1065: mol_type = other DNA; note = Synthetic coding sequence
atggacatggaccacatcatgacctgggccaccgacgtggccaagggtatgcattacctgcacatggaggctcctgtaaaagtgatccatagggatctgaagagccgcaacgttgtcatcgcagcagacggcgtgctcaagatatgcgactttggtgccagtcggtttcataaccacacaacgcacatgtccctagttggaaccttcccatggatggcaccagaggttatacagagcctgcctgtcagtgagacatgcgatacgtactcttatggcgtagtgttgtgggaaatgttaacaagagaagtgccttttaagggactcgagggcctgcaggtcgcctggctggtggtcgagaaaaatgaacgccttaccatcccgtcttcttgcccgcgatcctttgccgagttgctgcaccagtgctgggaagctgacgcaaagaaaaggccatcattcaaacaaatcatcagcatcctggagagcatgtcaaatgacacttctctccctgataagtgtaattcatttctccacaataaggcggagtggaggtgcgaaatcgaagccaccctggagagacttaagaagctggagagagatctgagtttcaaggagcaggagctgaaagaacgtgagagaaggctgaaaatgtgggagcagaagcttaccgaacagtccaacacaccacttctgctgccattggccgctaggatgtcagaggaatcttactttgaatccaagactgaagagtctaacagtgcagagatgtcctgccagattaccgccacttctaacggggagggccatggtatgaatccctctctgcaggccatgatgttgatgggctttggggacatcttctcaatgaataaggccggagctgtgatgcacagtggcatgcagatcaacatgcaggccaaacagaacagttccaagactacatctaagagaagaggcaaaaaagtcaacatggctctcggattctccgattttgacttatcagagggtgacgatgacgacgacgacgatggggaagaggaagacaatgacatggataactcagaatag

SEQ ID NO: 25700 - DNA, 1707 bp, synthetic construct
  source 1..1707: mol_type = other DNA; note = Synthetic coding sequence
atgctggagcggccccccgccctggccatgcccatgcccaccgagggcactcccccccccctgtccggtacccctatccccgttccagcctattttcgtcatgcggagcccggtttttcactgaaaaggcctcgtgggttgtctcggagtctccctccacctcccccagcgaagggaagtatacccatcagccggctctttccgccccgtacacccggttggcaccagctgcagcctcgaagggtgagctttcggggagaagcttcagagaccctgcagtcgcccggctatgaccctagtcggcccgagagcttcttccaacagagcttccaacggctgtcacgccttggacacgggtcttatggtgaggtgttcaaagtgcggagcaaagaagacggacgcctctatgcggtgaagagaagtatgtccccttttagaggtcctaaggatcgggcccgaaaactggccgaggttgggtctcacgagaaagttggtcaacacccctgctgcgtgagactcgaacaggcctgggaggaaggtgggatcctctatctgcagacagaactctgcggcccctctttgcagcagcactgcgaagcctggggggcctctctcccagaagctcaagtgtggggttatcttagggatacgcttcttgcactcgcccacctgcactcacagggtctggtacacctcgacgtgaagcccgcaaacatttttttgggtcccaggggacgctgtaaactaggggactttgggctcctggttgagctgggtacggccggcgctggagaggttcaggagggtgatcctcgctatatggcacccgagctgctgcaaggtagttatgggacagccgcagacgtgttctcactggggctgacaatcctcgaggtggcctgcaatatggagctgccccacggtggtgaaggatggcagcagttacgccagggatatctcccgccagaattcaccgctggcttatcatctgaactacggtctgtgctggtgatgatgcttgagcccgaccccaagctgagggccactgcagaagccttacttgctctcccagtgctgcgccagcctcgagcatggggggtgttgtggtgtatggccgcggaggcactgtcccgcggatgggccctgtggcaggcactccttgccctgctgtgctggctgtggcatggtctggctcaccccgcaagctggcttcagccgctcggacctccggccactccacctggatctcctccatgctcacttctattggactcgtctctgtctagcaactgggacgacgacagcctcggcccctccctgtcccccgaagcggtcctcgctcgcacggtgggatcgacttccaccccaagaagcagatgtactcccagagtgctcacccccttgagactttcgcctgcagcggagccgtcggccccagggctggggcccgcagccgaggcgccttgctgcgtggagcagaggggcttcctgtccagacacatacctcggagcttcagtgcctttcaggccgccccgccgaaatccgcttgcaatgcattgcacctgcatggccacacccaaccatctgccttcgtctggtctctaacctgtagctcacaccacgggagaaccttcgaggcccggaccaaagtggatccattgtttaaaatctgcggcgggtttctgacagtgtttgccgacctgtag

SEQ ID NO: 25701 - DNA, 642 bp, synthetic construct
  source 1..642: mol_type = other DNA; note = Synthetic coding sequence
atggccgagaccgaggagcggagcctggacaacttcttcgccaagcgggataaaaaaaagaaaaaggaacggtccaatcgagccgctagcgccgctggtgccgcaggaagtgctggaggctcctccggggccgctggcgctgctggtggaggtgccggtgcgggtacccggcccggcgatggtggaacagcctctgcaggggccgccgggccaggggccgctacaaaagccgttaccaaggacgaagatgagtggaaagaacttgagcaaaaagaagtggattattcaggcctgagggtgcaggcaatgcaaatttccagtgagaaagaggaggacgacaacgagaagaggcaggacccaggggataactgggaagaaggaggagggggcggaggggggatggaaaaatcatccggaccttggaacaaaaccgctcctgtgcaggcccctcccgcccctgttatcgtaactgagacacctgaaccagcaatgacgtccggtgtatatagaccccctggcgcccgtcttacaaccacacggaagacacctcaggggcctcctgagatatacagcgatacacagttcccaagtttacaatctaccgcgaaacacgtggaatccagaaaccggtacttaaaatag

SEQ ID NO: 25702 - DNA, 4140 bp, synthetic construct
  source 1..4140: mol_type = other DNA; note = Synthetic coding sequence
atggccagcagccccaccaagggcctgaccatgagcgtgcccgtggctcctaaaaaaagctgctacacccaactgcgagacaatcgcaatgcggctcgaaacaacaacgagtcgatactaagtcttggcgatacaaacgcaaatcagataatgctagaggtgtctagctcccatgatgagtccaaaacttgtgatctaggcgacgaaatcggcaacaccaactccagtgagcccgaaaacaggacccactttcacaaggagtttcatcaactccaaggattcgggaaggggagccaagcaggttccgcctctctaaaggattttaggctgagttccacgatccagcgggagctgaacgaagagcataccgtcgagaggggcacagattctctccagacgaccagatctatccagggacctagcttaagcagttggaggaatgtgatgagcgaagcttccttggatgtactggcaaaacgcgacgccgaaataccacgccacgtccccaaagacaaactggccaagacactggataatgaggagctccgcagacacagtttggagagggcctcgtctagcgtggctgcagtaggcagtctgaccccacaacatccccagcccctcagcctggattctcgagaggctcgagggcaaattcctggcgggggcgagggccctcagaaaacactgcccgatcatgctgtgcccgctgccttcccggccactgactcaaccagtgaaggcaagagtgtccggcatcccaaaccaagcactagcgaaagtaagcaatccacacctagtgaaactcagacagtgggtgcccacgtcctccaagtgtgctctgaacacactagccattctgcccaccctgagccagccttaaatctgacactggccagcaaggagatcccttccaaattggaagcacaactaggccaaggaaagggggaggcaaaactggacctcaaatatgttccccccagacgtgtggaacaggagggcaaagccgcccaagaaggatatctcggttgtcataaagaagagaacctgtcagctttggaaggccgcgacccttgcggtgaggcacaccctgaagcaacagacgcgctgggacacctcctcaactccgatctacaccacttgggcgtcggaaggggaaattgtgaagagaagcgcggggtaaaccctggagagcaggatagtctccacactacccccaagcaggggagtgcatcattgggcggcgcagataaccagcccaccggtaaaatcagcccatgcgccggcgagaaactgggagagagaaccagctctagtttctctccgggcgacagtcacgtcgctttcattccgaacaatctcacggacagcaagcctctcgacgtcatcgaagaagaacgtagactgggaagcgggaataaagattccgtaatggtgctggtctttaacccatctgtcggtgaaaacaaaactgaggtacccgaacccctggacccacaatcggggcgcagtgaggctagagagtctaaggaggtgaccaccagcgtggctgagaacaggaatcttctcgagaatgcagacaagatcgaatccacaagtgccagagccgattcagtactgaatatccctgcgccactgcaccctgagaccaccgtaaatatgacatatcagcctaccaccccatcatcttccttccaggatgtgtccgtcttcggcatggacgcaggtagcccactggtggtcccaccccccacagattcagcccgactattgaatacgagcccaaaggttcccgataaaaacacctgtccctccggtattccgaaacctgtgtttacacactccaaagacaccccctctagccaggaaggcatggagaattatcaggtggagaaaactgaagagagaactgagacaaagccaatcatcatgcctaagcctaaacatgtacgacccaaaataattacttatataagacgaaacccacaggcccttggccaggtggatgcctcgcttgtgcctgttgggctgccttatgcgcccccaacatgcaccatgcctcttccgcatgaggagaaagcggccggcggggatctgaagcccagtgccaatctttacgaaaagttcaagcccgacttgcaaaagccgagggtgttctccagcggtctcatggtgagcgggattaaacccccaggtcatccttttagtcagatgagcgaaaaattcctgcaggaagtcaccgatcatccgggaaaagaggaattctgctcgcccccatatgcacattatgaagtacctccaactttttatcggtccgctatgctgctaaaaccccagctgggcttgggggccatgagtaggctcccatccgcaaagtcccgcattcttatcgccagtcagcgcagctctgcctcagctatacatcctcctggtcctataacgacagcaactagtctgtactcatcggatccgtctgccgacttgaaaaaagcgtcttcatccaatgcggcaaagagcaatctgccaaagtcaggactcaggcctccaggatatagcaggctacccgcagcaaaactcgccgcgttcggctttgtgagatcttcctcagtttctagcgtttcgtcaacacaaagcggggactccgcacaaccggagcaaggacgaccagccacccgctccacttttggaaacgaggaacagcccgtcctgaaggcctcgctgcccagcaaggacacacctaagggcgctggacgcgttgctcccccagcctcctcaagtgttactgcaccccgcagatcactactgcctgcgccgaagtctacaagcacacccgccgggacaaagaaagatgcacaaaaagatcaagacacaaataagcctgcggtgagctccccaaaacgggtagctgcctcaacaactaagctgcacagccccgggtatccaaagcagcgaacggctgccgcaaggaatggcttcccccccaaaccggatcctcaggcccgggaagctgagcgtcagctggtcctcagactgaaggagcgatgcgaacagcagacaaggcagctaggtgtggcacagggcgagctcaagcgagccatctgcggctttgacgcgttggctgttgctacccagcacttttttcggaaaaatgagtccgcattggtgaaagaaaaggaactgtccatcgaactggcaaatattagagacgaggtggccttccacacagctaagtgcgaaaagttgcagaaagaaaaggaggaattggagagacggttcgaggacgaggtgaaacgcctgggttggcaacaacaagccgaactgcaagaattggaagagcgcctgcaattgcaattcgaggcagagatggcgaggctgcaggaggaacatggagaccaacttctgtctatccggtgccaacaccaggagcaagtggaggacctgactgcttcacatgatgctgcgttgctggaaatggaaaacaaccacaccgtggcaatcactatactgcaggatgaccacgatcataaggtgcaggaactgatgtcaacacacgagctcgaaaagaaagagttggaagagaacttcgagaagctccgactgtccctgcaagaccaagtcgatacactgacgtttcagagccagtctttgagggaccgagctcggcgcttcgaagaggcacttcgaaaaaacaccgaagagcagttggagatcgctctcgcgccttaccagcatctggaggaagacatgaagtcactcaagcaggtgcttgagatgaaaaaccaacagatccatgagcaggagaagaaaatcctggagttggagaagcttgctgagaagaacatcattttggaagaaaagatccaagtgctccagcaacaaaacgaagatctcaaggcgaggattgatcagaacactgtcgtgacaaggcagctgagcgaggagaacgccaatctccaggagtacgtcgagaaagagacacaggagaagaagaggttatcccggacaaacgaagaactactatggaaactgcagaccggcgatcccactagtccgatcaagctctctccaacttcccccgtgtatcgaggaagttcaagcgggccatcctctcctgcacgcgtgtcaaccaccccccgctag

SEQ ID NO: 25703 - DNA, 1041 bp, synthetic construct
  source 1..1041: mol_type = other DNA; note = Synthetic coding sequence
atgcagcacctgaagagcaagaagcgggaggagcggtggatgcgggcctctaaacgacagagtgagaaggagatggaagagctgcaccacaacatcgacgatctgcttcaggagaaaaagtccttggaatgcgaggtcgaggaactgcatcggaccgtgcagaaacgtcaacagcagaaagactttatagatggcaacgtggagagcctaatgacagaacttgagattgagaagtctcttaaacatcacgaggatatcgttgatgaaattgagtgcattgagaagacactgctgaaacgacgtagtgaactccgggaagctgaccgactcttggcagaggcagaatccgaactgtcctgcactaaggaaaaaacaaaaaacgccgtggaaaagttcaccgacgccaagaggagcctgctgcagaccgaaagcgacgccgaagagttggagcggagagctcaggaaactgcagtcaatctggtgaaggccgatcagcagttgcgatccctgcaagccgatgctaaggatctagagcagcacaaaattaagcaagaagaaatcctcaaagagattaacaaaatagtggcagccaaggatagtgatttccagtgcctcagtaagaaaaaagagaagctgacagaagagctgcagaagctccaaaaagacattgagatggcagagaggaatgaggatcaccacctgcaggtgctaaaggagagtgaggtactactgcaggccaaacgggccgaactggagaagctcaaaagccaggtcacatcgcaacagcaggagatggctgtgctggatagacagctcggccacaaaaaggaggaactgcacctcctgcaagggagcatggttcaggccaaagccgacctgcaggaggcactgcgtctgggtgaaaccgaggtaaccgaaaaatgcaaccatatccgcgaagttaagagcctccttgaggagctgtcattccagaagggggagttgaatgtgcagataagcgagcgtaagacccaactcacgctaatcaagcaggaaatctag

SEQ ID NO: 25704 - DNA, 369 bp, synthetic construct
  source 1..369: mol_type = other DNA; note = Synthetic coding sequence
atggccaccagcgcccccctgcggagcctggaggaggaggtgacctgttctatttgtctcgactatctgcgggaccctgttaccatagactgcgggcacgtcttctgccgctcatgtacaacagatgtgagaccaatttccggctcaaggcccgtgtgtcccctgtgtaaaaagcccttcaaaaaagaaaacatcaggccggtgtggcaattggcttcactcgtcgaaaatattgagcggcttaaggtggataaaggacgacagccaggagaagttacccgcgaacagcaggacgcgaagctctgtgaaaggcaccgcgagaaattgcattactactgcgaagatgacgggaaactgctctgtgtttag

SEQ ID NO: 25705 - DNA, 291 bp, synthetic construct
  source 1..291: mol_type = other DNA; note = Synthetic coding sequence
atgagcatcagcagcgacgaggtgaacttcctggtgtaccggtacctgcaggagtccggattttctcactccgcgtttacttttggcatcgagagccacatctcacaaagcaatatcaatggtgccttagttccacctgcagcccttatctccattatccaaaagggactgcagtacgttgaggccgaggttagcatcaacgaagatggaactctgttcgacggacgcccaatagagagtctgtctctgatcgacgctgtcatgcccgatgtcgtccaaactcggcaatag

SEQ ID NO: 25706 - DNA, 2913 bp, synthetic construct
  source 1..2913: mol_type = other DNA; note = Synthetic coding sequence
atgctgcagcaggtgaacggccacaaccccggcagcgacggccaggcgagagaatacctgagagaggacctccaagagtttctagggggtgaggtactgctgtacaaattggatgacctgacacgagtaaatccggtaacccttgagacagtgctgaggtgtctgcaggcccgatacatggccgacaccttctataccaatgccgggtgcactctggtggctctcaacccatttaaaccggtgcctcaattgtatagtccagaactaatgagggagtaccacgctgcaccgcagcctcaaaagctgaagccacatgtgttcaccgtcggcgagcagacatatcgcaacgtcaagtctctgatcgagcccgttaatcagtctattgtggtgagcggcgagagtggcgccgggaagacctggacgagtaggtgcctgatgaaattttacgccgtggtggcaacctcgcctgcctcatgggagagtcataaaatcgccgagaggattgaacagcggattctgaactccaacccggtgatggaagccttcggaaacgcatgcacactcagaaataacaattcatcgcgcttcggcaagtttatccagcttcaactcaaccgagcccagcagatgacaggcgccgcagtgcagacttacctcctggagaaaacccgagtggcttgccaggcctccagcgagagaaattttcacattttttaccagatctgcaaaggggctagcgaggatgaaagactgcagtggcatctgccagagggcgctgcattcagctggttgcctaatcctgagagatcgctggaagaagattgtttcgaggtgacgagggaagcaatgttacatctgggtatcgataccccaacccaaaacaatatcttcaaggtgttggcgggcctactccatctagggaacatccaattcgccgcatcagaagatgaggcgcaaccctgtcagccaatggacgatgccaagtacagtgtcaggaccgcagctagcctgcttggactccccgaagacgttctgctggaaatggtccagattcgtacaattagggccgggcgacagcaacaagtgttcagaaagccttgcgcccgggcggagtgtgacacaaggagggactgcctggctaaacttatctatgccagactctttgactggctggtgtcggtaattaattctagtatctgcgcggacacagattcctggaccaccttcattgggctgttggacgtctacggatttgaaagctttccagacaacagccttgaacagctgtgtataaactacgccaacgaaaaactccagcagcacttcgtggcacattaccttagagcgcagcaggaagaatatgccgtagagggcctagaatggtcctttattaattaccaggataaccagccatgtctcgatctgattgagggaagccccatctcgatctgctctctaatcaacgaggaatgccggctaaatagaccctcaagcgccgctcagttacagacgcgcattgagaccgccctggccggtagcccctgcctgggccataataaattgtctcgtgagcccagttttattgtggtgcattatgccggacctgttagataccacactgccggcctggtggagaagaacaaagaccccatccccccagagcttacccgactgctacagcagtcacaggatcctctcctaatgggactcttcccaactaatccgaaggaaaagacccaggaagagccacctggacaatcgcgcgcacctgtcttgacagtggtcagcaaatttaaagctagccttgaacaacttctccaggttctgcacagtacaactcctcattatatcagatgtataaagcccaattctcagggacaggctcagactttcttgcaggaggaggtgttgtctcagctggaagcttgtggactggttgagactattcatatctctgccgctgggttcccaatccgagtttcccacagaaatttcgtggagaggtacaagctgctgaggaggctccatccctgcaccagctccggacccgatagtccataccccgcaaagggcttacctgagtggtgccctcactccgaggaggccactctcgaaccccttatccaggacatcctgcatacgcttcctgttctcacccaggctgcggccatcaccggtgacagcgccgaagccatgcccgcgccaatgcattgtggccgtactaaggtgtttatgacagactccatgctggagctcctggaatgtggccgcgccagggttctcgaacagtgtgcacgatgcatacagggcggctggaggcggcatcggcatagggagcaggaaagacagtggcgggctgtgatgcttatacaggcagctataagatcgtggctcacgcgaaagcatatacagcgcttacatgccgcggctactgtgatcaagagggcttggcagaaatggcgcattagaatggcttgcctggcagccaaagaactggacggagtggaagagaagcactttagtcaggccccttgctctctgagtacgagccctctccagactaggttgctcgaggcaattatccgactatggcctctgggacttgtactggccaatactgctatgggagtgggctcttttcagaggaaactggtagtctgggcatgtcttcagcttccacgcggaagccctagctcctataccgtgcagacagctcaagatcaggccggggttacctctatccgcgctctgcctcagggatctatcaagtttcattgtagaaagtctccactgagatatgccgacatctgtccagagccctctccctatagcattactggctttaatcagattttgctcgaaagacacagactgattcacgtgacgtccagcgcttttacagggctgggatag

SEQ ID NO: 25707 - DNA, 3303 bp, synthetic construct
  source 1..3303: mol_type = other DNA; note = Synthetic coding sequence
atgagctactaccagcggcccttcagccccagcgcctacagcctgcctgcttctttaaattccagtatagtgatgcagcatgggacttctctcgatagcaccgacacttatccccaacacgcgcagtctcttgacggcacaacttctagttcaataccactttacagatcttcagaagaggagaagcgcgtcactgtcattaaggcccctcactatccaggtataggcccagtggatgagtctggcattccaaccgccatacggactaccgtagatagacctaaggactggtacaaaacaatgttcaagcaaattcacatggtgcacaagccggatgatgatacggatatgtataacactccctacacttacaatgctggactctacaaccctccttattctgcccaatcccaccccgccgctaagacccaaacatacagaccgctgtccaagtctcactccgataatagcccgaacgcctttaaagacgctagctcacctgtccccccccctcacgtccctcctcccgtccctcctctgcgtccaagagataggtcctccactgagaaacatgattgggacccccccgatcgcaaggtggataccagaaaatttaggtccgaaccccggagtattttcgagtacgagcctggtaagtcaagcatcctccaacacgagagacccgccagcctgtatcagagcagcatcgatcggtccctagagcggccaatgtcttccgccagcatggcctcagattttagaaagaggcgcaagagtgaacccgccgttggaccacctcggggattgggagatcaatccgcatctagaaccagtcccggacgcgtggatttacctggttcaagcacgaccttaaccaagtccttcactagcagtagcccatcttcaccatcaagggctaagggcggagacgattctaaaatttgcccttcgttatgttcctattccggccttaatggcaaccccagtagcgagctggactattgttctacctaccgccagcatctagatgtgcctcgggatagtccccgcgccataagttttaagaatggatggcagatggcccggcagaatgcggaaatctggagctcgaccgaggagactgtcagcccaaagatcaaatccagaagttgcgacgaccttctgaatgacgactgcgacagtttccctgacccaaaagtgaaatctgagtcgatgggaagcctcttgtgcgaggaagactctaaggagagctgtcccatggcttgggggagtccttacgtacccgaagtccgaagtaacggcagatcccggattcgccaccggtccgcgaggaacgctcccggatttcttaaaatgtataaaaagatgcataggatcaacagaaaggatctgatgaattccgaggtgatctgcagcgtaaagtctcgcatcctgcagtacgagagtgagcagcagcacaaggacctgttgcgagcctggtcgcaatgcagcaccgaagaggttcctagggatatggtgccaactaggatctccgagttcgaaaagctcatccaaaagagtaagagtatgcctaacctgggggatgacatgctcagccctgtgactctggaacctccacagaatggactttgtccaaaaaggcggttcagtatagaatacctgctggaggaagagaatcagtccggaccgcctgcgcgcggcaggcgtggatgccaatccaatgccctggtgcctatccacatcgaagtgaccagcgacgagcaaccaagggcgcacgtcgagttctccgatagcgaccaagatggcgtcgtgtctgaccactcagactacatacatctcgagggtagctcattttgcagcgaatccgatttcgaccatttcagctttacatcgtctgagtcattttacggttccagtcatcaccaccaccatcaccaccaccaccatcatagacacctgatcagctcttgtaaaggcaggtgtccagcttcctatacaagattcacgaccatgctcaagcatgaacgggcccgacacgaaaataccgaagagccacggcgtcaggaaatggaccccggactgtctaaactggccttccttgttagccccgtgccctttcggcgcaagaaaaatagcgccccgaaaaagcagaccgaaaaagcaaagtgcaaggcttcagtgttcgaggccctcgattcggctttgaaggatatttgtgaccagataaaggccgagaagaaacggggatctcttcccgacaactccatcctacacagactaatatctgagttgctgcctgacgttcctgaacggaatagctctcttagagccctaagacggtcccccctgcaccagcctctgcacccgctgcctccagatggggccattcactgccccccataccagaatgactgtggccgaatgccacgatccgcctccttccaagacgtggacaccgccaactcatcctgtcaccaccaagatagggggggggcgcttcaagaccgagagtcacctcggtcgtacagctctaccttgacggatatgggaagatccgcccctagggagcggcgggggactccggaaaaggagaaactgcccgcaaaggctgtgtacgacttcaaggctcaaacatcaaaggaattatcctttaaaaagggtgacacagtgtacatcctccggaaaatcgatcaaaattggtacgagggggagcatcacggccgcgttggaatcttccctatcagctacgttgaaaagctgacaccgcctgaaaaagctcagccagcgcggccacctccacccgctcaaccaggggagatcggtgaggcgatcgctaagtataatttcaacgctgatactaatgtagagcttagcctaaggaaaggggatcgtgtaatccttctgaaacgagtcgaccagaactggtatgaagggaagatccccggcaccaatcggcaaggaatctttcccgtgtcttacgtcgaggttgtgaagaagaataccaaaggcgccgaagattatccagatcccccaatcccgcattcttatagttccgatagaattcacagtttgtcatccaacaagccacagaggccagtcttcactcatgaaaacattcaaggtgggggtgagcctttccaggcgctgtacaactacacaccccgaaatgaagatgaattggaactgcgcgaatctgacgtgatagatgtcatggaaaagtgtgatgatgggtggttcgtgggcacctcacgtcggacaaagttcttcggcacctttcctggaaactacgtcaagaggctgtag

SEQ ID NO: 25708 - DNA, 390 bp, synthetic construct
  source 1..390: mol_type = other DNA; note = Synthetic coding sequence
atggccgagctgatccagaagaagctgcagggcgaggtggagaagtatcagcagctgcagaaggatctaagtaaatctatgagcggccgccagaaattggaggcacagctcaccgaaaataatattgtgaaagaagagcttgctctactcgacggatctaacgtcgtttttaaattgttgggccctgtgctcgtgaagcaggagcttggggaagcgagggctaccgtcggcaagcggttggactacataaccgcagagatcaaacgctacgagagccagctccgagatctggagagacagtcagaacagcagagagagaccctggctcagttgcaacaagagttccagcgcgcccaggccgcaaaggccggcgctcctggcaaagcttag

SEQ ID NO: 25709 - DNA, 498 bp, synthetic construct
  source 1..498: mol_type = other DNA; note = Synthetic coding sequence
atgagcctgcacggcaagcggaaggagatctacaagtacgaggccccttggacggtgtatgccatgaattggtctgtgcgacccgataagcgctttcgccttgccctcggctctttcgtcgaagagtacaacaataaggtacagctggttggcttagatgaagagtcatccgagttcatctgcaggaacactttcgaccacccatatcccactactaaactgatgtggatcccagatactaagggtgtttatcctgacttgttggcgacaagcggcgattatctgcgtgtttggcgggtgggagagaccgagacccgcctggagtgtctactgaacaacaacaagaattccgatttctgtgcccccttaacatcttttgactggaacgaggtggatccctacctgttggggaccagctccatagacactacatgctgttttcagtggcctgtctgcctgagtctcctttgcacacattgttaccagaagctgctctag

SEQ ID NO: 25710 - DNA, 1044 bp, synthetic construct
  source 1..1044: mol_type = other DNA; note = Synthetic coding sequence
atgagcctggcccagagccccggcatctggggcgaggaccccgtgaagctgacacttgccttaaagatgaccagacaggatttgactagaacacagatggagctgaataatatgaaggctaacttcggggacgtcgtgcctcgccgagatttcgaaatgcaggagaagaccaataaggacttgcaggagcagctggataccttgcgcgcgagctacgaagaagtgagaaaggagcatgagatattgatgcaacttcacatgtccacacttaaggagagggatcagtttttctctgagctgcaggaaattcaaagaacttccacccccagacccgactggacgaagtgtaaagatgtggtggccggcggccccgaaagatggcagatgctggccgagggaaaaaactcagatcaactggtggatgtgctgctggaagagatagggtctgggcttcttcgcgagaaggactttttccccggcctcggttacggggaggcaatccctgctttcctcaggtttgacggcttagtggagaacaagaaaccttccaaaaaagacgtcgtaaacctgctgaaggatgcctggaaagagcggctcgccgaggaacagaaggaaacattcccggacttcttcttcaactttctggaacatcgttttggtccgtccgacgcaatggcatgggcctacaccatctttgaaaacataaagatatttcacagcaacgaagtgatgtcacagttttacgctgtgttgatggggaagagatctgaaaacgtgtatgttacccagaaagaaaccgtggcccagcttctgaaggaaatgacaaatgctgatagccagaatgaaggcctcctgaccatggagcaatttaacaccgtgttgaaaagcacatttcccctcaaaactgaggaacaaatacaggaactgatggaagccggcggttggcacccctcatcctctaatgcggatctcctgaactaccgctcactgtttatggaggacgaggagggtcagtctgagcccttcgttcagaagctgtggtag

SEQ ID NO: 25711 - DNA, 219 bp, synthetic construct
  source 1..219: mol_type = other DNA; note = Synthetic coding sequence
atgtggagcctgaccgccagcgagggcgagagcaccaccgcccacttttttctcggcgccggtgatgaaggcctggggactagaggaattggtatgcgccctgaagaatccgactctgagctgctcgaggacgaggaagacgaggtacccccagagccccaaattattgtgggaatttgcgcgatgacaaagaaatctaaaagtaaaccaatgacatag

SEQ ID NO: 25712 - DNA, 1149 bp, synthetic construct
  source 1..1149: mol_type = other DNA; note = Synthetic coding sequence
atgctgcggtggaccgtgcacctggagggcggcccccggcgggtgaatcacgctgctgtcgctgttggccacagggtgtattccttcggcggttactgcagtggcgaagactatgaaacactgcgacagatcgacgtgcacatttttaacgccgtgtctctgagatggacaaagctcccccctgtgaaatccgcaatccgtggacaggccccggtggtgccctatatgagatacggacactcaaccgttctgatcgacgatactgtgttgctctggggaggacggaatgatacagaaggcgcctgtaatgttctttacgcttttgacgtcaacacgcataaatggttcacgcccagggtgagtggcacagtgcctggtgcccgcgatggacattctgcctgcgtcctaggaaaaataatgtacattttcggcgggtacgaacagcaagccgactgcttcagcaacgatattcataagcttgacacttccactatgacctggaccctaatctgtactaagggcagccctgctaggtggagagatttccacagtgccaccatgctcggctctcacatgtacgttttcggggggcgcgcagataggtttggaccctttcattcaaacaatgagatttactgtaatcggatcagagtgttcgacacacgaaccgaggcttggctggactgccctcctacccctgtcctgcctgagggcaggcgctcccacagcgctttcgggtacaacggcgaactctatatttttggcggctacaatgcccgactgaatagacactttcacgacctgtggaagtttaatcccgttagctttacttggaaaaagattgaaccaaaggggaaagggccctgtccccgcaggaggcaatgttgttgcattgtgggggataagatcgtactctttggtggaacttctccatcgcctgaagagggcctgggcgatgagtttgacctgattgatcacagcgatcttcacattctggatttctccccatccttgaagaccttatgcaaattggctgtgatccagtataacctcgatcagtcctgcctgccacacgacatcaggtgggagctgaatgccatgaccaccaacagcaacatttctcggccgattgtgagctcacatggatag

SEQ ID NO: 25713 - DNA, 1620 bp, synthetic construct
  source 1..1620: mol_type = other DNA; note = Synthetic coding sequence
atggccaccagcgcccccctgcggagcctggaggaggaggtgacctgctcaatctgtctggactatctccgtgatcccgtgactatcgattgtgggcacgtattttgccgcagctgtacaacagacgtaaggcccattagcggctctagacccgtctgcccactgtgcaagaagccttttaagaaagaaaacattcggcccgtgtggcagttggcctcgctcgtggaaaacatagaaagactcaaagtcgacaaggggcggcagccaggggaggtcactcgcgagcagcaggatgccaaactctgcgaacgccatcgagaaaagctccactactactgcgaggacgatgggaaactgctttgtgttatgtgccgcgagtctcgggagcacagacctcataccgctgttctgatggaaaaggccgctcagcctcatagggagaagatcctgaaccacctgtccacccttcggagagacagggataagatccaagggttccaggccaaaggggaggcggacattctagcagcactgaaaaagctgcaagatcagcggcaatacattgtggcagagtttgaacagggccaccagtttttaagggagcgagaggaacatcttctggagcaactggcaaaattggagcaggaactcactgaaggacgcgagaagtttaaaagtcgtggagttggtgaactggctaggctagctctcgtaatcagtgaactggaaggcaaagcacaacaacccgccgcagagttgatgcaggatacccgggattttcttaaccgctatcccagaaaaaagttctgggtgggaaaacctatcgccagagtcgtgaagaaaaagacgggggagttttctgataagttactgtccctgcaacgaggcctgagggagttccaggggaagctgttaagagatctggagtataaaactgtctctgtcactttggaccctcaaagcgcttctggttacctgcagctcagtgaagattggaaatgcgtgacttacaccagcctgtacaaatctgcgtatcttcatccacaacaatttgattgcgagcccggagtgctcggctctaagggatttacctggggcaaggtttactgggaggttgaggttgagagagaaggctggtcagaagacgaagaagaaggagacgaagaggaagagggagaggaggaagaggaggaggaggaagccggctatggagacggatatgacgactgggagacagacgaagatgaagaatctctgggagatgaagaggaagaagaagaagaggaggaagaagaggtgcttgaaagctgcatggtgggagtggcaagagattctgtcaaacgtaaaggagatttgagtcttcggccagaagacggggtttgggccctgaggctgtcgtcttcaggcatatgggccaatacaagtcccgaggccgaactgtttcccgccctgcgaccgaggcgcgtggggatagccctcgattacgaaggagggactgtgacatttactaacgccgaaagtcaagaactaatttacaccttcacagcaacatttacgcggcggctcgtccctttcctttggttgaagtggcccggcacaagattactgcttcgcccctag

SEQ ID NO: 25714 - DNA, 390 bp, synthetic construct
  source 1..390: mol_type = other DNA; note = Synthetic coding sequence
atggccgagctgatccagaagaagctgcagggcgaggtggagaagtatcagcagttacagaaagatctgtccaaaagtatgtccggacggcaaaaactagaggctcaactgaccgaaaataatatcgtcaaggaggaattggctcttctcgacgggtccaatgttgttttcaaactgctggggcccgtactggtgaagcaggagctaggtgaggcgcgggctactgtagggaagagattggactatatcactgcagaaatcaagagatatgagagtcagctcagagatctggaacgacagtctgagcagcagagagaaactttggcccagttgcagcaagaattccagagagcccaggctgctaaggctggggcccccggaaaagcatag

SEQ ID NO: 25715 - DNA, 1089 bp, synthetic construct
  source 1..1089: mol_type = other DNA; note = Synthetic coding sequence
atgctgaagaacaagggccacagcagcaagaaggacaacctggccgtcaacgccgtcgccctgcaggaccatatcctccacgatttacagctgcggaacctgtcggtagctgaccactccaaaactcaggtgcagaaaaaggaaaacaaatctcttaaacgcgatacaaaggcaatcatcgataccgggttaaagaaaacgacacagtgccccaaacttgaggactctgagaaggagtatgtcctcgatcccaaaccacccccactgactctggcacagaagctcggtctgattgggcctccaccccctcctctgagctctgatgaatgggagaaggtaaagcagcgcagcctcttgcaaggagatagcgtacagccctgcccgatttgtaaggaagaattcgaactgcgtcctcaggtcctgctgagttgtagtcacgtcttccacaaagcttgcctacaggcctttgagaaatttaccaacaaaaaaacctgtccgctgtgtagaaagaatcagtaccaaacacgggtcatccacgatggggcccggctgtttcggattaaatgcgtcacccgcatacaggcttactggaggggctgtgtcgttcgcaagtggtaccggaatctgcggaagaccgtcccacctaccgacgccaagcttcgtaaaaagttctttgagaaaaagttcactgagatcagtcacaggatactctgttcctataacactaacatcgaggagctctttgctgaaatcgaccagtgcctcgctataaataggagcgttttgcaacagctggaggagaagtgcggccacgaaattactgaagaagagtgggaaaaaattcaagtgcaagctctccgccgggagacccacgaatgttccatttgcttggctccactcagcgcagctggcggacaaagagtgggcgccgggcgtagatctcgggaaatggctcttttatcgtgcagccacgtctttcaccacgcgtgccttctggctcttgaggagtttagcgtgggtgataggcccccattccatgcttgccctctgtgcagaagttgctatcagaagaagattctggaatgttag

SEQ ID NO: 25716 - DNA, 1266 bp, synthetic construct
  source 1..1266: mol_type = other DNA; note = Synthetic coding sequence
atgagcgccctgcggcggagcggctacggccccagcgacggcccctcatacggtcggtactatggacccgggggaggcgatgtgccggtccatcctccaccacccctgtatcctctgagacctgagccaccacagcccccaatctcttggcgcgtgaggggaggcggtcccgctgagacaacatggctcggagagggggggggcggtgatggctactatccaagcggcggggcctggcccgagccgggtagagctgggggatctcatcagagcctgaacagttacaccaatggcgcatatggtccgacatatccccctggacctggcgctaacacagccagttactcgggagcttattatgcgcccgggtacacccagacttcctattccacagaagtgccctccacttacagatcatctggaaactcccctacgcctgtgtccagatggatctatccccagcaggattgccaaaccgaagcccccccactgcgggggcaggtacccggataccccccctctcagaaccctggtatgacactaccccattatccgtacggcgatggaaaccggtcagttccacagtccggtcctactgttagacctcaagaggatgcttgggcttctcccggagcttatggcatgggcggaaggtacccctggccctcatccgcgccatccgctccaccaggcaacctgtacatgacagaatcaacatctccctggccctccagtggaagtccgcagagtccaccatctccccctgtgcaacagccaaaagattctagctacccatactctcaaagtgatcagtcaatgaatagacataatttcccttgctcggtccatcagtatgagtcaagcgggactgtgaataatgatgactcagacctactcgattcacaggttcagtatagcgctgagccccagttatatggcaatgccacatctgaccaccccaataatcaggaccagagctcctcattgccagaggagtgtgtcccatccgacgagagtactccgcccagcattaagaagatcatccacgtattggaaaaagtgcaatatttggagcaggaggtcgaggagtttgtcggtaaaaagactgacaaggcctactggttactagaggaaatgcttaccaaagaactgctggaactggattctgttgaaaccggaggccaagactccgttcggcaggcccgtaaggaagcggtgtgtaaaattcaagccatcctggagaagctggagaagaagggactgtag

SEQ ID NO: 25717 - DNA, 321 bp, synthetic construct
  source 1..321: mol_type = other DNA; note = Synthetic coding sequence
tgaaacctgcgggagggcgccgagcagaaggtggtgttcatcaccggtcgggtgcatccaggcgaaaccccaagttcatttgtgtgtcagggcattatcgatttcttggtgagccaacatccaatagcttgtgtgctaagggaatatctagttttcaagatagcaccgatgctaaatccagatggtgtgtaccttggaaattatcgctgtctgtctttgatgcggaatggatccaggggaagaccttttttcccatcctcgtccgctcgcatgttgagaaccagtccaattcccgcccaccctttaaccgggacgttgtag

SEQ ID NO: 25718 - DNA, 684 bp, synthetic construct
  source 1..684: mol_type = other DNA; note = Synthetic coding sequence
tgactgatcttcgcctgcctggtgcccggcttccccgccgtgatgtcctcccgcgggccttgtactctagagacccttatcaacccttccccatcagtggccgacgtgaagatctaccccgaggaaataacgccactcctcccggcgataagcggcgaaaagatcgcagaggaccagacatgtttcttcctacagattctgctgaaatacatggtgatccaggctgccagccttgagtggaagaacaaagaaaatcaggacactggctttaaatttctgtttactctgtttcgcaagtactacttgccgcatcttttcccctcctttactaaactaacgaatatctacaagccagtgctagatataccccatctaagaccaaagcccgtttacattacaacaactcgggacaatgagaacatttatagtacaaagatcccatatatggccgcgcgcgtggtgtttatcaagtggattgtcaccttttttcttgagaaaaagtaccttacagcaacccaaaacactaaaaatggcgtagacgtgctaccgaaaatcatacaaaccgtagggggaggcgcggtgcaggaacgcgcccctgagctggacggtggtggccccaccgaacaggacaagtcccactctaactctagtacactgagcgatcgccgtctcagcaattcctag

SEQ ID NO: 25719 - DNA, 573 bp, synthetic construct
  source 1..573: mol_type = other DNA; note = Synthetic coding sequence
atggagccccccatggagcccagcggcggcgagcaggagcccggcgctgtgcgcttcctggatctcccgtgggaggatgtactgttgccgcatgtgctcaatagggtaccccttagacagttgctgagactgcaacgggtgtcccgagcgtttcgtagtttggttcaattgcatctggccggcttgcgcaggtttgatgcagcacaggtaggaccacagattccacgtgcagccctggcacgcctgctcagagatgcagagggcctgcaagaattggcccttgcaccgtgccacgaatggcttagcgacgaagacctcgtgccagtcctggcacggaacccgcagctgcgctccgttgccctggggggttgcgggcagctgtcaaggcgcgctcttggggctctggcggaggggtgtcccaggctacaaaggctctccctggcccattgcgactgggtggacggtctcgccctgagagggctggctgaccggtgccctgcacttgaagaacttgaccttacggcatgccggcagttaaaagacgaggcaatagtgtacctggctcagaggtag

SEQ ID NO: 25720 - DNA, 270 bp, synthetic construct
  source 1..270: mol_type = other DNA; note = Synthetic coding sequence
atgagcgagcagggcgacctgaaccaggccatcgccgaggagggcgggacagagcaggagacagcaacgccagagaacgggattgttaagagcgaaagcctggatgaggaggaaaagcttgagctgcagagacgcctagaggcacagaatcaggagcggagaaagagcaagtccggggccggcaagggcaagcttaccagatccctggccgtgtgtgaagagtcctcagccaggcccggaggtgagagcctgcaggaccagactttgtag

SEQ ID NO: 25721 - DNA, 381 bp, synthetic construct
  source 1..381: mol_type = other DNA; note = Synthetic coding sequence
atgaccacccggagcgtgctggacgtggagaccttcgtggccgacattttaaaaggcgagaatctcagcaagaaggctaaggaaaagcgcgaatccctgatcaaaaagattaaagacgtgaaatccatctacttgcaagaattccaggacaaaggcgatgctgaggacggggaggaatacgatgacccttttgctggaccccctgacaccattagcctggcaagcgagagatatgataaggacgatgaggcgccctcagacggggcccagttcccacccatcgctgctcaggatctgccttttgttctgaaggccggatatctagagaagcgtcgtaaagaccactctttcctgggatttgagtggcaaaagaggtggtag

SEQ ID NO: 25722 - DNA, 678 bp, synthetic construct
  source 1..678: mol_type = other DNA; note = Synthetic coding sequence
atgctgagcgccgtggcccggggctaccagggctggttccacccctgtgcgagactgtctgtaaggatgagctctaccggcattgatcgtaaaggggtgctggccaacagagttgctgtggtgactggctccaccagcgggatcgggttcgcaattgctcggcgcctcgcccgggatggagctcacgtagtgatctcctctagaaagcagcagaatgtggatagagcaatggccaaattgcagggtgaaggtctcagtgtcgcgggaatcgtgtgccacgtcgggaaagctgaggatcgagagcaattggtggcgaaggccttagagcattgtgggggcgtcgatttcctggtgtgttccgcaggtgtgaatccactggtcggtagtactctggggacgagtgagcagatatgggataaaatcctgagcgttaatgtgaaatcccccgccttgctgctctcacagttactcccttatatggaaaaccggcgcggggccgtgatcctggtttcatccattgccgcctataatccagtggtagccctgggtgtatacaatgtgtcaaagaccgctcttctggggctgacaagaacgctcgcgctcgagctggccccgaaagacatccgggtgaattgcgttgtgcctggaattatcaagactgacttcagtaaagtgtag

SEQ ID NO: 25723 - DNA, 1080 bp, synthetic construct
  source 1..1080: mol_type = other DNA; note = Synthetic coding sequence
tgagccaccgccatgaccagcgcctggctggcccagggcaccggcgagggtgttaatgatgtgcgaaagggtgcttgcgcaagtcacgtatctacaatggcgtcttttctcaaaggggcacatgtgaccatcaatgcccgggcagaagaggatgttgaaccagagtgcatcatggagaaggtggccaaggcctcaggcgctaactactctttccacaaggagtctgggcgtttccaagacgtgggcccacaagctcccgttggatccgtgtatcagaagacaaatgcggttagcgaaattaagagagtgggaaaggattccttttgggccaaagccgagaaggaggaagaaaatcgacgactggaagaaaaacggagagcagaggaggcacagcggcagctggaacaggaacgcagagagcgggaattgagagaggccgccaggcgtgagcagcgttaccaggagcaggggggagaggcttccccacagcgcacatgggaacagcagcaggaagtggtgtcccgcaacaggaatgagcaggagagcgccgtgcatccccgggaaattttcaagcaaaaggagcgggccatgtccaccacttcaatctcttctccacagcctgggaagctgcgttcacctttcctccagaagcagctgacccagcctgaaacccatttcggcagagagcctgctgccgcgatctcaagaccacgcgccgaccttcctgctgaggagccagcaccgagcactcctccatgcctggttcaagcagaagaggaggcggtgtacgaggagcccccagagcaggagaccttttacgaacagccgcctctggtccaacaacagggtgcgggctcagagcacatcgaccaccacatccagggacagggcttgagcggacagggcctatgtgccagggctttatatgactatcaggccgccgacgacaccgagatttctttcgatcctgagaatctgatcaccggcatcgaggtaatcgacgaagggtggtggagggggtatggtccagatggacactttggcatgttccctgcgaactatgtcgaattgatcgagtag

SEQ ID NO: 25724 - DNA, 483 bp, synthetic construct
  source 1..483: mol_type = other DNA; note = Synthetic coding sequence
atggaggccgagcggccccaggaggaggaggacggcgagcagggcccccctcaggatgaggaaggatggcctcctcccaattcgacaacgaggccttggcgctctgcgcctcctagccccccacccccagggacccggcatacagccctggggcctaggtctgcctctctgcttagtctacagacagaactgttactagacctggtcgccgaggctcagtccagaagactggaagaacaacgggcgaccttctacacgccccagaatcccagttctctggcccctgctccgctgcggccccttgaggaccgcgaacagttatattcaactattttaagtcaccagtgtcagaggatggaggctcaaaggagcgagccacctctacctcccgggggccaggaattactggagctgctccttcgagttcagggcgggggcagaatggaggaacaaagatcacgcccaccgacccacacctgctag

SEQ ID NO: 25725 - DNA, 2616 bp, synthetic construct
  source 1..2616: mol_type = other DNA; note = Synthetic coding sequence
atgggcgacagcgacgacgagtacgaccggcggcggcgggacaagttcaggagggaaaggagcgactatgatcggagcagagagagagacgagaggcgaaggggggatgactggaatgaccgggagtgggacaggggccgggaacgccgctccaggggtgagtatcgcgattatgataggaacagacgggagagattctcccccccccgccacgaactgagccccccacagaaacgaatgaggagagattgggacgaacatagttccgatccttaccacagcggatatgagatgccttacgctggcggggggggaggccccacctacggccctcctcagccatggggtcaccccgacgtgcatatcatgcaacaccacgtccttcccatccaggcgagactgggaagcatcgccgagattgatttgggggtgccgcctcctgtcatgaaaacctttaaggaattccttctgagtctcgacgacagcgtggatgagaccgaagcagtgaagaggtacaatgactacaagttagatttcagacggcagcagatgcaggatttttttctagcacataaagacgaggagtggttccgttctaaatatcaccccgatgaagtgggtaagcggcgtcaagaagcgagaggcgcactgcagaacaggcttagagtgttccttagtctcatggagacaggctggtttgacaatctgctgctggatatagataaagccgacgccatcgtaaagatgttggatgcagctgtgataaagatggaaggaggaacagagaacgatcttaggattttggagcaggaagaagaggaggagcaggcgggtaagccaggggagccctctaaaaaggaagagggaagagccggcgctggactgggggacggtgagaggaagaccaatgataaggatgaaaaaaaggaggacggaaagcaggccgagaacgactcgtcgaatgacgacaagacaaagaagtctgagggtgatggtgataaagaggagaagaaagaagattctgagaaggaggccaaaaagtccagcaagaagagaaaccgcaagcactctggcgacgattcattcgatgaaggatccgtcagtgagtccgagtccgaatctgaaagtgggcaggcagaagaagaaaaagaggaagcagaggctctgaaggagaaagagaagcccaaggaggaggagtgggaaaaaccaaaggacgcagcaggactagagtgcaaaccgagacctctgcacaagacatgcagtctgttcatgcggaatattgccccaaacattagcagggccgaaatcatatctctctgcaagcggtaccctggcttcatgcgcgtggcactatctgaacctcagcccgaacggcgtttttttcgccgcggttgggtcacattcgaccgctccgtcaacattaaagaaatctgctggaatctacaaaatatccgactgcgagaatgtgagctttctccaggcgtaaacagggatctgacccgtcgtgtgagaaatattaatgggattacccagcataagcagatcgtgcggaatgatataaagttagccgccaagctgatccataccctcgatgaccgcactcagctttgggcctcagagcccggcaccccccccttgcccacgtccctgccaagccagaatccaatactgaagaacattacggactacctgatagaggaggtatcagcagaggaagaagaactgctgggctcttctggaggggcacctcccgaggagccaccaaaggagggaaaccccgccgaaattaacgttgaacgcgacgagaaactcatcaaagtgttggacaaactccttttgtacttgcgcatcgtccacagcctagactattacaacacctgcgagtaccctaatgaggacgagatgcctaataggtgcggcatcatacatgtaagggggcccatgccaccgaataggatttctcatggagaagtgctggagtggcaaaaaacctttgaggagaagctgaccccactcttgagcgtccgcgagtctctgagtgaagaggaggctcagaagatgggccgtaaagaccctgaacaggaggttgaaaagtttgttacgtctaatactcaggaactgggtaaggacaagtggttgtgtcccctctccggaaaaaaatttaaagggcccgagttcgtcaggaaacatatcttcaacaagcacgccgaaaagatcgaagaagttaagaaagaggtagcctttttcaacaactttctgacggatgcgaagcgccctgctctcccagaaattaaacccgctcagcccccaggccctgctcaaagcttaacacctggcttgccttacccacaccagactccgcaaggactgatgccgtatggccaacctagaccccccatcctgggctacggggcgggcgcagtaagacccgcagtgcccaccggcggcccgccgtaccctcacgcaccttatggggccgggcgcgggaactatgatgctttccgcgggcagggcggatatcctgggaagccccgcaatcggatggtcagaggtgaccctagggctatcgttgaatatcgggatctcgatgcaccagacgatgtggattttttttag

SEQ ID NO: 25726 - DNA, 2025 bp, synthetic construct
  source 1..2025: mol_type = other DNA; note = Synthetic coding sequence
atgcagaccagcagcagccggagcgtgcacctgagcgagtggcagaagaactacttcgccatcacgagcggtatttgcacaggcccaaaagctgatgcataccgcgcacagattttgcgaatccagtacgcatgggcgaattccgaaattagccaagtgtgtgcaaccaagctgttcaaaaaatatgctgagaagtattcagctatcatcgacagcgataacgtagaatctggactgaataattatgcagagaatattttaaccctggccgggtcacagcagactgattccgataaatggcagagtggcctgtctattaataacgtcttcaagatgtcctccgttcagaaaatgatgcaggctgggaagaaattcaaagactctctacttgaaccggccctcgcatcagtggtgatccacaaggaggcaaccgtgtttgacctgcccaagttttccgtgtgcggatcctcccaggagtccgattctcttcctaattctgcccatgatcgagatcgaacgcaggattttcctgaatccaatcggctgaaattattacaaaatgcacaaccacctatggtcaccaataccgcccgcacgtgccccaccttcagtgccccagtgggcgaaagtgcgactgctaagttccatgtaacgcccctcttcgggaacgtcaagaaggagaatcattcatccgccaaggagaatatcggcctgaatgtgtttttgtctaatcaaagctgcttcccagccgcctgcgagaatccccaaagaaagtctttctatggctcaggcactatcgatgctctttcaaatccaattttaaataaagcatgtagcaaaaccgaggacaacggaccaaaagaggattcctcccttcctacctttaaaactgcaaaggagcagctctgggtggaccagcagaaaaagtatcaccagccgcaaagagcatctggctccagttacggcggcgtcaagaagagtctgggagccagcagaagcagaggtattctaggtaagttcgtcccgcccatcccgaagcaggatggcggagaacagaacgggggcatgcagtgcaaaccatacggcgccggtcccaccgagccagcgcatcccgtcgacgagagactcaagaatctcgaaccaaagatgatcgaactgattatgaacgagattatggatcacggtccgccagtcaattgggaggacattgccggcgtggagttcgctaaggcgactatcaaagagattgttgtgtggccgatgctgaggcccgacatctttacgggcctgagaggcccccctaaagggatcctcctcttcggtccgccagggacaggcaagaccttgatcggcaagtgtattgccagccaaagtggcgcaacgttttttagcatttcagcgtccagcttaaccagcaagtgggtaggcgagggggagaagatggtgcgcgctctattcgcagtggcacgctgtcagcagccggccgtgatctttatcgatgaaattgatagcttgttaagtcagagaggggatggcgagcacgagtcgtcccgccgtatcaaaactgaatttcttgtgcaattggatggcgctactactagctctgaggaccgaatactggtagttggggccaccaaccggccacaggagatcgacgaagccgcaagaaggcgactggtgaagcgtttatatattccattgcccgaggcttctgcccgcaagcaaatagtgatcaacctaatgtcgaaagagcaatgttgcttatccgaggaggaaatcgaacagatcgtccagcaaagtgatgcgtttagtggcgccgatatgacccagctctgcagagaggcaagccttggaccaatacgtagcctgcagactgcagatatcgccactatcacccccgaccaggtaaggccgatcgcttatattgactttgagaacgcattcaggacagtgcgtccatctgtctctccaaaggacctagagctgtacgaaaactggaacaaaactttcggttgtggcaagtag

SEQ ID NO: 25727 - DNA, 1467 bp, synthetic construct
  source 1..1467: mol_type = other DNA; note = Synthetic coding sequence
atgagcgacgaggtgttcagcaccaccctggcctacaccaagagcccaaaggtcacaaaacgcaccacttttcaagatgaacttatcagagcaatcactgcccggtctgcccggcagaggtctagcgaatactccgacgactttgactccgacgaaattgtcagccttggcgattttagcgatacaagcgctgatgaaaacagtgtaaacaaaaagatgaacgatttccatatctcagacgatgaggaaaagaatcccagtaagctactgtttttgaaaactaacaaatccaacggcaacattacaaaggacgaacctgtttgcgcaattaaaaatgaagaggagatggcgcccgatgggtgcgaggatattgtcgttaaatctttttcagagtcccagaataaggacgaagagttcgagaaagacaaaatcaaaatgaagcccaagccgcgaatcctcagtatcaagtcaacaagtagtgagaataattccctagacacagacgatcacttcaaaccatccccccggcctcggtcgatgctgaaaaaaaaatcacacatggaagaaaaggacggactggaggacaaagagaccgctttgtctgaagagttggaattgcattctgcccccagctctctccccacccctaatgggatccaactggaagcagagaaaaaagcctttagtgagaaccttgatccggaagacagctgcttgacaagccttgcatccagcagcctcaaacagatcctgggagactcattctcgcccggctcagagggcaacgcttctggcaaggaccccaacgaagaaatcaccgagaaccataattccttgaaaagcgacgagaataaagagaatagcttcagtgcagaccatgtaaccacagcagtggagaagtcaaaggagtctcaggtaacagccgacgatctagaagaggagaaggcgaaagccgagttgatcatggatgacgacagaaccgtggaccctctgcttagtaagagccagagcattctcatctcgacctccgcaaccgctagctctaagaaaaccatcgaggaccgcaacattaaaaacaagaagtccacaaacaaccgggcaagcagcgcgagcgcccgccttatgacgtcggaatttttgaaaaagtctagttccaaaaggagaaccccctccacaactacttccagccattatttaggaaccttgaaggtgctcgaccagaagccttcacaaaagcagagcatagagcccgaccgcgcagacaatatccgggccgcagtataccaggaatggctcgagaagaaaaatgtctacctgcacgagatgcaccgaatcaaacggatagaatccgagaatctccgcatacagaatgagcaaaaaaaagcggcaaagagggaggaggctctagcctcctttgaggcatggaaggctatgaaagagaaggaggcgaaaaaaatagctgcatag

SEQ ID NO: 25728 - DNA, 564 bp, synthetic construct
  source 1..564: mol_type = other DNA; note = Synthetic coding sequence
atggtgcgggagcccggcccccggcccggcacccccggctgcagcgcatccggccaatggaccgccacattgcgcccatatctctcagctgtgcgggctaccctgcaggccgcactgtgcttagagaacttcagtagccaggtggtggaaaggcacaacaagcccgaggtggaggtgcgcagttcaaaagagctgctcctacagccagtcaccatttcccgtaatgagaaagagaaggttctgattgaaggatctatcaacagcgttcgagtgtctattgctgttaagcaagccgatgagatcgagaagatcttgtgccacaagtttatgagatttatgatgatgagagctgagaactttttcattttaagaaggaagcccgttgaaggctacgatatctccttcttgattaccaacttccacaccgagcagatgtataagcataaactggtggactttgtgattcatttcatggaagagatcgataaggagatctctgagatgaaactttcagtcaacgcacgagcgcggatcgtagccgaagagtttttgaagaacttctag

SEQ ID NO: 25729 - DNA, 1068 bp, synthetic construct
  source 1..1068: mol_type = other DNA; note = Synthetic coding sequence
tgaagcctggccagcagcctgcggaacaaggagggcaccctgggcagcaaggtgggttaccttgatgtggaggcacgcggtcctggggagggaaggggtggcggaggagaaagcccccccctccaacccccaccccccgcccccgtcctgctatacgaccaggggggtggcaggagaaggcggggggaggcggaggcagaggccgaggaatgggaggcagagtccgttctgggcacattactgcagaaattgagagaagagggctaccttgcttactatctgcaagggggcttttccaggttccaagctgagtgccctcacctgtgtgagacaagcctggctgggagagcaggcagtagcatggcacccgttccaggccccgttcctgtcgtaggcctgggatcactttgcctgggctctgactgctccgatgccgagtctgaggctgacagggactccatgagttgcggactcgattcggagggggcgacacccccaccagtgggcctcagagcctccttccccgtgcaaatccttccgaacttgtatctgggaagcgcaagggatagcgcgaacctggaatccctcgccaagctggggatccggtacattctgaatgtaaccccgaacctgccgaatttcttcgagaagaacggagacttccactataagcaaatacctatttccgatcactggtcccagaatctgtcccggtttttccccgaagctattgaattcattgacgaggcactgtctcagaactgtggggtgctcgtacactgtcttgccggggtcagtcggtctgtaaccgtaacagtcgcctacctgatgcaaaagctacacttgtccctgaatgatgcatatgatctggtcaaacgcaaaaagtcaaacatcagccccaactttaacttcatgggacagttgctggatttcgagagaagtctcaggctcgaagagagacattcccaagagcaagggtctggaggtcaggcttctgctgcatctaacccaccaagtttttttacgactcccacttccgatggggcttttgagcttgcaccaacctag

SEQ ID NO: 25730 - DNA, 51 bp, synthetic construct
  source 1..51: mol_type = other DNA; note = Synthetic coding sequence
atgtgcaccagcgagaccttccaggccctggacaccttcgaggcccgttag

SEQ ID NO: 25731 - DNA, 1620 bp, synthetic construct
  source 1..1620: mol_type = other DNA; note = Synthetic coding sequence
atggccaccagcgcccccctgcggagcctggaggaggaggtgacctgctccatctgtctcgactatctcagggaccccgttaccatagactgtggacacgtgttctgtaggtcatgtacgactgacgtgcgccccatatccgggtctcggccagtctgccccctgtgcaagaagccgttcaagaaagagaacatcaggcctgtgtggcagctcgcctcccttgtggagaatatcgagcgactgaaggtcgacaaggggagacagcccggagaggtgacacgtgaacaacaggacgctaagctctgtgagcgccatcgggagaagctgcactattactgcgaggatgacggcaaactgctctgcgtgatgtgtcgtgaatctagagagcaccgtccacacacggccgtgctcatggagaaggccgcccagccacacagggaaaagatcttgaatcacctgtccactctgaggagggaccgagataaaatacagggatttcaggctaagggagaggcagacattctcgccgcactgaagaagctgcaggatcagcggcagtacattgttgcggagtttgagcagggccatcagttccttagggaacgcgaggagcatctcctcgaacagctggccaagctggagcaggagctaactgaaggacgcgagaagtttaaatcacggggggttggcgaactggcacgcctggcgctggtgatatccgagctggagggaaaggcccagcagccagccgcagaattgatgcaggacactcgggatttcctgaacaggtatccaagaaaaaaattctgggtcgggaaaccaatcgccagggttgtgaaaaaaaaaacaggcgaattcagtgacaaattgctgagcctgcaaagagggctgagagagtttcaaggtaagttactgagagatctagagtataaaaccgtgtctgtgacgctcgacccacaaagtgcctccggctacttacagttgtctgaagactggaaatgtgtcacatacacttccctttataaaagcgcctatctacatcctcagcagtttgattgtgaaccgggcgtgctgggatcaaagggtttcacttggggtaaagtgtactgggaagtggaagtggaacgcgagggatggagcgaggacgaagaagaaggcgacgaggaagaagaaggggaggaagaagaggaagaggaagaagcgggatacggagatggctacgatgattgggagactgacgaggacgaggagtccctgggggatgaggaggaggaggaagaggaagaggaggaggaggttctggagtcctgcatggttggagtggccagggattctgtgaaacgcaagggagacctgtcccttcggccagaagacggcgtttgggcgcttaggctgtccagctcggggatctgggcaaatacgtctcctgaggctgagctgtttccagcccttcggcctagaagagtaggaattgccctggattatgagggaggtacggtgaccttcaccaacgcagagtcccaagagcttatttacacctttacggctactttcacccgacgcctggtcccttttctctggctgaagtggccaggcacgcgtttgctgctcagaccctag

SEQ ID NO: 25732 - DNA, 474 bp, synthetic construct
  source 1..474: mol_type = other DNA; note = Synthetic coding sequence
atggccaccagcgcccccctgcggagcctggaggaggaggtgacctgcagtatatgtttggactatctgagggacccggtgactatcgattgcggccatgtattctgcagatcctgcaccacagatgtgcgcccaatctctggctcccgccctgtgtgcccactctgtaagaaacccttcaaaaaagagaatataagacctgtgtggcagttagcttccttagttgagaacatcgaacgcctaaaagtcgacaaagggcggcagcccggcgaggtgactagggagcagcaggatgctaagctgtgtgaacggcacagggagaaactgcactactactgtgaagacgacgggaagttgctctgcgtaatgtgccgcgagtcccgcgagcatcgaccacacaccgccgtacttatggaaaaggcggctcagccccaccgtgaaaagattttgaaccatctttcaaccctccgatag

SEQ ID NO: 25733 - DNA, 2553 bp, synthetic construct
  source 1..2553: mol_type = other DNA; note = Synthetic coding sequence
atggagcccgagcggaagggcctgagcctggccagcagcagcgacggagatggtcgagaagagaacaagttgaaacagggaatttcacaggacctggcatctagctcaagactggatcgatataagatcgctcgtcagctgactgaaaaggctattaaagagaagaaaatattctctatttacgggcattatcccgtagtcagggctgctctgcgccgaaaggggtgggtggagaaaaagttccatttcctccctaaggtgatccccgatgtggaggatgaaggcgcccgcgtcaatgacgacacatgtgccaaggtcaaagagaaccaggagatggctttagagaagacagacaatatacatgacgtgatgagtcgcctcgtgaagaatgaaatgccatatctactttggacgattaaacgcgatatcatcgattatcattcacttacatatgaccagatgctcaaccattatgcaaagacggcctcatttaccaccaagatcggactgtgcgtgaacatgcgcagtttgccctggtatgtgccagccaacccagattctttttttccacgttgctattcactctgtactgagagtgagcagcaggagttcctcgaagactttcgaaggacaatggcctcatccatactgaagtgggtcgtgtctcaccagtcttgctctaggagctcccgcagcaagccgcgcgatcagcgggaggaagcaggatcgagtgatttaagttctagacaggatgccgagaacgccgaagctaaactgcggggactgccaggccagctcgtggacatcgcttgtaaggtttgccaggcatacttgggtcagctggagcacgaggatatcgacaccagcgctgatgcagtggaggatttgaccgaagcagaatgggaggaccttactcagcagtattacagcctcgtacatggcgatgccttcatctccaattcccgaaactacttcagtcagtgtcaagcactgctgaacagaattacctccgtcaacccccagacagatattgacggcctgaggaatatttggatcatcaagcccgccgctaagtccaggggcagagacatcgtttgcatggacagggttgaggagatcttagaattggcggctgcagaccatcccctgtccagagataataagtgggtagtgcaaaagtatattgagacacccctgctgatctgcgatacgaagttcgacatccgacagtggttcctggtcaccgactggaacccacttactatctggttttataaagagagctatctgagattcagcacacagcggttcagcctggacaagttagattcggccatccacctttgcaacaatgcagttcagaaatacctgaagaatgatgttggcaggagcccattgttacccgcccacaatatgtggacttccacacgattccaagaataccttcagcgccaaggtcgcggcgccgtctgggggtctgttatttatccctcaatgaaaaaggctatcgcccacgccatgaaggtggcacaagaccatgtggagccacggaagaactcgtttgaattgtacggggccgatttcgttctgggtagggatttccggccttggctgattgagattaatagctctccaacaatgcacccatcaacacctgttacggcccagttatgcgcccaggttcaagaggatacgatcaaagtggcagtggacaggtcttgtgatatcggcaatttcgaacttctatggcggcaacccgttgtggaacccccaccattttcaggctccgatctttgtgttgccggggtttccgtcagacgggccaggcgccaggtgctgccagtgtgcaacctcaaggcttcagcctccctactggatgctcagcctctgaaggccagaggtccatccgctatgccggatcccgctcagggacctccaagccccgctctgcagcgtgacctcggcttgaaagaagagaaggggcttccactcgcgctcctcgcgccccttagaggcgcagcagagagtgggggcgctgctcagccaacacgcacaaaggctgccggaaaagtcgaactcccggcttgcccgtgccgccatgtggatagccaggcccccaacacgggcgtacccgtcgcccagcccgccaaaagctgggacccgaaccaattaaatgcacaccctctggagccggtgctgcgggggctgaaaacagcggagggcgccctgcggccgcctccaggtggaaaaggggaaggaacagtgtgctcacggctccctcatcatggacatcatgtggcagcctgtcagacgaccggtacaacctgggatggtggcccaggagtttgttttcttcgccagctcctggcaagtgagctccccatggggcccgggctcccaagagatcccagggctcctccatgtctggtttgtcgcggactattgccccccgctggcccttgcaagcgatgccggtccttttgcgccgccgtgttacagggcgccagctttgtcagactgggggggcggtcctgtagccctaggactccttag

SEQ ID NO: 25734 - DNA, 2739 bp, synthetic construct
  source 1..2739: mol_type = other DNA; note = Synthetic coding sequence
atgaagcggggcatccggcgggaccccttccggaagcggaagctggggggcagagctaagaaagtcagagagccaacagcagttaatagcttctatagagaggcaagtctcccttctgtctgggcttcactgcgacggcgggagatggtgcgttccggtgctcgacccggacaggtcctgagctctggcaggcacacgggaccagctaaactgacgaatggaaagaaggcaacctatcttcgtaaaattccacggttcaacgcagactccggctacagcattcattctgattcggagtcccaggcagaaacagttcacggcctcgacgggtgcgctagcctcctccgcgacattctccgaaacgaggactccgcctcctctgataataagaagcagatccctaatgaagcttccgcaagaagtgagagagatacctcggatctggagcagaactggagtttgcaagatcactataggatgtattcccccataatttaccaggcactgtgtgagcatgttcagacccagatgagtctgatgaacgatctgacctcgaaaaatataccaaatggtattccggcagttccctgccacgcccctagtcacagcgagtcacaggcgaccccccactcatcctacgggctctgcacaagtacccctgtgtggagcctgcagagaccgccatgcccccctaaggtgcactccgaggtgcaaaccgacggcaactcccagttcgccagtcagggtaagactgtaagtgctacctgcacggacgtgttacggaactctttcaataccagtcctggggtcccgtgttctctccctaaaacagacataagtgctattccaacactgcagcagctgggcctggtcaatggcatactgccacaacagggcattcataaggaaacggacttgctgaaatgtattcagacttatctgtccttatttcggagtcacggcaaagagacccacttggactcacagacccataggagtcctacacaaagccagcctgcctttcttgcgaccaacgaggaaaagtgtgcaagagaacagatccgggaagcaacatcagaaagaaaggatcttaatatccacgtgcgggatactaagacagttaaggatgttcagaaggccaagaacgtgaacaaaaccgcggaaaaggtgagaatcattaagtatctgctgggtgagctgaaggctctcgtcgctgagcaggaggattcggagatacagcggttgatcacagagatggaagcctgtataagcgtccttcccaccgtgagtgggaatactgatatccaggtggagatcgccctggcaatgcagcccctgaggagcgagaatgctcagcttcgaaggcaactgcgaatcctcaaccagcaactgcgggagcagcagaagacccagaaaccctccggcgcagttgactgtaaccttgagttgttttcccttcagtctctcaacatgtcacttcagaatcaattggaagaaagcctgaagtctcaagagctgctccaaagcaagaatgaggagcttctcaaggttattgagaatcagaaggatgaaaacaaaaaattcagcagcatttttaaggataaggaccagaccattctggagaacaaacagcaatacgacatcgagataactcgaataaaaattgagctggaggaggccttggtcaacgtgaagagtagtcagttcaaactcgaaaccgcagagaaggagaaccaaatactggggattactctgcgccagcgcgacgccgaagtcacacgcctacgcgagttaacgcgcactctgcagactagcatggccaaacttctgagcgacctgagcgtggattccgctaggtgtaagccagggaacaacctcaccaaatctctcttgaatatccacgataagcagctccaacacgaccccgccccagcccataccagcatcatgagttacctgaataagcttgagaccaactattccttcacacattccgaacccctgagcacaattaagaacgaggagacaatcgaaccagacaagacatacgagaacgtcctctcctcgcgaggaccgcagaattctaataccaggggtatggaggaagctagcgcgccagggattatcagtgccctcagcaaacaggattctgacgagggttccgaaacaatggctttaatagaggatgaacataatctggataacacgatctatatacccttcgccagatccacacccgagaaaaaaagtcctctgtcaaagcgcttgagcccccagccacagattagggctgcgacaactcagctagtgtccaatagtggcctggctgtgtcagggaaggaaaacaagctgtgcacccccgtgatttgtagcagctctacgaaagaagccgaagacgctcctgagaaactgagcagagcctcagatatgaaagatactcaattgctcaaaaaaattaaggaggcaattggcaagattcccgcagccacgaaagagcccgaagagcaaaccgcttgtcacggtccaagcggatgcctctcaaattccctgcaggtgaaaggtaatacggtctgcgatggatctgtgtttacatccgatctgatgagcgattggtccatttcttcattctctacctttacaagtcgcgatgagcaggattttcggaatggattggccgcactcgacgctaatatcgcacggctccagaagagcctgagaacgggccttttggaaaaatag

SEQ ID NO: 25735 - DNA, 528 bp, synthetic construct
  source 1..528: mol_type = other DNA; note = Synthetic coding sequence
atggagctgaccatcttcatcctgcggctggccatctacatcctgacatttcccctgtacctcctgaattttcttggattgtggtcatggatctgtaagaagtggtttccttacttcctcgtgcgctttacagtgatctataacgaacagatggccagtaagaagagagaactgttttccaacctgcaggagtttgccggacccagcggcaagctgagtctgctggaggttgggtgcgggaccggggcaaatttcaaattttatcctcccggatgcagagtgctgcggccgggaggcgccttctactttatggagcacgttgccgccgagtgctctacttggaactacttttggcagcaggtcttagaccccgcttggcaccttcttttcgacggctgtaacctgacaagagagtcctggaaagccctggaacgagcgtccttctccaagctgaaattacagcatattcaggccccgctcagttgggaattggtacggcctcacatttatggctatgcagtgaagtag

SEQ ID NO: 25736 - DNA, 1392 bp, synthetic construct
  source 1..1392: mol_type = other DNA; note = Synthetic coding sequence
atgagcggcggcaccccctacatcggcagcaagatcagcctgatcagtaaagcagaaatccgttatgaagggattctatatacaatagacaccgaaaactcgaccgtggcactggccaaggtgaggtccttcgggacggaggaccgtccgacagaccggcccattcctcctagagacgaggtgtttgagtatatcatcttccgggggagtgatatcaaggacttgactgtgtgcgagcctcccaaacctcagtgctctctgccacaggatccggccatcgtgcagtcttctctgggatcaagcacttcaagcttccaaagcatggggtcttatggcccatttggtcggatgcctacctatagccagttcagtccgagctccctggtggggcagcagttcggggcagtgggggtggctggttcatctttgacatcctttgggaccgagacatcaaattccggtaccctgccgcagagcagcgccgtcggctcagcctttacccaagacacccgaagcctcaagacacaactatctcagggaagatcgagtccccagcttgaccctctaaggaaatcccctactatggaacaggctgtccagactgcttccgcccacctcccagctcctgccgctgtgggccgaagatccccggtgtccacaagacctttgccttcagccagccagaaggctggcgaaaaccaggaacaccgcagagcagaggttcataaggtgagccggccagagaacgagcagttgcggaacgacaataaacggcaggtggcacctggagcaccctccgccccgagaaggggcaggggagggcacaggggaggcagggggcgcttcggtatccgcagagacggcccaatgaaatttgaaaaggatttcgacttcgagagcgccaatgcccaatttaacaaagaagaaatagaccgggagttccacaataaattgaagttaaaagaggataagctcgagaagcaggagaagccagtcaatggcgaagataagggggacagcggtgtggacacacaaaatagcgaggggaacgccgacgaagaagacccgctggggcccaattgttattacgacaaaaccaaatcattcttcgacaatatttcctgcgacgacaatcgggagcggcgtcctacgtgggccgaggaaaggcggctcaatgcagaaaccttcggtatccctctgagaccaaatagaggccgtggtggctatcgggggagaggcggccttgggttccggggaggcagaggacgcgggggtggacgtggtggaacctttactgccccaagaggtttcaggggcggtttcagaggcggtcgcggaggcagagagtttgcagacttcgagtatagaaagaccactgcttttggaccctag

SEQ ID NO: 25737 - DNA, 2790 bp, synthetic construct
  source 1..2790: mol_type = other DNA; note = Synthetic coding sequence
atggccgaggtggaggccgtgcagctgaaggaggagggcaaccggcattttcagttgcaggattataaggccgctactaactcatacagtcaggctttgaagttgaccaaagataaggctctgctcgcaacactctacaggaatcgtgccgcttgcggtctaaagacggagtcatatgttcaggctgcctccgatgccagtcgggccatcgatattaattcctccgatatcaaagccctgtacaggcgctgccaggctctggaacatctcggaaagcttgaccaagcgtttaaggacgtgcagagatgtgccacgctggagccaaggaaccagaactttcaggagatgctgcgccggcttaatacctcaatccaagagaaactccgtgtccaatttagtactgactccagagtgcagaagatgttcgagatacttctcgatgagaattccgaggcggataaacgcgaaaaggccgcaaacaacctgatcgtactggggcgcgaggaggcgggcgccgagaaaattttccaaaataatggcgtggctttgctcctccaactgttagacactaagaagcccgagttggtgttagccgctgtgcggaccttaagcggaatgtgtagtggtcaccaggcaagagccacagtgatattacacgctgtgaggatcgaccgcatttgctccctcatggctgtggaaaacgaagagatgtcacttgcggtgtgcaatctgctgcaggccatcattgattccctgagcggagaggataagcgggaacatcgaggaaaggaagaagccctggtcctggacaccaaaaaagatctgaaacaaataacctcccacctcctggatatgctggtctccaagaaggtcagtggccagggccgggatcaggctctcaatctcctgaataagaatgtgccgcgcaaggacctcgctattcatgacaattcaagaactatttatgtggtcgacaatggccttcgaaagattttaaaggtggtggggcaggtgcccgacctgccatcttgtttgcccctaaccgataacacgcggatgcttgctagcattctgattaacaaactttacgatgatttgaggtgtgacccagagcgggatcactttcgcaagatctgtgaagagtatattacgggaaagttcgatccacaggatatggataagaacctcaacgccattcagactgtgtccgggatcctgcagggcccctttgatctgggcaaccagctgctgggattaaagggggtcatggaaatgatggttgccctttgcggctcagaacgagagaccgaccaacttgtggccgtcgaggcactaatccacgcaagcacaaagctgtcgagagcgacgtttataattactaatggagtatccctgctgaagcagatctacaaaacaacaaaaaacgaaaaaatcaagatccggacactcgttgggctttgcaaactgggatccgccggggggaccgattacgggctccggcaattcgcagaggggtccactgagaagctggctaagcagtgcagaaaatggttatgcaacatgagcattgatacccgcactagacgctgggcggtcgagggacttgcatacctcacactggatgctgacgtgaaagacgactttgtgcaggacgtgcctgcgttacaagctatgttcgaactggccaagactagtgataagaccatactgtatagtgttgctacaaccctggtgaattgcacaaatagttacgatgtcaaagaggttatccccgagttagtgcagctggccaaatttagtaaacagcatgtgcccgaagagcatcccaaggataagaaggatttcattgatatgcgggttaagcggctgctgaaggctggggtgatctcagccttagcctgtatggtgaaagccgatagcgctattctgacggaccagacaaaagagttactggcccgggtgttccttgccctctgtgacaaccccaaggaccggggtacaatagtcgcccagggggggggcaaggccctgatccctcttgccctggaggggacagacgtaggaaaagtaaaagccgcacacgcactggccaagatcgctgccgtctcaaacccggacattgctttcccgggcgagcgagtttacgaagtcgttcgtccgctggtgaggcttctggacactcagagggacggtctccagaattatgaagccttgcttgggctcactaatctcagtgggcggagtgataagttacgccagaagatctttaaggaaagggcccttcccgatattgagaattacatgttcgagaatcatgaccaacttcgtcaggcagctaccgaatgtatgtgtaatatggtcctgcacaaggaagttcaggagagattccttgcagatggcaacgatcgtttgaagctggtggtgttattatgtggcgaggatgatgacaaggtgcagaatgccgccgccggggcactggccatgctaacagcagcccacaagaagctgtgtttgaaaatgacacaggtgacgacccagtggctggagatactacaaagactatgtctgcatgaccagctctcagtgcaacaccgggggctggttattgcctacaacctgctggccgccgatgctgagctcgcaaagaagctcgttgaaagcgagcttctggaaatactgacagtggtaggtaaacaagaaccagatgaaaagaaagcagaagtcgttcagacagccagggaatgccttataaagtgcatggactacggattcatcaagccggtaagttag

SEQ ID NO: 25738 - DNA, 246 bp, synthetic construct
  source 1..246: mol_type = other DNA; note = Synthetic coding sequence
atgagccactacggcagctactacggcggcctgggctacagctgcggtggattcgggggactgggttatggttacggctgcggctgcgggtccttctgccgccggggatcaggctgtggatatggaggctatggctacgggtcaggattcgggggttatggatacggcagcggttttggtggctatgggtacgggtgctgccgaccatcctataacggcggatatggcttctccggattttactag

SEQ ID NO: 25739 - DNA, 150 bp, synthetic construct
  source 1..150: mol_type = other DNA; note = Synthetic coding sequence
atggaggtgccccggctggaccacgccctgaacagccccaccagcccttgtgaagaggtcatcaagaatctgtccttagaggctatacagctgtgcgacagggatgtggttttcgaggagctgacttcaaaacagactcggaaagggtag

SEQ ID NO: 25740 - DNA, 498 bp, synthetic construct
  source 1..498: mol_type = other DNA; note = Synthetic coding sequence
atgagccggtacctgcggccccccaacaccagcctgttcgtgcggaatgtcgccgatgacacccggtctgaagacctgagaagagaattcggacgctacggccccattgtcgacgtgtacgtccctttggacttctataccagacgaccccggggctttgcttatgtgcagttcgaagacgtgcgtgacgcagaagacgccctacataatcttgataggaaatggatttgtggccgccagatcgaaatacaatttgcccagggagatcggaagacacctaaccagatgaaggccaaggagggaagaaacgtgtattctagcagcaggtatgacgattatgaccgctatcggaggagtaggagcaggtcctacgagaggcgccggtcgcggtcgcgctcttttgactataactatcggaggtcttacagccctcgtaagccaaactgctcatggaacacccagtattcctctgcttactacactagccgaaagatctag

SEQ ID NO: 25741 - DNA, 1803 bp, synthetic construct
  source 1..1803: mol_type = other DNA; note = Synthetic coding sequence
atggccagcaaccacaagagcagcgccgcccggcccgtgagccggggcggcgtgggactcacgggccgcccaccatctggtatcaggcctctgagtggcaacatacgcgtggccacagctatgccccccgggaccgctcgaccaggctcacgtggctgtcctatcggcaccggtggcgttctaagtagccagattaaggtcgcccacagacctgtgacccagcaaggcctcacgggaatgaaaacggggaccaagggcccccaacgtcagatattagataagtcctattacctggggctcctgcgatcgaaaatttcagaactgacgaccgaagtcaacaagctgcagaagggaatcgagatgtacaaccaggagaattcagtttacctgtcgtacgagaaacgagccgagaccctggcggtggagatcaaagagctgcagggccaactcgcagattacaatatgctggtggacaagctgaacactaacacggagatggaggaggtgatgaatgactacaacatgctgaaagcccagaatgaccgcgagacacagagtctggatgtgatcttcaccgaaaggcaggccaaagaaaagcaaatccgttcagtagaagaagagatcgaacaggagaaacaagcaacagacgatatcataaaaaatatgagcttcgagaatcaggtcaagtacctggagatgaaaactactaatgaaaagcttctccaggaattagacaccttgcaacagcagctcgactctcagaacatgaagaaagaatctcttgaagctgagatcgcacactcgcaggtgaagcaggaagcagtgctactacacgaaaagctctacgagctcgaaagccatcgggatcagatgatcgcagaggataagtccattgggtcccctatggaggaacgggagaagcttttgaagcaaataaaggatgataatcaggaaatcgcatccatggagaggcagctcactgacaccaaagagaagatcaatcagtttatagaggagattagacagttggacatggaccttgaggaacaccaaggcgaaatgaaccagaagtacaaagagctgaagaagcgagaggagcatatggatacattcatcgagactttcgaggagaccaaaaatcaggaactcaagaggaaggctcagattgaggctaatatcgtcgccctgctcgagcattgtagccgtaatattaacaggattgagcagatatcttcaattaccaaccaagagttgaagatgatgcaagatgacctgaactttaagtccaccgaggtccagaagagccagagcaccgcccagaacttgacaagcgatattcaaaggttgcagcttgaccttcagaagatggaacttctcgagtccaaaatgactgaagagcagcattcattgaagtcaaagattaagcaaatgaccaccgacctggagatttataacgatctcccagccttaaagagcagcggagaggaaaagattaagaaactgcaccaggaacgaatgatcctatctacccataggaacgcctttaaaaagatcatggaaaagcagaacatcgagtatgaggccctgaagactcaattacaagagaacgaaacccattctcagctcaccaacctggaaaggaagtggcaacatcttgagcagaataattttgccatgaaggagttcattgccaccaaaagccaagaaagcgattaccagccaatcaaaaaaaacgtgaccaagcagatcgccgaatacaacaaaacaatcgtcgacgccctccattctacgtcaggcaactag

SEQ ID NO: 25742 - DNA, 465 bp, synthetic construct
  source 1..465: mol_type = other DNA; note = Synthetic coding sequence
atggtgagcagcgcccagatgggcttcaacctgcaggccctgctggagcagttatctcaggatgaattatcaaagttcaagtatctcatcacaactttcagcctggcccacgaattacagaagattcctcataaggaggtcgacaaggccgatggcaagcagctcgtcgagattctgaccacccactgtgactcttactgggtggagatggccagcctgcaagtttttgagaagatgcacaggatggatctgtctgaacgggccaaggacgaggtgcgggaagcagccctgaaatcattcaataaaaggaaaccattaagcctgggaattacaaggaaagaacgacccccgttggatgtggatgagatgctagaaaggttcaaaacagaggcacaggcttttactgagactaaaggaaatgtcatttgtctgggcaaagaagtttttaagggcaagaaaccctag

SEQ ID NO: 25743 - DNA, 474 bp, synthetic construct
  source 1..474: mol_type = other DNA; note = Synthetic coding sequence
atggccaccagcgcccccctgcggagcctggaggaggaggtgacctgttccatctgcttagattatctccgtgaccctgtgaccatcgattgcgggcatgtgttctgtcggagttgcacaaccgacgttcgcccgatttctggaagtcgcccagtctgtcccctatgcaagaagccattcaagaaggaaaatattagaccggtctggcagttagcttctctcgttgagaatatcgaaagactgaaagttgacaaggggagacaacccggcgaagtcacaagagaacagcaggacgcgaagctgtgtgagaggcacagagaaaagctgcattactactgtgaggacgacggcaaactgctgtgtgtgatgtgcagggagtcgcgtgaacacaggcctcatactgcagtacttatggaaaaagccgcccagccccaccgggaaaagattcttaaccacttatctactctgcgttag

SEQ ID NO: 25744 - DNA, 348 bp, synthetic construct
  source 1..348: mol_type = other DNA; note = Synthetic coding sequence
atgccccacctgcccctggccagcttccggccccccttctggggcctccgtcatagccgggggttgcctcgattccattctgttagtactcaatccgaaccccacgggagccctatttccaggagaaaccgcgaggcaaagcagaagagattgcgggagaagcaggccacgttggaggccgagattgcgggagagtcaaaatctccagctgaaagtataaaggcttggcggcccaaggagctcgtgctttacgaaataccaaccaagcctggagagaaaaaagatgtctccggtccccttccgcccgcctattcccctcgatatgtggaggccgcatggtatccttag

SEQ ID NO: 25745 - DNA, 432 bp, synthetic construct
  source 1..432: mol_type = other DNA; note = Synthetic coding sequence
gtgcgggagctggaggccgagctggacgccgagcagaagaagcacgccgaggccctcaagggagttcgcaagcacgagagacgagtgaaggaattagcataccaggtgggtgatagagtgagcctcggaagcggtcccggcgccggccccgctcaagcgtcaccggaaagcccacttcccgcccaggccgaagaggacagaaagaatctcgctagaatgcaggacttagtggataaattgcagtcaaaagtaaaaagctataagaggcagttcgaggaagccgagcagcaggcaaacacaaatcttgcgaagtataggaaagcccaacatgagctggatgacgcagaagaacgggcagatatggccgagactcaggcgaataaactccgggctaggaccagggacgccctgggccctaagcataaagagtag

SEQ ID NO: 25746 - DNA, 828 bp, synthetic construct
  source 1..828: mol_type = other DNA; note = Synthetic coding sequence
atgagcaccatcggcagcttcgagggcttccaggccgtgagcctgaagcaggaaggtgatgatcagccctcagaaaccgatcaccttagcatggaagaggaagacccaatgcctcgtcagatatctcggcagtcctccgtgaccgagtctactctgtaccccaatccctatcaccagccttatatttctagaaagtactttgctaccaggccaggtgccattgaaaccgcaatggaggacctgaaagggcacgttgctgaaaccagtggcgagaccatacaaggattttggctcctgactaagattgatcactggaataacgagaaagagcggatcctgctcgtaaccgataaaacactgctgatctgtaaatatgacttcatcatgctgtcctgtgtccaacttcagcgcatccccctcagcgccgtctataggatctgcctcggtaagtttacatttccaggaatgtccttggataaaaggcagggcgagggcctgcgcatctactggggctcacccgaggagcagagcctcttaagccgatggaacccttggtccactgaggtcccctatgctacttttactgaacatcctatgaaatatacctcagaaaagtttctcgagatctgtaagctgagcggcttcatgtcaaagctggttcccgctattcagaatgcccacaaaaacagtactggctcaggacggggcaagaaactcatggtgctgaccgaacctatcctcattgaaacgtacacaggcctcatgagtttcattggaaacaggaataagttgggctactcccttgcccgcggttctataggattctag

SEQ ID NO: 25747 - DNA, 339 bp, synthetic construct
  source 1..339: mol_type = other DNA; note = Synthetic coding sequence
tgatgcgcccggaccgccggcggctgcctgggctgcctgagcggccagtgctgttgccgcctgtgtcccctgacactccccgccaccagaagcctttgccccggccgggtggtgtgggcgcggcgaaggtggtggccttcctggcttgcctggcgatgtctgtggtgtaccaccagacctcccgcctgtatggagaatacagacgctttcctgtttctgttctcattcactgacagggcatccttcgaagacttgcctgggcagctggcccgtatcgccggggaggcgcctggcgtagttaggatggtgatagggagtaagttcgaccagtatatgtag

SEQ ID NO: 25748 - DNA, 3330 bp, synthetic construct
  source 1..3330: mol_type = other DNA; note = Synthetic coding sequence
atgggcaccggcgacttcatctgcatcagcatgaccggcggcgccccctggggctttcgattacaaggaggaaaggaacagaagcagcccctacaggttgctaagatccgaaaccagagtaaggcatctggaagcggactgtgtgagggggacgaggtcgtgagcatcaatggcaacccctgtgctgaccttacttacccagaagtgattaagctaatggaaagtatcacagacagcctgcagatgctgataaagcgcccctcatccggcatctcggaagctctcattagcgagaatgaaaacaaaaacttggagcatctcactcatggtgggtatgttgagagcacaactctgcagatccgcccagccacaaagacacagtgtactgagttctttttggcaccagttaagaccgaagttcccctggccgaaaatcaacggtctgggccagattgcgctggcagcctcaaggaagaaaccggccccagctaccagcgagcaccacaaatgccagacagtcaacgggggcgcgtggcagaggaattaattctgcgggagaaagtggaggctgtgcaacctggaccagtagttgaattgcagctgtcactctctcaagagagacacaagggggcatccggccctctcgttgctttgcccggcgctgaaaaaagcaagagtccagaccctgaccccaacttgtcacatgatcgcatcgtccacatcaatagtatacccaccaacgagaaagctgatcccttccttcgcagctctaagatcatccagattagttccggacgcgagctccgagtcattcaggaatctgaggccggcgacgccggtctccccagggttgaggtgatcctggactgctccgatcgccagaaaacggaagggtgtcgtctgcaagccggaaaagagtgtgtcgactcccccgtcgagggtggccaatctgaagctcccccatcactggtgagtttcgctgtgagcagtgaaggcaccgagcagggggaagacccccgctcagaaaaggatcatagcagaccgcacaagcatagagctaggcatgctaggctgagacgatcagaatccttaagcgaaaaacaggtgaaggaggccaagtccaaatgcaaaagcatcgctttgctgctgacagatgcacccaatcccaacagcaaaggggtgctgatgttcaaaaaacgacgcaggagggctcggaaatataccctggtgtcttacgggactggggagttggagagagaggctgacgaagaggaagagggtgataaggaggatacttgtgaagtcgcctttcttggcgctagcgaaagtgaggtagacgaagaactgctctcagacgtggacgacaacacacaggtcgtcaattttgattgggattctggcctagttgatattgagaaaaagctgaatcggggggacaagatggaaatgctgccggacaccaccgggaagggcgcgttgatgtttgccaaacggcgcgagcggatggaccagattactgcacagaaggaagaagataaggttggcgggacaccctcccgagagcaggacgctgcacaaactgatggtctgcggaccacaacgagctaccagagaaaagaggaagagtccgtgcgtacccagtccagcgtgtcaaaatcatatatcgaagtgtcccacggcctgggacacgtgccgcagcaaaatggattttctgggacctctgagactgctaacatccagcgaatggtccccatgaataggacggctaagccatttcctgggtctgtaaaccagccagccacaccgttctctcctacccgtaacatgacatcacccatcgctgatttcccggccccccccccttatagcgcagttacccccccgccagatgcgttcagccgtggcgttagttcccccatcgctggcccagcacagccccccccatggccacagcccgcaccctggtcccagccagctttctatgatagtagtgagcgcatagcttcacgcgatgaacgcatcagcgtacccgctaagaggaccggaattctgcaggaggctaagaggcgaagcacaacaaagccaatgtttacattcaaagagccgaaggtttcacctaatccagaacttctaagtctgctgcaaaactcagaagggaagagaggcacaggcgccggcggcgacagtggaccagaggaagattacttatctctgggagcggaggcctgcaattttatgcagagctcttctgcaaagcaaaagacacccccgccagtggccccaaaaccggctgttaagagcagctcatcccagcccgtcactcccgtgtctccagtgtggtctccaggtgtggcccccacgcagcccccagcctttcctacatcaaacccttctaaagggacagtagtttctagcatcaagatcgcccagcccagctatcctccagccagaccagccagtactctgaatgttgcaggacctttcaaggggccccaagcagctgtggcaagtcaaaactacacaccaaaaccaaccgtgtcaacgccaactgtgaacgccgtgcagcctggagccgtggggccctcaaatgagttaccaggaatgtctgggagaggagcacagctgttcgccaagagacaatctagaatggagaaatacgttgttgattcagacaccgtccaggcgcatgccgctcgggctcagtcccctaccccttccctgccagcatcctggaagtactctagcaacgtcagggcaccaccgccagtggcttataatcccatccactcaccttcctaccccctggctgctctaaagagccagccttccgctgcccagccctccaagatgggcaaaaaaaagggcaagaagcccctgaacgccttggacgtgatgaagcaccagccctaccagctcaatgcctctctcttcacctttcaaccaccagacgctaaggacgggctgccccagaaatcctctgtgaaagtgaattcggctctcgcgatgaaacaggccctgcctccaaggcccgtcaacgcggcttcccctacaaatgtacaggcatcgtccgtatacagcgttccagcctatacttccccaccctcatttttcgctgaagcttcgtcccctgtttcagcttcaccagttccggtcggtatcccgacctcacccaagcaggagtccgctagcagttcatatttcgtcgcacccaggcccaagttttctgccaagaaatctggcgtgactatccaggtgaagtgcaagtcaggcattcactctcaggacattatcagaacatacttcccggcttacttaagctcatccacatag

SEQ ID NO: 25749 - DNA, 1554 bp, synthetic construct
  source 1..1554: mol_type = other DNA; note = Synthetic coding sequence
atggagaccgacctgaacagccaggaccggaaggacctggacaagttcattaagttctttgccctgaagactgtgcaggtcatcgtgcaggctcggctgggagagaaaatctgcactagatcctcttctagccctacgggctcagactggtttaatctagctatcaaagacatccctgaggttactcatgaggctaagaaagccctagcaggccagctacctgccgtgggccgaagtatgtgtgttgaaatatcccttaaaacgtccgaaggcgactcaatggagttggagatctggtgtctcgaaatgaacgagaaatgcgataaagaaatcaaagtgtcatacactgtgtacaacagactgagcttgttgctaaaatcattgctcgcgatcaccagagtcactccagcctaccgtctgtcacggaaacagggccatgaatacgtgatcctctacagaatttacttcggcgaagtgcagctctctggacttggcgaaggctttcagacagtaagagtcggaaccgtggggacccccgtcggcaccatcacattgagctgcgcctaccgcattaacctggcatttatgtcaacccggcagttcgaacggacccccccgatcatgggtatcataattgatcatttcgtagaccggccctatcccagctccagcccgatgcatccatgtaattacagaacggctggcgaggacactggggtcatttacccatcagtggaggatagccaggaggtatgcacaacgagcttttccacatccccaccctcacagctcagtagctcaaggttatcttatcagcctgcagcactgggagtgggctccgctgacctcgcctacccggtagttttcgccgccggactgaacgccactcatccacatcaattgatggtgcctggcaaagagggcggcgttccgttggctcccaaccagcctgtccatggcacgcaagccgatcaggagcgcctagctacctgtactccgagcgacagaacccactgcgccgcaaccccctcctcctcagaagacaccgagaccgtgtctaactcttcagagggccgggcttctccccatgatgttctagaaaccatcttcgtgcgcaaggtcggagcattcgtcaataagccaatcaatcaggtcactttgacgagtttggatatcccttttgcgatgttcgcaccaaagaatcttgaactggaagataccgaccccatggtgaacccaccggactctccagaaaccgaatctcccctccaaggatccctccactccgatggatcttctggcgggtcgtctggtaacacacacgatgattttgtcatgatcgactttaaacctgccttttctaaagacgatatactccctatggaccttgggacattctatcgtgagttccagaaccctccacagctctcaagtttgtcaatcgatattggcgcgcagagcatggcagaagatcttgattccctacccgaaaaactagctgtacatgagaaaaatgtgagggagtttgatgcgtttgtcgagacactgcagtag

SEQ ID NO: 25750 - DNA, 348 bp, synthetic construct
  source 1..348: mol_type = other DNA; note = Synthetic coding sequence
atgccccacctgcccctggccagcttccggccccccttctggggcctccgacacagcagggggttgcctcgcttccatagtgtgagtacacagtctgaacctcacggaagccccatcagtagaaggaatcgggaagctaaacaaaagcgtctgcgcgaaaaacaggcgacactggaggcagagatcgccggtgagagtaaaagccctgcagagtctattaaggcctggcgccccaaggagctggtgctatacgagatccctacaaagcctggtgagaaaaaagatgttagcggccccctgcccccggcatactcccctagatatgtcgaagctgcatggtacccatag

SEQ ID NO: 25751 - DNA, 1014 bp, synthetic construct
  source 1..1014: mol_type = other DNA; note = Synthetic coding sequence
atggagctgaagaccctgtgggagaacaagctgatgcagagccgggctgttgatggattccattctgaggaacagcagctgcttctgcaggtgcagcagcagcatcagccacagcaacagcagcatcaccaccaccaccaccaccagcaggcgcagccccagcagacagtaccacaacaggcacaaacacagcaagtcctcattcccgccagtcaacaagccacggcaccccaggttattgtgcctgactctaagttgatccaacatatgaacgcaagtaatatgtccgcagccgctaccgccgctaccctggccctgccagccggggtgactcccgtgcagcagattctgaccaactccgggcagttgctccaggtggtgcgggccgctaatggtgcccagtatatcttccagccacagcaatccgtggttctgcagcagcaggtgattccccagatgcagccaggcggggtgcaggcgccagtaattcagcaagtcctcgcccccttaccaggcggcatttccccccagaccggcgtgataattcagcctcagcagatcttattcaccggcaacaaaacacaggtgattccgactactgtcgcagcaccaactcctgcccaggcccagataactgccactgggcagcagcagccccaggctcaacctgcccagacacaagctccactagtactccaagtcgatggaaccggggatacaagctccgaggaggacgaggacgaggaggaagactacgatgatgatgaggaggaggataaggagaaggacggtgcagaggatggccaagtcgaggaggaacccttgaactctgaagacgatgtttccgatgaggagggccaggaactgttcgataccgagaatgtagtagtgtgccagtatgataaaatccataggtccaagaacaaatggaaatttcacctgaaggacggaattatgaacctcaatggccgcgactatatatttagtaaggcaataggagatgccgagtggtag

SEQ ID NO: 25752 - DNA, 3012 bp, synthetic construct
  source 1..3012: mol_type = other DNA; note = Synthetic coding sequence
atgagccagtggacccccgagtacaacgagctgtacaccctgaaggtcgacatgaaaagtgagatcccctcagacgcacccaaaacacaggaatctctgaaaggcatcctgcttcacccagagcctatcggcgctgctaaaagttttccggccggggtcgaaatgatcaattctaaggtcggcaacgagttcagccatctttgcgacgacagccagaaacaagaaaaagaaatgaatgggaatcagcaggagcaggagaagtcattagtggtgcggaagaaaaggaaaagtcagcaggcggggcctagctacgtccaaaactgtgtaaaggagaaccagggcatactgggcctgagacagcacttgggcacaccttccgacgaggataacgattcctccttcagcgactgccttagttccccgtcaagcagtctccatttcggagattccgataccgtgacttccgacgaggacaaagaggtgtccgtacggcattcccagaccattctcaacgccaagtcaaggtctcacagcgctaggtcacataaatggccccggaccgaaaccgagtccgtgtccggtctgcttatgaagagaccttgcctgcacggatcgtcgctgaggcggttgccatgccgcaagcggtttgtcaaaaataatagttcccagaggactcagaaacagaaagagcgcatcctaatgcagagaaagaagcgagaagtgctggctagaagaaaatacgctctgttgccctccagctcctcctcaagtgagaacgacctgtccagcgagagctcgtcctcatcctcgacagagggagaagaggacttgtttgtctcggcatccgagaaccaccagaataatccagcagtcccttctgggagtatagacgaggacgtggtggtcatcgaggcctcttcaactccacaggtaacagcgaacgaggaaatcaatgtgacgagcaccgatagtgaggttgaaatcgtgacggtcggggaatcgtaccggtctcgatctacactggggcactctcgttcccattggagccagggctcgagtagccatgcctctcggccccaggaaccccgcaacagaagccgaatatcgactgtcattcagcctttacgacagaacgcggccgaggtcgttgatctgaccgttgacgaagacgagcctacggttgtccctactacgtcagcccggatggaatcacaagccacgagcgcctccattaacaatagtaatccctccaccagtgagcaagcttccgataccgcgagcgccgtgacaagctcccaaccaagtactgtgagtgagacgtccgcaacccttacctccaatagcactaccggtacctccattggggatgactctcgacggacaaccagtagtgcggttaccgaaacagggcctccagctatgccaaggctccccagttgttgtcctcagcacagtccttgtggcgggtccagtcagaatcatcatgctctcggccacccccacacctcttgtttccagcagcatggccaccacttccagcatcatcaccatcatcaccacacaccacaccctgccgttccagtctctcccagtttttctgacccggcatgccccgtggagcgccccccacaggtccaggcgccatgcggtgctaatagctcgtctggcacctcctaccacgaacagcaggctctgcccgtggacttatccaattctggcatacgttcccatggttcaggcagcttccacggggccagcgcattcgatccctgttgtcccgtcagcagtagccgcgcagccatctttgggcaccaggctgctgcggctgcccccagtcagcccttgagcagcattgacgggtacggcagttccatggtggcgcagccccagccacagcccccaccacagccaagcctgtctagctgtcgacattacatgccccctccctacgcaagtttgacccgcccactgcatcaccaggcctccgcctgccctcactcacatgggaacccgccccctcagacccagcctcctccccaggtggactacgtgatcccccatcccgtgcatgccttccactctcagatctcgtcacatgccacgtctcatccagttgcccccccacctcctactcacctcgcctccacagcagcaccaatccctcagcacctgccgcccacccaccaaccaatttcccaccacattcccgctaccgccccacctgcacagcgacttcacccccacgaagttatgcagaggatggaggtccaaagaagacggatgatgcagcaccctacaggtctcttcgtgttttgtgtgagcagacgggcacacgaaagaccccctccacacccgcaccggatgcaccctaattatggacacggacatcacattcacgtgcctcagacaatgtcaagccacccccgccaagcacccgagagatccgcatgggaactgggtatagaggccggagtgacagccgcaacatatacccccggggcccttcacccgcatctggctcattatcatgcgccccccagactgcaccatctgcagctgggggccctccccctgatggtgccggatatggctggttacccccacattaggtacatttcctctggtctcgatggtacctcgttcagaggtcccttccgcggaaacttcgaggaactcatacacttagaggagcgactgggcaacgtaaacaggggggcgtctcaggggacaattgaaaggtgcacctacccacacaaatataagaaggtgactactgactggtttagtcaacgaaaactgcactgtaaacaagacggcgaggaggggaccgaggaggatacagaggaaaaatgcacaatctgtctgtcaattctggaagaaggtgaggacgtgaggcggcttccttgtatgcatctgttccaccaggtctgtgtcgaccagtggctaatcacgaataaaaagtgtccaatatgccgcgttgacatcgaggcccagttgccatctgagtcttag

SEQ ID NO: 25753 - DNA, 3309 bp, synthetic construct
  source 1..3309: mol_type = other DNA; note = Synthetic coding sequence
atggccgagaaggaggcccggcggaagttcaagcagatcgtgaccgccgtgtacttttgtcattgtcgcaacattgttcatcgtgatctgaaggcagaaaatctactgctggacgcgaacctcaatataaagatcgcggactttggctttagtaatctctttacaccaggtcagttactcaagacatggtgtggcagccccccgtatgcagcccctgaattgtttgaaggtaaagaatatgacggcccgaaagtggacatctggtcactgggggtcgtgctgtacgtgctggtgtgcggagccctgcccttcgatgggagcactttacagaacctgcgcgcccgggttttaagtgggaagttccggattccgttcttcatgtccactgagtgcgagcaccttatccgccacatgctggtgctggaccctaacaaacgcctgtctatggaacaaatttgcaagcacaagtggatgaaactgggggacgccgatcctaactttgatcgccttattgcagagtgtcaacagctcaaagaggaacggcaagtggatccactgaacgaggatgttctgctggctatggaagacatgggactcgacaaggagcagacactccagtcgctccgcagtgatgcctatgatcattactcggccatctattcattactctgtgaccggcataaaagacacaagaccctacgcctcggagccctgccttccatgcctcgcgcccttgcttttcaagcgccagtgaacattcaagccgagcaggctgggactgccatgaatatttctgtgccacaggtccaactgataaaccccgaaaaccagatcgtcgagcccgacggcactctgaatctggactctgacgaaggcgaagagccctctcccgaggccctcgtccgctatctgtcaatgcgcagacacaccgtcggggttgccgatccccggacagaagtcatggaggacctccaaaaactgctccccggattccccggggtaaaccctcaggctccattccttcaggtcgcaccaaacgtgaatttcatgcataatcttctacccatgcaaaacttacagccaacgggtcagctcgaatacaaggaacagagtctgttgcagccacccaccctccagctgttgaacggcatggggccactcgggagacgggcctccgatggtggcgcaaacattcaactgcatgcacagcagttgctgaagcggccacgtgggccaagccctttggtgaccatgaccccagcagtcccagccgtgacgccagtcgacgaagaaagctccgatggagagcccgaccaagaagcagtgcagtcttccacatacaaggattcgaacacgctgcatctcccaactgaaaggttctccccagtccggcgcttctctgatggtgcagcatccatccaggcatttaaagcccaccttgagaaaatgggtaataatagtagtatcaagcaacttcaacaggaatgtgagcagctgcagaaaatgtacggaggccagatcgacgagcgcaccctggagaagacccaacagcaacatatgctgtatcagcaagaacagcaccatcagatccttcagcagcaaatccaggattccatctgtcctcctcagcctagcccaccgctgcaggctgcctgtgaaaaccagcccgcgctcctgacccaccagttacagcggttacgaatacaaccatctagccccccgccaaaccatccgaataaccacctgtttcgccagccttccaattctcctccacctatgtcatcagccatgattcaaccccacggagcggcatcatcctcccaatttcaggggctgccatctcgatccgcaatctttcagcagcaaccagaaaactgtagctccccaccaaatgtggcgttgacgtgccttgggatgcagcaacccgcacagtcccaacaggtgaccattcaggttcaggaaccagttgacatgttatccaacatgcctggcaccgccgcagggtccagtggacggggtatttccatctcgccctctgcaggccagatgcagatgcaacatcgcacgaatcttatggctaccctttcatatggacacaggccactgtctaaacaactatcagccgatagtgccgaagctcatagtgctcaccaacagcctccccactacactactagcgcactccaacaagcattgctttctcccaccccaccagactacactcggcatcagcaggtcccacatatattgcaaggcctactgagcccacgccacagtctgactggccactcagatattcgtttgcctcccaccgaatttgcacagcttatcaagagacaacagcagcagcgccagcagcaacagcagcagcagcagcagcaggaataccaagagctgtttaggcacatgaaccaaggtgacgccgggtcactagcaccatccctcgggggccagagcatgaccgaaagacaggcactgtcatatcagaatgctgattcctaccaccaccacactagtccccagcatctgctgcagatccgggcacaggagtgtgtgagccaggcatcttcgcctacccccccccacgggtacgcacatcagcccgccctgatgcactctgaatctatggaagaagactgcagttgcgaaggggccaaagacggattccaggattctaaatcctcgtctactctgacgaaaggctgtcacgattcacccttactcctgtcaacaggggggccaggcgacccagagagtttactgggaaccgtcagccacgcacaagagctcggcatccacccctacgggcatcaacccacagcagcgttttccaagaacaaagtacccagccgcgaacccgtcatcggtaattgcatggataggagttctcctgggcaagccgttgaactgcctgatcataatgggctgggataccccgcacgcccgagtgtgcacgaacatcacaggccacgcgccctccaacggcatcacaccatccagaactccgacgacgcctacgtgcagctggacaatctgcccgggatgtcactggtggctggtaaagccctgtcttccgcccgtatgtccgacgccgtgctgtcacagtcatcgttgatgggatcacagcagttccaggatggagagaatgaggagtgcggcgctagcctcggagggcacgagcaccctgatctgtctgatggatctcagcatcttaactcatcctgttacccctctacctgcattacagacattctgctgtcctacaaacacccagaggtttccttctccatggagcaggcaggagtctag

SEQ ID NO: 25754 - DNA, 1461 bp, synthetic construct
  source 1..1461: mol_type = other DNA; note = Synthetic coding sequence
atgaccctgatggtgctgaccttcagcagctacatcctggacttcatcaatgtgctgtcttatgacctgcacggcagctgggaaagatttaccggtcacaactcaccactgttttccctgccggaagatcctaaatcatcagcgtatgccatgaattattggagaaagctcggtgcgcctagtgaaaagctgattatgggcatcccgacttatggacgcacctttcggcttctgaaggctagtaaaaatggcctacaagcgcgcgccataggtcccgcttccccggggaagtacactaaacaggagggatttctagcatatttcgagatctgctcttttgtctggggcgccaagaaacactggattgattaccaatatgtgccatacgcgaacaaaggaaaagaatgggtaggctacgacaatgctatttccttctcctacaaggcttggtttattcggcgcgagcattttggtggcgcaatggtatggacgcttgacatggatgatgtccgcgggacattttgtgggaccggcccttttccgttagtctacgtcctgaatgacatcctggttcgcgctgagttcagcagcacgtcactgccgcagttctggctttcctctgccgtcaatagttccagcactgacccagaacggctggctgtcaccacggcctggacaaccgattcaaaaatcctcccgccaggaggggaggcaggcgtgactgaaatccatggcaagtgtgagaacatgactatcacaccccggggaacgactgttacacccaccaaggaaaccgtgtccctgggcaagcataccgtggccctgggggagaagactgaaatcaccggtgcaatgaccatgacttctgtgggtcaccaatctatgacccccggagagaaggctctgacaccagtgggacaccagagcgtaacaaccggtcagaaaactctgacctctgtgggttatcaatcagtaacgcctggtgaaaaaacactgacccccgtgggccaccagtcagtgacgcctgtgtcccatcagagcgtgtctcccggtggcacaacaatgacccctgtgcactttcagacagagacattacggcagaatacagtggccccacggcggaaagccgtggcgagagagaaagttaccgttcctagtcgcaacatctcggttactcccgaggggcagaccatgccacttagaggcgagaatctgaccagcgaagtggggacgcacccccgcatgggcaatctcggcctccagatggaggctgagaacaggatgatgttgagctctagtccagtgatccagctgccggaacagaccccgctggccttcgataaccgcttcgttcccatttatggtaaccattcgagcgtgaacagcgttactccacagacttcccctctgtccttaaagaaagagatccccgaaaacagcgccgtggatgaggaagcctag

SEQ ID NO: 25755 - DNA, 1017 bp, synthetic construct
  source 1..1017: mol_type = other DNA; note = Synthetic coding sequence
atggagctgtggggccggatgctgtgggccctgctgagcggccccggcagaaggggcagcaccagaggctgggcttttagtagctggcagccccaaccacccctggccggcttgagctccgccatcgagttggtgagtcattggacgggcgttttcgaaaaaagaggtattccggaggctcgcgagtcttccgagtatattgttgcacacgtcctgggagccaagacttttcagtccctccggcccgcattgtggactcagcctctgacatcacagcagcttcaatgtatccgagagctctcgtccaggcgactgcaacggatgcctgttcagtacatcctcggggagtgggacttccagggcctgtctctccggatggtgcccccagtattcatcccacggccggagaccgaagaactcgtcgaatgggtgctcgaggaggtcgcgcagcgtagccatgctgtgggcagcccagggtcacctcttattctggaggtgggatgcggatctggggccatttccctctctcttctctcccagctcccccaatccagagtgattgctgtagataaacgggaggccgccattagccttacccatgagaacgcacagcgacttcggctgcaggaccgaatttggatcatccacctggacatgacaagcgagaggtcttggacccatttgccatggggccctatggacctaatcgttagcaatcctccatatgtgttccatcaggacatggaacagctggcacccgaaatccggtcatatgaggaccccgctgcattagacggcggtgaagagggtatggatatcatcacacacatcctggccttagcacccaggttgctgaaagactcaggttccatatttcttgaggtcgatcctcgccaccctgaactcgtgagcagctggctgcaatctcgtcccgacctatatctgaacttagttgcagtgcgacgcgacttttgcggtagaccccggtttctccatatccgccgatcaggcccctag

SEQ ID NO: 25756 - DNA, 1899 bp, synthetic construct
  source 1..1899: mol_type = other DNA; note = Synthetic coding sequence
atggacaccatgatgctgaacgtgcggaacctgttcgagcagctggtcaggagggttgagattctctccgagggcaatgaagttcaatttatccagctggctaaagattttgaggatttccggaaaaaatggcagagaaccgaccacgagctaggtaaatacaaagatctactgatgaaggctgagacagaacgctcggcgttagatgtgaagttgaaacacgcccggaaccaagtggatgtggagattaagcgccggcaacgcgcagaggccgattgtgaaaaattggaaaggcagatccagctgattagggagatgcttatgtgcgatacctctgggagtattcagctctcggaagagcagaaatcggcactggcctttctgaatcggggtcagccatcttcttcaaacgcaggcaacaaaagactctctactatagatgagagtgggagtatcttgtcagatatatccttcgataagaccgatgaatcattggactgggactcttccctggtgaagacgttcaagctcaagaagcgggagaagcggcgtagtacgtctcggcagtttgttgacggaccacctgggcccgtcaaaaagacccggtccattggctcagcagtggatcagggaaatgagagcattgttgctaaaacgaccgtgacagtccctaatgatggaggaccaatcgaggcggtgtctacgatcgagactgtgccgtattggacacgctccagacgcaagacaggaactctccaaccctggaatagcgattccacgcttaacagcagacagctggaacccagaaccgaaaccgactctgtgggaactccacagtcaaatggggggatgagactccatgatttcgtctccaaaacagtgattaaaccagagtcctgcgttccgtgcgggaagcggattaaatttggcaagctgtctctcaagtgccgcgactgcagggttgtctcccacccagagtgtcgagacagatgccccctcccctgtattcctactctcatcggcacacctgtgaaaatcggggagggtatgttggctgactttgtttcccagacttcaccaatgatcccttcaatcgtggttcactgtgtaaatgagatcgagcagaggggtttgaccgaaacgggtctctataggatatccggatgtgatcgcaccgtgaaggaactgaaggagaaattcctgcgagtgaaaactgtgcccctgctgagcaaggttgatgacatacacgccatctgtagcctgctcaaagactttctgcgaaacttaaaagagcccctactcacattccgcctgaaccgcgcttttatggaggccgccgaaattacggacgaggataacagcatagcggctatgtaccaggctgtgggcgaactccctcaggctaatagagacacccttgcctttctgatgattcacctgcaaagggtcgcacaatcgccacacacaaaaatggatgttgccaacctggctaaagtgttcggccctactatcgttgcccacgctgtgcctaaccccgaccccgtaacaatgttgcaagacattaaaaggcagccaaaggttgttgagcggttgctctctctgcctctggagtactggtctcagttcatgatggtggagcaggagaacattgatcctcttcacgtaatcgaaaacagcaacgctttttcgacaccacagactccagatatcaaagtgtcgctactgggaccagtaaccactcccgagcaccaactgctcaagacccccagttcgagttccctctcacaacgggttagatcgaccctaactaaaaatacacccagattcggaagtaagtccaagtcagccacaaatcttgggcgccaaggcaacttttttgcttctcccatgctgaaatag

SEQ ID NO: 25757 - DNA, 1791 bp, synthetic construct
  source 1..1791: mol_type = other DNA; note = Synthetic coding sequence
atgagcaaccagcaggagaagtacgaggcccagaacatcgtgaactcaaccgaagagtccgacgacgcattcgataccgtgacaatacccgtgccctcggaggaacctcaagaaagcgatcaaaccgaggagcacgaaagcggcatcgaacaattttccgagtcacacgcgatccacgttgaggagcagtcagatcagagtttcagtagcctggagccggataatgagcagttgatggaggaggtgatctccccacggcaagttagctataccccacagcaccatgaaaaacagtatgccatgcagagacccaacgatgacagtctggcctttttggacaaaataaagtcagtgaaagagtctctgcaggagtctgtggaagatagtttagcaactgtcaaggtggtgctgatccctgtaggccaggagatcgtgattccattcaaggtggacactattttgaagtacctcaaggatcacttctcccacctcctcggaatccctcactcagttctccaaatccgatattctggtaagatcctgaagaacaacgaaaccctggtgcagcatggggttaagccccaggaaatcgttcaggtcgagattttctcgactaacccagatctgtatccagtgcgcagaattgatggtctgacagacgttagtcagattatcacagttacagtgcagactgggctcgatcagtaccagcaagtccccgttgaaatagtaaaaagtgacttccataaaccttttctgggcgggttcagacacaaggtgaccggggtcgagtatcataacgccggaacacaaaccgtcccaaaaaggataccggaacgacttagcattttctgtcgggacacacaaaccgtgtttcagaagaagaacctgcagcagaccacgaatactacgtctactcaaatgacgaatatcggagtgtatgtgtctaatatgactgataagcttgtaaccccgggaaagtacttttcggctgcagaataccatgcccagagactgaaggctgtgatagttatccaaacctattatcgacaatggcacgctaaaattttcgtcgagaatctccggagacagaaatcacttcgcttggagtgggaaacacagcaagaactgcgcaaaatccgggagaaggaggaatggattaagctggactatcaccgccggcacaatccaaaaaccaacgaggatttcgagtttctatacaacgccttggagttttggcgtcaagaagaactgacccggattaatcagtcctttacaggggccgaaagaaaggctgccctgtgcgagttgctggaaaaggaaactcagattattgcctcaattggccgtcatcgctatatcgcctacatggccaaccaagaagctgctattcaagccttcttagataagtgctcagcccccaaaatctggcgaacccctaacggcaaaacaatcgagatggatacccagttcactatccgagctcgtgaactccagaacatttataaatgcatcatgctgaagaatataagtcaggatgaaaggctcgatgtcttgctcacactgaaacatacagtcaaggagcatgagtgcaaactaacgcaagagatcctggagctcatcgacagagaggtggacttgatgatgcgaggcgttaaacaccacaacctggaaggcctgcgaaagcgtattgcaaccttgtttttccactatattaaaactcctctttttaaccctgaggtcgccaaatatttgaaaatgggaggcgaataccttagcatggccctgtag

SEQ ID NO: 25758 - DNA, 1305 bp, synthetic construct
  source 1..1305: mol_type = other DNA; note = Synthetic coding sequence
atggtgcaggacggcaccttcaagacccgggacagcacctggacctgcgagtccacacgcatggcagccgccccaccatcctactgtttcgtggcattccctccacgcgccaaagacggattagtcgttttcggaaaaaacagcgctaggccacgggacgaggttcaagaggtggtgtactttagcgcagcagatcacgagcctgaatccaaggtggagtgtacctacatttcaatcgaccaggtgcctcgtacatacgcaattatgatctctcggccagcctggctgtggggagcggaaatgggggccaacgagcatggcgtatgcattgcaaacgaggccataaacacacgagagcctgctgctgagattgaggccctcctggggatggatctggtacgtctgggcttggaacgaggggaaacagctaaggaggctctggatgtgattgtcagtctgctggaagagcatggtcagggaggtaactatttcgaggacgctaattcctgccactcttttcagagcgcctacctgatagtggacagggacgaggcctgggtgctcgagaccattggcaaatactgggcagccgaaaaagtcacagagggcgtgcgctgtatctgtagccagctttcactgaccaccaagatggacgctgagcaccccgagctgagatcctatgcacaaagccagggatggtggacaggggagggggaatttaatttttcagaggtgttcagtccggtcgaagaccatttagattgtggggccggcaaagactcactggaaaagcaagaggagtcaatcaccgtgcaaactatgatgaatactctacgagataaggcttcaggagtttgcatagacagcgagtttttcctaacgacggctagtggcgtctccgtcctcccccaaaatcgatcctctccatgtatccactattttaccgggacacctgatccaagcaggagcatctttaagcctttcatcttcgtggatgacgtgaaactagtgccaaagacacaaagcccttgcttcggtgatgatgatcctgcgaaaaaggagcctcgcttccaagagaaacctgatcgccgccatgagctgtacaaggctcacgaatgggctagagccattattgagagcgaccaggagcagggacgcaagttgaggagtaccatgctggagttggagaagcaagggctcgaagccatggaagaaatcctgacgagttcagaaccgctcgaccctgcggaagttggagatttgttttatgattgtgtggacacagagattaaatttttcaagtag

SEQ ID NO: 25759 - DNA, 1320 bp, synthetic construct
  source 1..1320: mol_type = other DNA; note = Synthetic coding sequence
atggcctggccctgcatcacccgggcctgctgcatcgcccggttctggaatcagctggacaaggccgacatcgccgttcccctggtgtttacaaaatattctgaggctaccgagcacccgggcgcaccaccacaacccccccctcctcaacaacaagcccagccagcgttagctcctccttcagctagagcggtagcaattgagacacagcccgcccagggagaactcgacgcagtcgctcgggctactggccccgcacccggtccaaccggtgagcgcgaacccgcggccggacccgggaggagtggccccggtcccggactcgggagtggatcgacttccgggccggctgacagcgtgatgcggcaagattaccgagcatggaaggtccagcgcccagagccatcttgcagaccgcgcagcgaataccagccgtctgatgcacccttcgagagagaaacccagtatcagaaggacttcagggcctggcccctccctcggcgtggggatcacccatggatccccaagccagtgcagatctccgctgcttctcaggccagtgctcccatactgggggcacccaagcgaaggcctcagagtcaggagaggtggccagttcaggccgcagctgaagcccgagaacaggaggcggcgcccggcggcgcggggggcttggccgctggaaaggccagtggtgctgatgaaagggatactcgaaggaaagcaggtccagcgtggatcgtgaggcgggcagaagggctcggacacgaacagacgccactccctgccgcacaggcccaggtgcaggctacaggcccagaagcaggacgcgggcgcgccgctgctgacgcgttaaaccgtcaaattagggaggaagttgcttcagctgtctccagcagttatcgaaacgagtttagggcctggacagacatcaaaccagtgaaaccgataaaggcaaagccccagtacaaaccgcccgacgacaagatggtgcacgaaacgtcctactcagcccaattcaaaggcgaggcttctaaacctaccacagccgacaataaagtaatagacagaagaagaatacggagcctgtacagtgaacctttcaaagaacctcccaaggtagaaaagcctagtgtccagtcatcgaagcccaaaaaaacatcagcttctcacaaacccacccggaaagccaaagacaaacaagcagtttcaggccaagccgccaaaaaaaaaagcgctgagggaccctcaaccactaagccggatgataaagaacagtcaaaggaaatgaataataaattggcggaggcaaaggagtag

SEQ ID NO: 25760 - DNA, 813 bp, synthetic construct
  source 1..813: mol_type = other DNA; note = Synthetic coding sequence
atgggcggctgcttcagcaagcccaagcccgtggagctgaagatcgaggtggtgctgcctgaaaaggaaagagggaaggaggaacttagcgcttcaggaaaaggctcgcccagggcctatcaagggaacggcacagcaagacacttccatacagaggaacggttgagcactcctcacccctatcctagccctcaggactgcgttgaagccgccgtttgccacgtgaaagatctcgagaacggccagatgagggaagtggagctaggttgggggaaggtgttattggtaaaagacaacggagaattccatgcccttgggcacaagtgccctcactatggcgcaccattggtcaagggagtgctctctcgcggccgagtaagatgcccctggcacggtgcttgcttcaatatctccacgggcgacctggaagatttccctggactggattccctgcacaagtttcaagttaaaattgaaaaagaaaaagtctacgtgcgtgccagcaagcaggccctgcagctccagagacggaccaaagtcatggcaaagtgcatctcaccttcagcagggtactccagttcaaccaacgttctgattgtcggagccggagccgccggcctggtgtgtgccgagactctgcggcaggagggcttttccgaccgaatcgtgctgtgtacactggaccggcacctgccctatgatcgaccaaaactcagcaaaagtctcgacactcagcccgaacagctggcactccgtccgaaggaatttttccgagcatatggcatcgaagtgctgactgaggcacaggtatag

SEQ ID NO: 25761 - DNA, 369 bp, synthetic construct
  source 1..369: mol_type = other DNA; note = Synthetic coding sequence
atggccaccagcgcccccctgcggagcctggaggaggaggtgacctgctccatttgcctagattacctgagagacccggtgactattgactgtggccatgtcttttgccggtcctgcactaccgatgtacgccccatttcagggtccaggccagtctgcccattgtgcaaaaaacctttcaaaaaagagaacataaggccagtgtggcagttggcctccctcgtcgaaaacatcgaaaggctgaaagtagataagggccgtcagcccggggaagtaaccagagagcagcaggacgcgaagctttgtgagagacaccgggagaaacttcactactactgcgaggacgatggcaagctcttgtgcgtatag

SEQ ID NO: 25762 - DNA, 1269 bp, synthetic construct
  source 1..1269: mol_type = other DNA; note = Synthetic coding sequence
atgacccccagcatccccagcatccggcggctgggcagcggctacttctcctctaacgggaagctggaggaggtcaaaactccaaagaacccagtaaagagaaaagacctgcttagacacgatcccgacctgcacatgcaccagggatatgataagtacgacgttagtgagttttgttcctacattaagtcctcatctagccttggcaacgccacatccgatgaggatccaaacacaaatatcatgaatatcaatgagaacaagaatatccccaaggctaaaaataagtcagagagcgaaaacgagccgaaggccggcacagactctcctgtgtcatgtgcaagcgttacagaagagagagtggctagtgactccccgaagccggctctgaccctccaacagggacaagagttctctgcaggtggacagaatgccgaaaacctgtgtcagttctttaagatctcccccgacttgaacataaagtgcgagagaaaggacgattttctaggcgccgctgaaggtaagctgcagtgcaatcgcctaatgccgaattctcagaaggactgccactgcttgggagatgtacttatcgaaaacacaaaggagagcaagtctcagtcagaggaccttggcaggaaaccaatggagtctagttcagtggtctcatgccgagataggaaagacaggcgacgatctatgtgctactccgatggacgaagcctccacctcgaaaagaatggcaatcatactccaagtagcagcgttggaagttctgtggagataagtctcgaaaattcagaattgtttaaggacctcagcgacgctatcgagcagacttttcagagaaggaactctgagactaaggtccgcaggtctaccaggcttcagaaggatctcgagaacgagggtttggtctggatctcattacccctgccttccacaagtcagaaggccaaaagacgcaccatctgtacctttgactcatctggattcgagtccatgagccctattaaggagaccgtgtcctccaggcagaagccacagatggcgcccccagtctcagatcctgagaatagtcagggtcctgcagctggatcttctgacgaacccggaaagcgtaggaagagcttctgtatatccacacttgcgaatactaaagcaaccagtcagtttaaagggtaccggcgcagatccagtctcaacggcaagggggaaagctcacttactgccttagagcgaatcgagcacaatggcgagcgtaaacagtag

SEQ ID NO: 25763 - DNA, 3336 bp, synthetic construct
  source 1..3336: mol_type = other DNA; note = Synthetic coding sequence
atggtgcgggagcggaagtgcatcctgtgccacatcgtgtacagctcaaagaaagagatggatgaacacatgcggagcatgctacaccaccgcgaactggagaacctgaaggggagattcggaattgaaatggtgcccctcgtgcagaacgagcaagaggcattagacttggatggagagccagacttgagctctctagaaggtttccagtgggaaggggtgagcattagttctagcccggggctcgcgcggaagcgctctctctccgaatcctctgtcattatggatagagccccaagtgtctacagcttcttttcagaagaaggcacagggaaggagaatgagcctcagcagatggttagcccctccaacagcttacgagccggccagtctcaaaaagcaacaatgcacctgaagcaggaagtgacccctcgagcagcgagcctgagaaccggggagagagcagagaacgtagccactcagagacgacacagcgcccaactctcatccgatcacattatccccctgatgcatttggcaaaagatctgaacagccaggaacgttccatacccccgtctgagaaccagaacagccaagagagtaacggggagggcaattgtctctcaagcagtgccagtagcgctctggctatctccagcttagccgacgccgccacggatagctcctgcacctcgggtgcagaacagaatgacggacagtccatccggaaaaaaagaagagcaacaggcgacgggagctcccctgagctgccaagtctggagagaaagaacaagagacgtaagataaaaggaaagaaagaaagatctcaagtcgatcaactcttgaacatttcccttagggaggaggaactgagtaagagcctacagtgtatggataacaatctcttgcaggccagggccgccctgcagacggcatacgtcgaggtacagcgccttctcatgctgaagcagcaaattacaatggagatgagtgcactgcgcacacaccgcatccagatcttgcagggacttcaggagacctacgagccatccgagcacccagatcaagttccctgctccttaacgcgtgaaaggaggaactcccgttcacagaccagtatcgacgctgcattgctccctaccccctttttccccttgttcttggagccacccagctctcatgtaagtcccagcccgaccggcgccagtctgcagataacaacatcgccgacctttcaaacacacggatccgttccagctcccgattcttccgtacaaatcaaacaggaaccaatgagccccgaacaggatgaaaatgttaacgccgttcctccatcttctgcatgcaatgtgtcaaaggaactcctcgaggccaacagagaaatctcggactcctgtcccgtatacccggtaattaccgccaggctttctctcccagagtccactgaaagtttccatgagcctagtcaggagctcaagtttagcgtggagcagagaaatacccgcaatcgtgaaaattcacccagctctcagtccgccggtctgtcttccattaataaggaaggagaggaacctaccaaaggcaatagcggctcagaggcctgcaccagctcctttttgcgattgtccttcgcatctgaaactcccctggagaaggaaccgcactccccggctgaccaaccggagcagcaggccgagagtaccctgactagtgccgagacgagaggttcaaagaagaagaagaagctgcgcaaaaaaaagtccctgcgcgctgctcacgttccggaaaactcagacaccgaacaggatgtattaacggttaaaccagtaaggaaggtaaaagcaggcaagctcatcaagggaggcaaggtgacaacttcaacatgggaagactcccggacaggcagagaacaagaatccgttcgcgacgagcctgattcggatagcagtctcgaggtgcttgagattccaaatccacaacttgaagttgtggcgatagattcaagcgagagtggcgaggagaagcccgattctccttcaaagaaggatatctggaattccactgaacaaaatccactggaaacgtccagaagtgggtgtgacgaggtgagcagcactagtgagatcgggacgcgctacaaggacggaatccctgtgagcgttgcagaaacccagacagttataagcagcatcaagggctccaagaactcttccgagatctcatctgaacctggcgacgacgacgagccgaccgaggggtcttttgagggacaccaggctgctgtgaacgccatccagatattcggcaatctgctgtacacctgctctgctgacaagactgttagggtctacaacctagtgagtagaaagtgtataggagtgttcgagggccacacttcaaaggttaattgcctcctagtgactcagacatccggtaaaaacgcggcgctttataccgggtcctctgaccacactattagatgttacaacgtcaagagcagagagtgcgtcgagcagctgcagctagaggatagggtgctgtgtctgcattccaggtggcgcattttatacgccggactggccaatggaaccgtggtcacatttaacatcaaaaataacaagaggctggagatttttgagtgtcacggacctagggccgttagttgtctggcgactgctcaggaaggtgccaggaaactccttgtcgttggctcatatgattgcaccatttcggtcagggacgctagaaacgggctcctgctccgaaccctcgaagggcactccaagaccatcctgtgtatgaaggtggttaatgacctcgtattttctggcagcagtgaccaatccgtccatgcacataacatacacaccggggaactggttcggatttataaaggccataaccatgcagtgacggtagtcaacattttaggcaaagtgatggtgacagcctgcctggacaagtttgtgcgcgtgtacgagctgcagtctcatgaccgcctgcaggtctatggcggccataaagacatgattatgtgcatgactattcacaaatctatgatttacacaggttgttacgacgggtccatccaggctgtgaggctgaacctcatgcagaactaccgatgttggtggcacggctgcagcctcatctttggtgtggtggaccacctgaagcagcacctgttgactgaccatacgaatccaaatttccagacactgaagtgtagatggaagaattgcgatgcattcttcaccgctcgcaagggcagtaagcaggatgcagcagggcatatcgagcggcatgcagaagatgattcaaagattgatagttag

SEQ ID NO: 25764 - DNA, 354 bp, synthetic construct
  source 1..354: mol_type = other DNA; note = Synthetic coding sequence
atgtacagccccatcatctaccaggccctgtgcgagcacgtgcagacccagatgagcttaatgaatgatctgactagtaagaatattccgaatggaatacctgcagttccctgtcacgccccctctcactccgaatcccaagccactccgcactcatcctacggattgtgcacttcgacaccagtttggagcttacagcgccccccttgcccaccaaaagttcattccgaggtgcagaccgatgggaactcccagtttgcttcccagggtaagacggtgagcgccacctgcaccgatgtacttagaaactcatttaacacatccccaggtgtcccttgctcgctgccaaagtag

SEQ ID NO: 25765 - DNA, 189 bp, synthetic construct
  source 1..189: mol_type = other DNA; note = Synthetic coding sequence
atggccgccctgcggcccctggtgaagcccaagatcgtgaagaagaggaccaagaagtttattagacaccagtccgatcggtacgtgaagattaaacggaactggcggaaaccccggggaatagataatagggtgaggcgaagatttaagggacagattctaatgcctaacatcggatacggctcctag

SEQ ID NO: 25766 - DNA, 411 bp, synthetic construct
  source 1..411: mol_type = other DNA; note = Synthetic coding sequence
atgagcgccagctgcgacggctgcgtgggcagccggccccccgtgcatcttgcaagcgggtatagcctcgccgatctactggtgttggagatgggtatgggaacccagtgttggacggaggaccagcgacgctggagctcactgtggccatggagccacctctcctccgtactcctagctgacaaagaggggggcccccccgctgttgacgaagtgctggacgaagctgtgcccgagtaccgggcacccggccggaagagtctgctcgagatcagacaactcgaccctgatgaccgatcccttgcaaagtacaaacgcgtgttactagggcccctacctcccgcagtggacccctccctgcccaacgtgcaggtaactaggttgactctgcttagcgaacaggcgccatag

SEQ ID NO: 25767 - DNA, 1803 bp, synthetic construct
  source 1..1803: mol_type = other DNA; note = Synthetic coding sequence
atgcccgagatccgggtgacccccctgggcgccggccaggacgtgggacgcagttgtattctcgtcagcatcgccggaaagaacgttatgttagactgcggaatgcacatggggttcaatgatgataggagattccctgacttttcctatatcactcagaacgggcggttgactgactttttggactgcgtcatcatcagccacttccacctggaccactgtggggctttaccctacttcagtgagatggttggttatgacggcccaatatacatgacgcatcctactcaggccatatgccccattcttctggaggactatcgcaaaattgccgtggataagaaaggggaagccaatttttttactagccagatgattaaggactgcatgaaaaaagttgtggctgtgcaccttcaccagaccgtgcaggtcgacgatgaactggagataaaagcctactacgcaggccatgtattgggggccgcgatgttccagattaaagttggaagcgagtccgtggtgtacaccggcgattataacatgacccctgatcggcacctgggggccgcctggatcgacaaatgccggccaaacttgctgattaccgagagcacctatgctaccactatccgcgatagtaagagatgccgtgagagggacttcttgaaaaaggttcacgagacagtggagagaggtgggaaggtcctcatacccgtgttcgccttgggacgcgctcaggaactgtgtattcttttggagacattctgggaacgcatgaatcttaaggtgcccatatacttcagcacgggattaacggagaaggcaaaccattactacaagctctttatcccctggaccaatcagaagatccgaaaaacctttgtccaacggaacatgtttgagttcaaacacatcaaagccttcgatcgcgcctttgctgacaaccctggtcctatggtagtcttcgctacaccgggaatgctgcacgccggacagtcgctgcaaatctttcggaagtgggccggcaatgagaaaaatatggtgattatgccagggtattgcgtccaaggtaccgtgggtcacaaaatcctcagcgggcaaaggaaactggaaatggaaggcagacaggtcctagaagtgaaaatgcaggtggagtacatgagcttctctgcacatgcagatgccaaagggatcatgcagcttgtgggccaggcggagccagagagcgtgttgctggtacacggggaggctaaaaagatggagttcctcaaacaaaaaatcgagcaggagctccgcgttaactgttacatgccagcaaacggcgaaacagtgaccctccccaccagcccaagcatccctgtgggcatttctctcgggcttttgaagcgggaaatggcccagggactcctaccagaggcaaaaaaaccgcggctcctccacggcacactcatcatgaaagactcaaattttcgattagtgagctcagagcaagctctaaaggaactagggctagctgaacaccaactccgcttcacctgccgggtccacttacacgacactaggaaagaacaagagactgccctgagggtctacagtcacctcaagtccgtgctgaaggaccattgcgttcagcatctgccggatggctctgttactgttgaatcagtcttacttcaggccgccgctccatccgaagaccccggcaccaaagtccttttggtgagctggacatatcaagacgaagagctcgggagtttccttacatctcttttgaaaaagggccttccacaggcacctagctag

SEQ ID NO: 25768 - DNA, 774 bp, synthetic construct
  source 1..774: mol_type = other DNA; note = Synthetic coding sequence
atgctggagtacgccctgaagcaggagcgggccaagtaccacaagcttaaatttggcaccgacctcaatcagggggagaagaaggctgatgtctctgaacaagtctctaatggccccgtcgaatccgtgaccttggagaatagcccgcttgtgtggaaggaagggagacagcttctacggcagtacctcgaggaagttggctacaccgacaccatactcgacatgagatctaaacgcgtgcgtagtctcctcggcaggagtctggagctgaacggtgctgttgaaccctcagagggtgccccacgtgcccccccaggacccgcaggcctgtccgggggtgagtctctcctggtgaagcagatcgaggaacaaatcaagcgcaacgcagccggaaaggacggaaaggaaagactcggaggctcagtcctgggccagatccctttcttgcagaattgcgaagacgaggactcggacgaggatgacgagttagactctgtgcagcacaagaagcagcgagttaaattaccgtctaaggccctggtaccggaaatggaagatgaggatgaggaagatgattcagaagacgccataaatgagtttgatttcctggggagtggagaggacggggagggggcccctgaccctaggcgctgtaccgtggacggtagcccacacgaactgggccccgagctgcacagccccacagaatggcagggtgcactctctgtaggaaaggcctcccccatgcccgattgggtcggaactgcaggatag

SEQ ID NO: 25769 - DNA, 381 bp, synthetic construct
  source 1..381: mol_type = other DNA; note = Synthetic coding sequence
atgcccggcgtgaagctgaccacccaggcctactgcaagatggtgctgcatggagccaagtatccacattgcgcagtaaatggattgctggtggccgaaaaacagaaaccacggaaggaacatctgcctctgggcggacccggagcacaccacaccctcttcgtggactgtatccccctgtttcacggcactctcgctctcgcacccatgctcgaagttgccctcaccctgatcgacagctggtgtaaggaccattcctatgtcatcgccggatactatcaagcgaacgaacgagtgaaggacgcgtcccccaaccaagtcgcagaaaaggttgcgtctcgtatcgctgagggctttagcgacacagcactgattatgtag

SEQ ID NO: 25770 - DNA, 450 bp, synthetic construct
  source 1..450: mol_type = other DNA; note = Synthetic coding sequence
gtgcgggagctggaggccgagctggacgccgagcagaagaagcacgcggaagcgctgaagggggtgcgcaaacatgaaaggagggtgaaggagctggcctatcaggtgggcgatagggtgtccttaggctccggccccggagctggccctgcccaagcatctcctgagtcaccactgccggcacaggccgaagaggatcggaagaatctagcacgcatgcaggatcttgtcgataaactgcagagcaaggttaaaagctacaagagacagttcgaggaggcagagcaacaggctaataccaatctggctaagtaccgtaaagcccagcacgagctagacgacgccgaggagagagccgacatggcagagacacaggcaaataagctgcgggcccggacaagagacgcactgggaccaaaactgagtctatccccgcagcacaaagaatag

SEQ ID NO: 25771 - DNA, 2349 bp, synthetic construct
  source 1..2349: mol_type = other DNA; note = Synthetic coding sequence
atggacagcagcatccacctgagcagcctgatcagccggcacgacgacgaggcaacacgaacatcgacatccgaaggactcgaagagggagaggtggaaggagagacactgcttatagttgagagtgaggaccaagcctccgtggatttatcacatgaccagtccggtgactctctcaactccgatgagggcgatgtgagctggatggaggaacagctgagctacttctgtgataaatgccagaaatggatccccgcctctcagctgcgagaacaactgtcttacctcaagggagacaacttcttcaggtttacatgttctgattgcagcgccgacggtaaagagcagtacgaaaggctaaagttgacatggcagcaggtcgtaatgttggctatgtataatctgtcactggaaggctcaggccggcagggctacttccgctggaaggaggacatttgtgcctttattgagaagcactggacgttcctcctgggcaataggaaaaagacctcaacctggtggtcgactgtagctggctgccttagcgtggggagcccgatgtatttccggtccggagcacaagagtttggggagcctggatggtggaagctggtccataacaagcctccgaccatgaagcctgagggcgagaagttgtctgcttcaacgttgaaaataaaggccgccagtaaacctactctcgacccaatcatcaccgtcgaaggactcaggaaacgagcttcgcgcaaccccgtggaatctgccatggagctgaaagaaaaaagaagtagaacgcaagaggctaaggacatcaggagggcccaaaaagaagctgccggatttctggataggtcaacgtccagtacccccgtgaagttcatttcaagagggcggcgtccagacgttattctggaaaagggggaagtcatcgatttcagctccctaagctcaagcgataggaccccactgacgtccccaagtccgagcccgtctctggacttctccgcacctggtactccagcctctcattccgccaccccgtcacttttatcagaggctgatctgatcccggatgtgatgcctccacaggcgctgttccatgacgacgacgagatggaaggagacggcgtgatcgaccccggcatggagtatgtgcccccccctgcgggctccgttgcaagcgggccagttgttggggtgaggaaaaaggtgcgcggcccagagcagattaagcaggaggtagagagcgaagaggaaaaaccagacaggatggatattgacagtgaggacaccgatagcaacacaagcttgcagaccagggcccgtgaaaagaggaagccacagttagaaaaggacacgaagcccaaggaaccacgatatactcccgttagcatctatgaggagaaactactgctgaagagactcgaggcgtgcccgggcgctgtggcaatgacccccgaggccagacgccttaaaagaaagctgattgtgcggcaggctaagcgcgatcggggactcccactgtttgacctggaccaggtggtaaacgctgcactgctgttggtggacggcatttacggggccaaggagggcgggatctcaagattgcctgcaggccaggccacatatcgaacaacctgtcaggactttcgcatcctagaccgctaccagacttccttaccatcccgaaaaggcttccggcatcagacgacaaagttcctgtataggcttgtcggctccgaggacatggccgtggatcagtccatcgtgtctccatatacgtctcgcatccttaagccctacattcgccgcgattacgagaccaaaccccccaaactccagctgctcagtcaaatcagatcacacctccacaggtccgatcctcactggacaccagagccggatgctcctctagactactgttacgtgaggccaaaccacatccctactatcaatagtatgtgccaagagtttttctggccaggcatcgacctgagtgagtgccttcagtaccctgactttagtgtggtagtgctgtacaagaaggtgataattgccttcggtttcatggtacccgatgtaaagtacaacgaagcctatatctctttcctttttgtgcatcctgaatggagaagggccggaatcgctacatttatgatctatcacctaatccagacatgtatgggcaaggacgtcacactgcatgtgtcggccagtaaccccgctatgctcctataccagaagttcggcttcaaaacagaagagtacgtgctcgatttctacgacaagtactaccccctggagagcaccgagtgcaagcatgccttcttcctgaggctcagacggtag

SEQ ID NO: 25772 - DNA, 495 bp, synthetic construct
  source 1..495: mol_type = other DNA; note = Synthetic coding sequence
atgatgagcgaggtggaggaggccatgcagtgcgtggaggagctgaacgcccagggattgctgcatgtatttgtgagggtcggcgtggagtccactcttgaacgcagtcagatcacacgtgaccacatggggcagctactgtatcagctggtccagtcagaaaagctgagcaaacaagacttcttcaagggcttcagtgagaccttagaactagctgacgatatggccatcgacattccacacatttggctttacttagccgagctggtcacacctatgctgaaggaaggtgggatctccatgcgggaattaaccatcgagttctcaaaaccccttctcccagtcggcagggccggtgtgttactaagcgagatcctccatttgttgtgcaaacaaatgagtcataagaaggtgggtgcactatggagggaggcggatctgtcctggaaagatttccttccagaaggtgaggacgttcacaacttcctgctttag

SEQ ID NO: 25773 - DNA, 369 bp, synthetic construct
  source 1..369: mol_type = other DNA; note = Synthetic coding sequence
atggccaccagcgcccccctgcggagcctggaggaggaggtgacctgtagcatttgtctggactacctgcgagacccagtgaccatcgattgtggacatgtgttttgccggtcttgtacgacagacgtacgacctataagcggtagtcgtcccgtttgtccactttgcaaaaaaccttttaagaaggagaacatcaggcctgtgtggcagctcgcctccctcgtggagaatatagaacgcctcaaagtggacaaaggtaggcagcccggcgaggttaccagagagcagcaggacgccaagctgtgcgaacgccaccgagaaaagttgcactactattgcgaggacgatggcaagcttttgtgcgtgtag

SEQ ID NO: 25774 - DNA, 3345 bp, synthetic construct
  source 1..3345: mol_type = other DNA; note = Synthetic coding sequence
atggcctgccggcggcggtacttcgtggagggcgaggcccccagctccgaaaccgggacctccctggattcccctagcgcgtatccgcagggtcctctagtgcccggcagctctttatcgcccgaccattatgagcacacttcggtgggggcgtacggcctgtacagtggcccacctggacagcagcagcggaccaggcggcctaagcttcaacatagtaccagcatcctgcggaagcaggcagaggaagaagccatcaagcgcagccgaagtctatcagagtcgtatgaattgagtagtgaccttcaggacaaacaagtggaaatgctggagcggaagtacggaggacggctggtgactaggcacgcagctcgtactatacagaccgccttcaggcaatatcaaatgaacaagaattttgaaaggctgaggagtagcatgtcagagaatagaatgagccggcggatagtgttaagtaatatgcggatgcagttcagctttgaggggccagagaaagtgcatagtagttacttcgaaggcaaacaggttagcgtcactaacgatgggtctcagctcggtgcgctggtgtcgccagaatgcggagacctaagtgagccgacaacattaaagagtcccgcacccagcagcgatttcgctgacgctatcaccgagctggaggacgcgttttcccgacaggtaaagagcctggcggagagtatagacgacgctctcaactgtcggtctcttcataccgaggaggcccccgcactggacgctgccagagctcgggatacagaacctcagacagctctgcatggaatggaccaccggaagctagacgagatgaccgcttcctattcagatgtgaccttgtatattgacgaagaagaactcagccctcctttacctctttcccaggccggtgatcggccttcttctacagaatccgatctccgcctacgtgctggaggtgcagctccagattattgggcgctagcccataaggaagataaggctgacaccgacaccagctgcagatccaccccctctttggaacggcaggagcagaggctaagggtggaacacttaccccttctgaccatcgaaccaccctctgattcttcggtggacttgtccgatagaagtgaacgggggtccctgaagaggcagtctgcctatgagcgatcactgggtggacagcaggggtctccgaaacacggaccccattccggggcacctaagagtttgcccagggaggagcctgagctgaggcctcgaccacctcggcccctcgacagccacctcgctatcaatggctccgctaatcggcagagcaaaagtgagtcagattatagtgacggcgataacgatagtatcaactccacctccaatagcaacgacaccattaattgctccagcgaatctagcagcagggacagtctacgcgagcaaacacttagcaaacagacttaccataaggaggcaagaaatagttgggatagcccagcgtttagtaatgacgtcatcaggaagagacactaccgcattgggctcaatctgtttaataaaaagcccgaaaagggcgtccagtatctgatagaaagaggcttcgtccccgacacccccgtgggggtcgcccatttcctcctgcagcgaaagggtttgtcaaggcagatgatcggagaattcctcgggaatcgccagaaacagttcaacagggatgtactggactgtgtagtggacgaaatggacttctcgaccatggagttggatgaagccctccgcaagtttcaggcccacataagggttcaaggggaagcccagaaggtggaaagactgatcgaggcattctcacaaagatattgcatctgtaacccaggggtggtgcgccaatttcgcaaccccgacaccatatttatcctagccttcgctatcatcctgttgaataccgacatgtacagtcctaacgtcaagcctgagcggaagatgaagctagaggattttattaagaatctccggggcgtagacgacggagaagacatcccacgcgaaatgctgatgggcatttatgaaaggatccggaagagggaactgaagaccaatgaagaccacgttagccaggtccaaaaagtggagaagctgatcgtgggaaagaaacctatagggtcactccaccccggcctgggttgcgtactgtcacttcctcacagaaggctagtgtgttactgtaggctctttgaagtgcctgaccctaataagccacagaagcttggtctccaccagagggagattttcctctttaatgatctgctggtggttaccaaaatcttccagaagaaaaaaaacagcgtgacgtattccttcaggcagtcattcagcctgtacggcatgcaagtcctcctatttgagaaccagtactatcccaatggcatcaggctcacctcctctgtcccaggggctgacatcaaggtcctaattaactttaatgctcctaacccacaggatcggaagaagtttactgatgatcttagagagtctattgcagaggtacaggagatggaaaagcaccgtattgagtccgagttggagaaacagaaaggggttgttcggcccagtatgtctcagtgctcttcccttaagaaggagtcagggaatggaaccctgagccgcgcctgcttagacgatagctacgcaagtggtgaaggccttaagcggtcagccttgagctcctccctccgcgatctaagcgaggctggcaaaagaggacggaggtctagcgcaggttccctggaaagcaatgtggaaggctctattattagtagtccgcacatgagacggagagctactagtactcgtgagtgcccaagccggccacaccagaccatgcctaattcctcctcgctgctgggcagcttgtttggttccaaaagagggaagccaccaccgcaggcacacctgccatccgcccctgcactgccccctccccatccacccgtggtgctgccccatcttcagcactccgtggccggacatcacctgggaccacctgaaggtctgccccaggcagccatgcatgggcaccatacacagtactgccacatgcagaatccacctccttaccatcatcaccatcaccatcaccccccccagcatatacagcatgcacaccaatatcaccacggaccccacggaggccatcctgcctacggggcccacgcccacgggcacccccctctccctagcgctcatgttggacacaccgtgcaccaccacggacagccacccgccccccctccaccaacaagctcgaaggccaagccctccgggataagcaccatcgtgtag

SEQ ID NO: 25775 - DNA, 903 bp, synthetic construct
  source 1..903: mol_type = other DNA; note = Synthetic coding sequence
atggccgaggaggtgagcaccctgatgaaggccaccgtgctgatgagacaacctggacgggtgcaggagatcgtgggggccttacgaaagggcggcggagaccgcctgcaagtcatctctgattttgacatgactctttctagattcgcatacaacggcaagagatgcccttcctcctacaacatcctcgataattcaaaaattatcagcgaagagtgcaggaaagagctgacagccctgcttcaccattattacccgatcgagattgacccccatcgcaccgtcaaggagaagctgcctcacatggtggaatggtggaccaaggcacacaatctgttgtgtcagcagaaaattcaaaagttccagatcgctcaggtggtccgagaatccaatgccatgctacgggagggctataagaccttctttaacaccctgtatcacaacaacataccactgttcatcttctcagcaggcattggagacatcctagaggagatcatccgacagatgaaagtcttccatcccaatattcatattgtgtcaaattacatggattttaacgaggatggttttctacagggattcaaaggccaacttatacacacttacaataaaaactcaagcgcgtgtgaaaattcaggttacttccagcagcttgaggggaaaactaacgtgatactgttgggtgacagcataggagacttgaccatggcggatggcgtccccggagttcagaatattttaaaaatcggttttctcaacgacaaggtggaggaacgccgcgagcgatacatggattcgtatgacatcgtcctggaaaaggatgagacactggatgtggtgaacggcctactccagcacatcttgtgtcagggggtacaactcgagatgcaaggaccatag

SEQ ID NO: 25776 - DNA, 834 bp, synthetic construct
  source 1..834: mol_type = other DNA; note = Synthetic coding sequence
atgttccccggcgccaccacccccctgcccaaggccgccgcctacccaggggtgtacggttctaacggtaggacccctcagccggcctatttgtctgaggccatgaagctgacccaaagtgaacaagcccatttatcattagagttacagagggattctcacatgaaacagctgctattgatacaggagcggtggaaaagggcacaacgtgaggagaggcttaaagcccagcagaacacggataaggacgctgctgcccatcttcagacatcccacaaaccctctgcggaggacgccgaaggacaatcccctctgagccagaagtactccccaagcaccgagaagtgtctgcccgagatccagggtatcttcgacagggacccggacacactgttgtacctccttcagcagaagtctgagcccgcagaaccctgcataggctctaaagctcccaaggacgataagacaatcatcgaggaacaggcaacaaaaattgccgacctcaagagacacgtggaattccttgtggccgagaatgagcgtcttcggaaggaaaacaaacaacttaaagccgaaaaagcaaggttactcaaagggcctattgaaaaggaactggacgtagatgctgattttgtggagacctcagagctgtggagcctgcctccacatgcagagacagcgacagcgagctccacctggcagaaattcgccgcaaatactggcaaggccaaggacatccctattcccaacctgccgccactcgatttcccaagccccgaactcccgctgatggaattatccgaggatatcctgaaagggtttatgaacaactag

SEQ ID NO: 25777 - DNA, 138 bp, synthetic construct
  source 1..138: mol_type = other DNA; note = Synthetic coding sequence
atgagcccccagaagcgggtgaagaacgtgcaggcccagaaccggactagtcagggatctagcagtttccaaaccactctctccgcttggaaggtcaaacaagaccctagcaactctaagaatattagcaaacattag

SEQ ID NO: 25778 - DNA, 819 bp, synthetic construct
  source 1..819: mol_type = other DNA; note = Synthetic coding sequence
atgcccggcgaccaccggcggatccggggccccgaggagagccagccaccccagttgtacgctgccgacgaagaagaggctcccggcacgcgggatcccactaggttgaggccagtgtacgcgcgcgcaggcctgttgtcacaggccaaaggtagcgcctatcttgaggcagggggcacaaaagtgctgtgcgccgtgtctggccctaggcaggctgagggtggagagaggggtggaggtcccgcgggcgccgggggagaagcgcccgctgccttgagggggaggttactttgcgatttccggcgtgccccgttcgccggaagacggcgaagggccccacctggggggtgcgaagagcgcgaactagctctagccctccaggaggccctcgagccagcagttcgcctgggccggtatcctcgcgcacagctggaagtgtctgctctgttgctggaggacggcggctcggctctcgccgcggccctaaccgccgccgccctggccttagcagacgctggcgttgagatgtatgacctggtcgtgggctgtggcctgtcactggcccccgggcctgcccctacttggcttctcgacccaacaaggttagaggaggagagagctgccgccggactgacagtggcactgatgcctgtgctaaatcaggttgccggcttattgggctctggggaaggaggtctaacagagtcttgggcagaggcggtgagactggggttggagggatgccagcgtctatatcccgtgctacagcagtccctcgtaagggccgcccgacggagaggtgccgctgcccaaccttag

SEQ ID NO: 25779 - DNA, 429 bp, synthetic construct
  source 1..429: mol_type = other DNA; note = Synthetic coding sequence
atggccagcggcaacgcccggatcggcaagcccgcccccgacttcaaggccactgccgtggtggacggggctttcaaggaagtgaagctcagcgactataagggaaagtatgtcgtgctctttttctatcccctcgactttacgtttgtgtgcccgacagaaattatagccttttctaaccgcgcagaagacttcagaaaactgggatgcgaggtcctgggcgtgtcagtggatagccagtttacccatctcgcgtggtacgagcagggcccaaagcgtgaagtggcagccaaattgacaccatccggcccctcatccgtcgctagctggcctttactgaatctgtggaatctgcgctttcctattgtgaagatcatggaaacactcccacctaaatccctcaggatgatgactgtgatatctatatag

SEQ ID NO: 25780 - DNA, 1137 bp, synthetic construct
  source 1..1137: mol_type = other DNA; note = Synthetic coding sequence
atggaggtgaagcccccccccggccggccccagcccgacagcggccgacgcaggagacggcgcggcgaggaaggtcacgatcctaaagaacccgaacagttgagaaagctgttcattggcggactgtcgtttgaaactacggatgattcactgagggagcactttgaaaaatggggaactctcaccgattgtgttgtgatgcgcgatccccagacaaaaagatcacgtggatttggcttcgtaacttactcttgcgtcgaggaggtcgatgccgcgatgtgtgcgaggccccacaaggtggacgggcgagtcgtcgaacctaagagggctgttagccgggaggatagcgtaaaaccaggtgcccacttgaccgtcaaaaagatctttgtagggggcatcaaagaggacacggaagagtataacctccgagattattttgaaaagtacggcaagatcgagacgatcgaggtgatggaggaccgacagtcgggcaagaagcgcggcttcgcctttgtgactttcgacgaccatgacaccgtcgataaaatcgtcgttcagaaatatcacacaattaatggtcataactgcgaggtgaaaaaagcacttagcaagcaagaaatgcagtcagcagggtcacagcgcggacgtggagggggctcaggcaatttcatgggcagaggtgggaactttggtggtggaggaggtaactttggacggggcgggaattttggagggcgggggggatatggcggtggagggggaggcagtcgagggtcatatggtgggggcgacgggggatacaacggattcgggggagacggaggcaactacgggggaggacctggctacagtagtcgtggtggttacggcggtgggggccccggctacgggaaccaaggcggaggatacggcggcggcggcgggtatgatggctataacgaaggaggcaactttggaggaggaaattacggagggggtggtaactataacgatttcggcaattattcaggtcagcagcagtccaactacgggccaatgaaaggtgggagcttcggcgggaggagttccgggagcccgtacggcgggggatacgggagtggtggtggtagcgggggctatgggtcgcgtaggttttag

SEQ ID NO: 25781 - DNA, 324 bp, synthetic construct
  source 1..324: mol_type = other DNA; note = Synthetic coding sequence
tgaatccacgagcagtgggagaaggccaacgtgagcagcccccaccgggaattcccgccagctaccgccagggaagttgacccactccgtataccccctcaccatccacatacttctcgccaacccccctggcctagacgtggcggaatgattgttgatccactgcgcagcggattcccaagggcattaattgaccctagctcaggactgcccaatagactgcctccaggtgctgttcccccaggggcccggtttgacccctttggccctattggaacttcgcctccaggacccaacccagatcacctgccccctcccggctag

SEQ ID NO: 25782 - DNA, 201 bp, synthetic construct
  source 1..201: mol_type = other DNA; note = Synthetic coding sequence
atggccgccgccaccggcgaccccggcctgagcaagctgcagttcgcccctttctctagcgccttggacgtcggcttttggcacgaactgactcagaaaaaactcaacgagtaccgactcgacgaggcccccaaggacattaaagggtattactacaatggggattctgccggtctgcctgctaggctgactctggaatag

SEQ ID NO: 25783 - DNA, 2115 bp, synthetic construct
  source 1..2115: mol_type = other DNA; note = Synthetic coding sequence
atgctgcccaccgccagcagcaagcggcggaccttcgccgcccggtatttcacccggagtaaatcgttggtgatgggggagcagagtcgctcacccggcaggatgccctgtccgcacagattaggccccgttctgaaggcgggttggttgaagaagcagaggagtatcatgaaaaactggcaacagcggtggtttgtgctcaggggggatcaattgttctattacaaggacaaggacgaaatcaagccgcagggcttcataagtctccaaggtacccaggtcactgaactaccccctggaccagaggacccaggaaagcacctgttcgaaatctcaccggggggcgccggggagcgagagaaagtgcctgccaatcccgaagcactgctattgatggccagttctcagagggacatggaagattgggtccaggcgatcagacgtgtgatatgggcccctttgggcggtggaattttcggacagagattagaggagactgtacaccacgaaaggaagtatgggcctcggttggctcctttactggtggagcagtgcgttgactttattcgggagaggggacttactgaagaggggcttttccgaatgcccgggcaggccaacctggtgagggatctgcaggactcttttgattgcggtgaaaagccccttttcgacagcacaacagacgtccacaccgtcgcatcactgctgaagctatacctacgagagcttcccgaaccagtggtgccattcgctcgatatgaggactttctgtcttgcgctcaactgctgaccaaagacgagggcgaaggaacgctcgagctggctaagcaggtgtcaaatctgccgcaggcaaactacaacctcctgcggtacatctgcaagtttttagatgaagtacaagcttactctaacgtcaacaagatgtctgtgcaaaacttagccactgtgtttgggccgaacattttaaggcctcaggtggaggacccagtcaccatcatggaaggcacgagcttggtgcaacacttgatgaccgtgctgataaggaagcatagtcaacttttcacagcgccggtgccagaggggccaacttcacctcggggaggtctgcagtgcgccgtcggatggggatccgaagaggtgaccagagatagccagggcgaacctggaggcccggggcttcccgcacatcgtacctcaagtttggatggagcagcagtcgctgtgctgagtcgcacagcccctacgggaccaggttcacgatgctctccgggcaagaaagttcagactctgccatcatggaagtcatcatttagacaaccacgctcgctctcagggagccccaagggcggtggcagcagcctggaagtccccatcatttcttcgggaggaaactggctaatgaacgggctgtcaagtctgagaggccataggagagcatctagcggagaccgccttaaggatagcgggtccgtgcagaggctctctacttatgataatgtgcccgctcctgggctggtacccgggataccttcagtagcctcaatggcatggtcaggggcctccagtagtgagagctcagtcggcggatccttgtcatcttgcactgcatgtcgcgcaagcgacagttcagcacgaagcagtctgcatacagactgggctctcgagccctcccctttgccgtcatctagcgaagatccgaaatctctggacctggaccattcaatggatgaagccggggctggcgcctctaatagcgaaccaagcgagccggactcaccaaccagagagcacgcccgccgatcagaagccttgcagggactggtcaccgaactacgcgcggaactgtgcaggcaaagaacagaatacgaaaggagtgtgaaacgtattgaggagggatcagcagacctgcggaaacgcatgagccggttggaagaggaacttgaccaggagaaaaagaagtacatcatgttggagattaagctgagaaactccgagagagcgcgcgaggacgctgagagacgcaatcaactgttgcaaagagagatggaggagttcttctcaactctgggatcccttaccgtgggggccaagggcgccagggcccccaagtag

SEQ ID NO: 25784 - DNA, 630 bp, synthetic construct
  source 1..630: mol_type = other DNA; note = Synthetic coding sequence
atgatcagcaactaccggaacggcagcgagctggtgtgcttcaactcaggcgtaggctgctttcttatcggatgcgattgggcatttacagttctggtgaatacattcttcagttttctcagaagaaaaaccgacttcttcatcggtggtgaagaagggatggccgagaagctgattacccagacattcagccatcacaatcaacttgctcaaaaaacacgcagggaaaagagggctcggcaagaggctgaacgcagagaaaaagctgagcgcgcagccaggctggcaaaggaggccaaatctgagaccagcggaccccagatcaaggagttgacagatgaggaggcagagcggctacaactggagatcgaccaaaagaaagacgctgagaaccacgaggctcagttgaaaaatggatctctggatagccccggcaagcaagacactgaagaggacgaggaggaagatgagaaagacaagggaaaactgaaaccgaatctgggcaacggggccgatctccccaactaccgttggacccagacgctgagcgaacttgacctggctgtcccattctgcgtgaacttcagactcaagggaaaggacatggttgtcgacatccaaagacggtag

SEQ ID NO: 25785 - DNA, 309 bp, synthetic construct
  source 1..309: mol_type = other DNA; note = Synthetic coding sequence
atgaacgaggccgagatcgtggacgtggccctgggcatcctgatcgaaagcaggaagcaggaaaaagcttgcgagcagcccgccctggccggggcggacaaccctgagcatagtcccccctgttccgtaagcccacacactagcagtgggagcagcagcgaggaagaggacagcggcaaacaggctctcgctcctgggttaagcccttctcagcgaccaggggggtcgagtagcgcctgcagtcgctctccggaggaagaagaagaggaagacgttctaaagtatgttcgtgagattttcttctcgtag

SEQ ID NO: 25786 - DNA, 273 bp, synthetic construct
  source 1..273: mol_type = other DNA; note = Synthetic coding sequence
atggccatggcccccagccccagcctggtgcaggtgtacaccagccctgctgctgttgccgtgtgggagtggcaggacggactagggacatggcacccatactccgctactgtgtgcagctttattgaacaacagtttgtgcagcagaagggccaacgttttggcctgggaagcctggcccattctattcccctgggccaagccgacccaagtctggcaccgtacataatcgacctgccaagctggacgcagttcaggcaagatacggggtag

SEQ ID NO: 25787 - DNA, 207 bp, synthetic construct
  source 1..207: mol_type = other DNA; note = Synthetic coding sequence
atggacgccaacagcaaggacaagccccccgagaccaaggagagcgccatgaataacgctgggaatgcctctttcattctggggactggcaagattgtaaccccccagaagcacgctgagcttccgcctaacccgtgtacaccagatacattcaagagccccctcaacttctccaccgtcactgtggaacagctaggtataaactag

SEQ ID NO: 25788 - DNA, 879 bp, synthetic construct
  source 1..879: mol_type = other DNA; note = Synthetic coding sequence
atggacggcagcttcgtgcagcacagcgtgcgggtgctgcaggagctgaataagcaaagagagaagggccaatactgtgatgccactttagatgttggcggtctcgtgttcaaggctcattggtccgtgctagcttgctgctcgcacttcttccagtctctctacggagacgggtccggcggaagcgttgttctccctgccgggtttgcagagattttcggcctgctgctggacttcttttacactggacacttagctttgacttctggcaatcgagaccaggttctcctggcagcgagagagctcagagtcccagaagcagttgagctgtgccagagttttaagccgaaaacaagtgtgggtcaggccgctggtggacaatcaggtcttgggccgcctgcatcccagaacgtcaattcacacgtgaaagaacccgccggcctcgaggaggaagaagtctctcgaacattggggcttgtgccacgcgatcaggaacccaggggttcacactccccgcaacggccacaactgcatagcccagctcaatctgaaggacctagctctctgtgcgggaagctgaaacaggccctcaaaccctgtccactggaggataagaaacctgaagattgtaaggtgcccccacgaccgctggaggctgaaggggctcagctacaagggggatcaaatgaatgggaggtcgtcgtgcaagttgaagacgacggtgatggggactacatgtctgaacctgaggccgtcctgactaggcggaaaagtaatgtgatcagaaagccttgcgccgccgagcctgctctgtctgctggatctttagctgccgaaccagcggaaaatcgcaagggaacggctgtcccagtcgagtag

SEQ ID NO: 25789 - DNA, 408 bp, synthetic construct
  source 1..408: mol_type = other DNA; note = Synthetic coding sequence
atggccgccctgcggcccctggtgaagcccaagatcgtgaagaagagaaccaagaaattcatccgtcatcagagcgatcgctacgtgaagataaagcgcaactggagaaaaccgcgtggaattgacaaccgcgtgcgaagacgattcaaaggccagatcctcatgcctaacattggatacggatccaataagaagacaaaacacatgctgcccagcggattccggaagttcctggtgcacaacgtgaaggaactcgaggtgctgttgatgtgtaacaaatcctactgcgcagagatcgcccacaatgtgtcatcgaagaatcgcaaggctattgtcgaaagggctgcccagttggccattagggtcacaaacccaaatgccaggttaaggagcgaggagaatgaatag

SEQ ID NO: 25790 - DNA, 810 bp, synthetic construct
  source 1..810: mol_type = other DNA; note = Synthetic coding sequence
atgaagacccccgtggagctggccgtgagcggcatgcagaccctggggttacaacataggtgccgtgggggatacagggtgaaagctcgaaccagttatgtcgatgagacactattcggctcccccgcggggacccgtccaacaccccccgactttgatcccccttgggtggaaaaggcaaatcgcacccgtggagtgggtaaggaggcttctaaggctctgggcgctaagggcagctgcgagaccacaccttccagaggttccacacccactctgacccctcggaagaagaataagtaccgcccgatcagccatacaccttcatactgcgatgaaagcctatttgggtcacgcagcgagggtgcatcctttggagccccccgcatggcgaaaggtgacgcagcaaaacttagggctctcctctggacccctccccctacccccagaggttcccatagcccgagaccccgtgaggctcccttacgagctatccaccccgctggcccgagcaaaactgagcccggaccagccgcagattcacagaaattatccatgggcggattgcattccagccgtccccttaaaagaggtctctcccattcactcactcacctgaacgtgccttctactggtcaccctgcaacatctgccccgcacaccaacggtccacaggacttacgcccatctacgtcaggcgtaaccttccgttctccccttgtgaccagcagagcacgctccgtcagcatctctgttccctctacgccacggaggggcggagctacgcaaaaaccaaagccaccatggaaatag

SEQ ID NO: 25791 - DNA, 840 bp, synthetic construct
  source 1..840: mol_type = other DNA; note = Synthetic coding sequence
atggtggaccacctggccaacaccgagatcaacagccagcggatcgctgcggtggagtcgtgctttggtgcctctgggcagcctctcgccttgcctgggcgagtcctgctgggggagggagtgcttaccaaggaatgccgtaaaaaggccaagcctcgtatcttcttcctgttcaacgacattctggtttatggaagcatagtccttaacaagaggaagtacaggtcacaacatatcattccattggaagaagtgacattggaattgttaccagaaacactgcaagccaaaaatcggtggatgatcaagactgccaaaaaatccttcgtggtctcagcggccagtgccaccgagcgccaggagtggatctcgcatattgaggaatgcgtacggaggcagttaagggccaccggccgccctcccagcacagaacacgccgccccgtggatcccagataaggccaccgacatttgcatgagatgcacacagacaagattttccgcacttacaagacgccatcattgtcgcaagtgtggatttgtggtgtgcgctgaatgcagtcggcaaagatttctcctccctcgcctgtccccaaagcccgtgcgcgtgtgctccttgtgttacagagaactggcagcccaacagcggcaagaggaggcagaagagcaaggggccgggagtcccgggcagcccgcgcatctcgcacgacctatttgtggcgcctctagtggcgatgacgacgactccgacgaagataaagagggcagcagagacggggactggccttcctccgttgaattttatgcctctggcgtggcctggtccgcctttcactcatag

SEQ ID NO: 25792 - DNA, 279 bp, synthetic construct
  source 1..279: mol_type = other DNA; note = Synthetic coding sequence
tgacggagcagcaccagcccctgcggcaccagcaagagccccaacagagagtgggaaggaaagtccgtggcgtatatgccttatgctgaagtgaagagggcattggagcaggaagctcagatgcacaatacagctgctagatccgcatcgccctgtcgtctctccccccgggaggtgagtaaggcagctcctcaacctgacatgagtgccgccaggtactctgttcccccagtgttgcagccggctccacatcaggtcattaccaatcttcccgagtag

SEQ ID NO: 25793 - DNA, 771 bp, synthetic construct
  source 1..771: mol_type = other DNA; note = Synthetic coding sequence
atgagcaacaacctgagcgagctggacaccaagatccaggagaaggctatgaaggtcgatatggacatttgtcggagaatagacataaccgccaagctatgtgacgtggcccagcagcgaaattgcgaggacatgatccagatgtttcagaagaaacttgtcccctctatgggcggcagaaagagggaacgcaaagccgcggtggaggaggacacatcgctctctgagagcgagggcccaaggcagcccgacggagatgaggaagaaagcaccgctctgtccattaacgaggaaatgcaacgtatgcttaaccagctgcgtgagtacgatttcgaggacgactgtgactcacttacttgggaggagaccgaggagacacttctgctgtgggaagatttcagtgggtatgctatggcagcagctgaggcacagggcgagcagcaagaagacagcctagagaaagtgataaaggataccgagtctctgttcaagacacgcgaaaaggaatatcaggaaactatagatcagattgagctagagctggcaactgccaaaaacgatatgaatcggcatctccacgaatatatggagatgtgtagtatgaagcggggtttggatgtgcaaatggaaacatgccggagactcatcactcagagtggggaccgcaaaagcccagcatttacagctgtgcccctgagcgatcccccccctcctcctagcgaagctgaagactctgaccgtgacgtatccagcgattcatctatgagatag

SEQ ID NO: 25794 - DNA, 1620 bp, synthetic construct
  source 1..1620: mol_type = other DNA; note = Synthetic coding sequence
atggccaccagcgcccccctgcggagcctggaggaggaggtgacctgcagcatctgtctagattacctgagagacccggtcaccattgactgtggccatgtcttttgtcgcagctgtaccactgacgtgaggcctatcagtggttcacgcccggtgtgtccactttgcaagaagccatttaaaaaggagaacatcagaccagtgtggcagctggcttcccttgtcgagaatattgagcgcctcaaggtcgataaaggcagacaacccggcgaagtgacgagggaacaacaggacgccaagctctgcgagcgtcatcgagagaagctgcactattattgcgaggacgacggcaaactgctgtgtgtgatgtgcagagagtcaagggaacaccggccacacacagcagtgctgatggagaaggcagcccagccccaccgggaaaaaattctgaatcatctgtctacattaaggcgtgatcgtgataaaattcaaggctttcaggcaaaaggagaggccgacatcttagctgcgctgaagaagctgcaggatcagcggcagtacattgttgctgaattcgagcagggccaccagtttctcagggagagagaggagcacctgttagaacagcttgcaaagctggagcaagagctgaccgaagggagggagaaatttaagagtaggggggtaggtgagctggcgcggcttgccctcgttattagcgagctggaaggcaaggcacagcagccagctgccgagctgatgcaggacactcgtgatttcctgaatcggtatccacgtaaaaaattttgggtcggcaaacctatcgccagagttgtaaaaaaaaaaaccggcgagttttcagataaactgctcagcctgcagagagggctgcgggagttccaaggtaagctgctcagagacctggagtataagacagtaagcgttaccctggatccacagtcagcttccggttaccttcagctctcagaagattggaagtgcgtaacatatacttccctctataagtcagcatacctgcacccacagcagttcgactgcgaaccgggcgtgttgggatcaaagggcttcacctggggaaaagtttattgggaagtggaggtggagagggagggctggagcgaggacgaggaggagggtgatgaagaagaggaaggagaggaggaagaagaggaagaggaagccggatacggagacgggtatgatgattgggaaacggacgaagatgaggagtctcttggagatgaggaggaagaggaagaggaggaggaagaggaggttcttgagagttgtatggtcggtgtcgctcgggattcagtgaaacggaagggtgatctctcattgcgtcctgaagacggggtgtgggcccttcgtttgtcatccagtggtatatgggctaacaccagtccagaagcagaactgtttcccgcactgcggccccgtcgtgtgggcattgccctggattatgaaggcgggaccgtgacattcaccaatgccgagagtcaagagctcatttacactttcacggcgacatttactcggcgcttggtccctttcctctggctcaaatggcccggtacacgccttctcctgcgcccctag

SEQ ID NO: 25795 - DNA, 750 bp, synthetic construct
  source 1..750: mol_type = other DNA; note = Synthetic coding sequence
atggccttcatgacccggaagctgtgggacctggagcagcaggtgaaggcacaaacagacgagatacttagtaaagaccagaagatagccgccctggaggacctagtgcaaacactccgtcctcatcccgcagaggcaactcttcagcgccaggaggagcttgagactatgtgcgtgcagctccagcgccaagtaagggagatggagcggttcctcagcgactacggacttcagtgggtgggagaacccatggatcaggaagactctgagtccaaaactgtcagcgagcatggcgagcgcgattggatgacagctaagaaattctggaaaccaggcgacagtctcgccccccctgaagtcgactttgaccgtttattggcgtcacttcaggacttgtcagaattggtagtggaaggggacacacaggtcacccccgtccccggaggcgctcgtctcaggaccttagaacccatccctcttaagctctacagaaatggcataatgatgttcgacggcccctttcaaccattttacgatccctccactcagcgctgtctccgcgacatcctcgacggatttttcccctctgagctgcaaagactgtatccgaatggtgtgccttttaaggtcatctcctgcagctcaaaccacacattcggggacttcgaaggatcgggcgatacacagcctccccagacacctccaatcttaagaggtagtagatgcacaccgtggggaacacccgtctag

SEQ ID NO: 25796 - DNA, 2763 bp, synthetic construct
  source 1..2763: mol_type = other DNA; note = Synthetic coding sequence
atgagcgaggacagcgagaaggaggactacagcgaccggaccatcagtgacgaggatgagagtgacgaggatatgtttatgaagtttgtgagcgaggacctccacagatgcgcccttttgaccgccgattcctttggcgatccatttttccctcgcacgactcaaattttgctagaatatcagctgggccgatgggtccccagacttcgcgaaccacgggacctgtatggggtcagctcatctggccccttgagtcccacaaggtggccctaccattgcgaggtgatcgatgaaaaggtccagcacatcgattggacaccatcttgtcccgagccagtatatatccccacaggtttggaaaccgagccgttatatcccgacagcaaagaggctacagtggtgtacctggctgaggatgcttataaggagccttgcttcgtatatagcagagtgggcgggaataggacccctttgaagcaacccgttgactatcgggacaataccctgatgtttgaggcgaggtttgaatctggtaacttacagaaagtggtgaaggtggcggagtacgaatatcaactcacagtccgccctgacctatttactaacaagcacacccagtggtattacttccaggtgactaatatgcgtgcgggaatcgtataccgcttcactatagttaattttacaaaacccgccagtttgtattccagaggaatgcggccactgttctatagcgagaaggaggccaaagcacaccacattggttggcagcgaatcggtgatcagattaagtattacaggaacaatcccgggcaggacgggaggcattacttcagcttaacatggacctttcagtttcctcacaacaaggatacatgttatttcgctcactgctatccatatacttatactaacctgcaagaatatctgagcgggataaacaatgaccctgtcaggtcaaagttctgcaagataagggttctgtgccacacattagctcggaacatggtctatatattgacaataacaacgcctttaaaaaattctgattctcgcaaacggaaggccgtaattctgaccgcaagagtgcatccgggagaaacaaactcttcctggattatgaaaggctttctagactatattttaggtaattcgtctgacgctcagctcttacgagacacatttgtgttcaaggtagtgcctatgttgaacccagacggcgtgatcgtgggaaattatcgatgctcactggccggacgtgatttgaaccggaactatacaagcctcctgaaagaaagcttcccctcagtctggtatacccgcaacatggtccaccggcttatggaaaagcgagaggtcatactatattgcgatttgcacggccattccaggaaggagaatatcttcatgtatggctgtgatgggtcagacaggtctaagacactgtacctgcagcagcgaatctttccccttatgctgagcaaaaactgtcccgacaaatttagcttctccgcgtgcaagttcaatgtgcagaagtctaaggagggtaccggacgtgtggtcatgtggaagatgggcattcggaatagctttacaatggaagcgactttctgcggctccacgctcggaaacaaaagaggcactcacttcagcactaaggacctggagtccatggggtatcacttctgtgacagcctcctcgactactgcgatcccgatcggactaaatattatcgatgtcttaaggagttggaggagatggaacggcacatcacgctagaaaaagtgttcgaggactcagacaccccggttattgacatcaccttagatgttgaatcttcttcccgcggaagtgactcatccgagagtatagacagtctgacatacttgctgaagcttacctcccagaaaaaacatctgaagaccaaaaaggagagaaatagtacaatagcttctcaccagaatgccaggggccaggaggtttatgaccgagggcatctgctgcagcgccacacacagagcaattcagatgtgaaggacactcgccccaacgagcctgatgactatatggtcgattattttagaaggcagctccctaatcagggcttagatctgcatcacaacctgaagtcaaaaatcaaggagtgtataagtttccagagcaaaaagactgggatcaactggacagatgacgagaagagaagttacaaggacaaaggaatcgtgcagacacaggagatcttgcaatacctcctccctatcgtccactccaccaagaacatgcagacaacgcaaatcaagcagctgttcaaccctagaacaaactttcagatacagcaccagttgaaccccgccacctgccgcaatataaagaagtatagtacctcttggaccgcacctcgcaaccacccattcgtgattcagggcgacgtgatggctaactcttcagagtgggtgcagtctaaacctcacagaagcttggaatccctttcccccctgaaagggcctaagaaaaataagcactcccagatatgggccattaagaatgaagacatcaaacctctgtcatcaaagtgggagaccgccagcagttcatttggaatggatgctaatgtgcttaaatataaatcactgcaggctgaggaaaccaatcagcagtcctccaaacacactgcccttcatctgactaagaacaaagacgagcaggcaaataagaatgatgggcaaccaacattatatctaaaattccagagggagagttag

SEQ ID NO: 25797 - DNA, 858 bp, synthetic construct
  source 1..858: mol_type = other DNA; note = Synthetic coding sequence
atgaccaacgcccagatcatcctgctgatcgacaacgcccggatggccgtcgatgatttcaacttaaagtacgaaaatgaacatagtttcaagaaagatctggagatcgaggtcgaaggattgagacggacactggacaatctgactattgtgactacagatctggagcaagaggttgaaggtatgaggaaagagctgattctcatgaaaaaacaccacgagcaagagatggaaaaacatcacgtcccgtctgacttcaacgtgaacgtgaaggtggatactggacctagagaagatttgattaaagttctggaagatatgcggcaggaatatgaacttatcattaagaagaaacacagggatctggatacgtggtataaagaacagtctgcggcaatgtcacaagaagccgcttccccagccacggtgcagtcccggcagggggacattcatgagttaaagcggaccttccaggctctggaaatcgacctccagacacagtactcaacgaagtctgccttagagaatatgctctctgagacccaatcccggtattcatgcaagctacaggatatgcaggagattatcagccactatgaggaggaattgacccaactccgacacgagctcgagaggcagaataacgaataccaagtcttgctcggaatcaaaactcacctggaaaaagagattactacttaccggcggttgcttgagggcgagtcagaaggtacacgggaggaatccaaatcctcgatgaaggtctccgctaccccgaaaattaaggctatcactcaggagactatcaatggaagattggttctgtgtcaggttaacgagatccagaagcatgcctag

SEQ ID NO: 25798 - DNA, 2013 bp, synthetic construct
  source 1..2013: mol_type = other DNA; note = Synthetic coding sequence
atgagcccctgcagcggcggccggggcgagctgcgggccgcctgccttcaacccgaagtccctggcgccccaggtctgagctggtggcctagtaccgcgggactgcggcaatcacagacggacctgcaactgtcactgtccatttggtgtggaaaaaagatgggttcatacctgagcgtacccgcttacttcacatccagggacctgtttaggtgctccgagtgtcaggatagcctgaccaattggtactacgaaaaagacgggaaactctattgtccaaaggattattggggaaagttcggggagttctgccatgggtgttcactactcatgactgggcctttcatggtagcaggggaatttaaataccaccccgaatgttttgcatgcatgtcctgtaaagtgatcatagaagatggggatgcatacgccctcgttcagcatgctacgctgtactgcgggaagtgtcacaatgaagtggtgctcgcccccatgtttgagagactctcgactgagtcagtacaggaacaactgccttattccgtgacccttatttctatgccagcaaccaccgagggcaggcgcggattcagtgtaagcgtagaatccgcctgcagcaactatgcaacaactgtccaagtgaaagaggtgaataggatgcatatttctcccaacaatcgtaatgccatccacccgggtgatcgaattctggagatcaatgggacacctgtacggaccttaagagttgaagaagtggaggacgccatatctcaaacttcccagaccctccagcttctcatcgaacacgatcccgtgtctcagaggctcgatcagctcaggctggaggctcggctcgccccacacatgcagaacgccggccacccacacgccctcagcacactagacaccaaggagaacctcgagggcacgttgaggagacgcagcctgcgccgcagcaatagtatttcgaaatcaccaggccctagtagtccaaaggaacctctgctgtttagccgagatatctctcgatctgagtctttgaggtgtagtagctcatacagccaacagatcttcagaccgtgtgacttaatccatggggaggtgctggggaagggctttttcggccaggctataaaggtcacgcataaagctacgggcaaagtgatggtcatgaaagaactgataaggtgtgacgaggaaacacagaaaacattcctgaccgaagtcaaagtaatgaggagcctggaccatcccaatgttctcaaatttatcggcgtgttgtacaaggacaaaaaactgaacctcctgacagagtatatcgaggggggcactctgaaggattttctgcgatcgatggatcctttcccgtggcagcagaaagtgcgcttcgccaagggaatcgcctctgggatggcgtatcttcatagcatgtgcataattcacagagaccttaattcacacaactgcttgatcaaacttgacaaaacagtcgtggtagccgactttggactatctcgtttaatcgtggaggagaggaagcgggcccccatggagaaggcaaccaccaagaaaagaactctgcgtaaaaatgatcggaaaaagagatacacagtggtaggcaatccatattggatggcacccgaaatgctgaacgggaaaagctatgatgagactgtggatatttttagctttggaattgtattgtgtgagatcatcggtcaagtgtacgccgatcctgattgcctgcctaggacactggacttcggattgaatgtcaagctcttctgggaaaaattcgtgcccacagactgtccacccgcatttttccctctggctgcaatctgctgccggctagagccggaaagccggccagccttctcaaaactggaagactctttcgaggccctgagcttgtatctgggtgagttgggcattccgctcccagctgagctcgaagaactggaccatactgtctcgatgcagtacgggctcacgagagactctcctccatag

SEQ ID NO: 25799 - DNA, 459 bp, synthetic construct
  source 1..459: mol_type = other DNA; note = Synthetic coding sequence
atggcccacctgcggggcttcgccaaccagcacagccgggtggacccggaggagctgtttaccaaactggatcgcattgggaagggcagctttggggaagtgtacaagggcatcgacaatcacaccaaagaagtagtagcaattaagattatcgacctcgaagaggccgaggacgaaatcgaggatattcagcaagagataactgttctctctcagtgcgactcaccttacattaccagatatttcggctcttacctcaagtctacaaagctctggatcattatggagtacctgggcggtggcagtgcattggacctattgaagcctggcccactcgaggagacttatatagccactatactgcgggagatcctgaaggggttggattacctgcatagtgaaagaaaaatccatcgggatatcaaagccgctaacgttctgctaagtgaacaaggttag

SEQ ID NO: 25800 - DNA, 1365 bp, synthetic construct
  source 1..1365: mol_type = other DNA; note = Synthetic coding sequence
atggccccctgccgggcccggaccggccccagcacctggcggagcgcaactagctcaacgagacggagaaaaggcgctagacggcatctgtccgctctccaggtattggaaacctgtgtgaagaattgcggacatagattccatgtgctagtggccagccaagactttgttgagtctgtgctggtgaggacaattttaccaaagaataacccaccaactattgtccatgataaagtgctgaacctcattcaaagctgggccgatgcctttaggtctagccccgacctgacaggagtggtaaccatctacgaggaccttcgtcggaaaggcttagagtttcccatgacagatctggacatgttgagtcccattcacactcctcagcggacagtattcaattctgaaactcagagcggccaggattcagtgggcacagactccagtcagcaagaggattctggacagcacgccgctcctctgcccgcacctcctattttgagcggggatacgccaatcgccccaacacccgaacagatcggtaaactgcgttctgagctggaaatggtgtctggaaacgtccgcgttatgagcgaaatgctgacagaactggtcccaactcaagcagagcctgcagacctcgagcttttgcaggagcttaaccgaacttgtcgggcaatgcagcagagagtactggagctcataccccagattgctaacgagcagctcactgaggaactgctcatcgtcaatgacaacctgaacaatgtgttcctcaggcacgaaagatttgagaggttccgcaccggtcaaacaaccaaagcgcctagtgaagccgaacccgcagccgatctgatagacatgggacctgatcccgctgcaacaggaaatctctcaagccagctggccggaatgaacctcgggagtagctccgtgcgagcagggttacagtcactggaagcgagcggacggctggaggatgaattcgatatgttcgccctcactcgaggatccagcctcgccgatcagaggaaggaggtgaaatacgaagccccccaggccaccgacggtttggcaggagctctggacgcaagacagcagagcaccggcgccatccccgtgacccaagcctgtttgatggaagatattgagcagtggttgtccacagatgtgggaaacgatgcagaagagcctaaaggcgtaactagcgaagaattcgacaagtttctagaggaaagagctaaagcagccgaccgcctgccaaacctgagttcgcctagcgcagaaggacctcctggtccacccagcggtcccgcccctcgaaagaagacccaggagaaggacgacgacatgttgttcgctttgtag

SEQ ID NO: 25801 - DNA, 378 bp, synthetic construct
  source 1..378: mol_type = other DNA; note = Synthetic coding sequence
atgcagaccagcagcagccggagcgtgcacctgagcgagtggcagaaaaattattttgctattacttctggcatttgcaccgggcctaaggccgatgcctaccgagcacagatactgcggattcagtatgcttgggctaacagcgaaataagccaagtgtgtgcgacgaaacttttcaagaagtacgcagagaagtactctgcaatcattgattctgacaatgtagaaagtggccttaacaactacgccgaaaatattctgacgctggcgggctcccaacagacagacagtgataaatggcagtcaggcctgtcaattaataatgtgtttaagatgtcgtctgtccaaaaaatgatgcaggccggaaagaagttttag

SEQ ID NO: 25802 - DNA, 30 bp, synthetic construct; identical to SEQ ID NO: 12254
  source 1..30: mol_type = other DNA; note = Synthetic coding sequence

SEQ ID NO: 25803 - DNA, 270 bp, synthetic construct
  source 1..270: mol_type = other DNA; note = Synthetic coding sequence
atgagcgagcagggcgacctgaaccaggccatcgccgaggagggcgggacagaacaggaaaccgctacacccgaaaacggaatcgtcaagtcagaatcgttggacgaggaggagaagctcgaactgcagcgcagactggaagctcaaaatcaggaaaggcgcaagagtaaatctggggccggcaaaggtaagctgactagaagcttggccgtgtgcgaagagagcagcgcacggcccggcggcgaaagcctgcaagatcagactttatag

SEQ ID NO: 25804 - DNA, 3732 bp, synthetic construct
  source 1..3732: mol_type = other DNA; note = Synthetic coding sequence
atgctgatcaaggagtaccacatcctgctgcccatgagcctggacgagtaccaggtggcacagctgtatatgattcagaaaaaatcgcgcgaggagtcctctggtgagggaagtggggtggagatcctcgccaaccgcccctataccgatgggccaggcggtagcggtcagtacacacataaagtgtaccatgtagggagccacatacctggatggtttagggcactgctgcccaaagcggcgttgcaggttgaagaagaaagttggaacgcatatccatatactaggactaggtatacctgtccctttgtggagaagtttagcatagaaattgagacttactatctgccagacggggggcagcaacccaacgtctttaatctcagcggggctgaacggcgccagcgtatcctggataccatcgacattgtaagagatgcagtcgctcccggcgaatataaggctgaagaagatccacggctgtaccattccgtgaagacgggtaggggccctctcagcgacgactgggcgaggacagctgctcagaccggtccccttatgtgcgcgtacaagctatgcaaggtcgagttccgctattgggggatgcaggccaaaattgagcaatttatacatgatgtgggtctccgaagagtaatgctgagggcccatcgacaggcgtggtgctggcaggacgagtggacggaactctccatggccgacataagggccctggaggaagagactgctcggatgttagcgcagagaatggccaaatgcaataccggatcagaaggaagtgaagcccagccccctggcaaacctagcacggaagcacgcagtgcagcatcgaacacagggactcctgacggccccgaggcccccccaggccccgacgcttcgcctgacgcatcctttggaaagcaatggtccagttcatcaaggtcgtcttattctagccagcacggaggtgctgtctcaccacagagtttgagcgagtggcgcatgcaaaacattgcaagggacagcgaaaatagcagtgaggaagaattctttgatgctcacgaagggtttagtgactccgaggaagtgtttcccaaggagatgaccaagtggaattcgaatgactttatcgacgctttcgcgagtccggtggaggctgagggaacacctgaaccgggcgctgaggcggccaaagggatcgaagacggcgctcaggcgcctcgcgactctgaggggttagatggagctggagagttgggagccgaagcctgcgccgtccatgcactcttccttatcttacactctgggaatatcctagattctgggccgggagatgctaactcaaagcaggctgacgttcaaacactctcctcagccttcgaagcagtgacaagaattcatttccctgaagcactcggccacgtcgcactcagactggtaccctgccccccgatctgcgcagctgcctatgctttggtgagcaacctgagcccgtactcacatgatggggatagcttgtctcgttcccaggaccacattccactggctgctcttccgctgctggcgacatcaagctcaagataccagggggcagtcgcaaccgtaatagcgaggacaaaccaggcatacagtgcattccttcgcagtcccgagggggccggattttgcgggcaggttgccctgataggcgatggggtgggcgggatcctagggtttgatgccctatgtcattcagccaatgccggaacagggtctcgaggttcatcccgcagagggtccatgaataatgagctgttgtcaccagaatttggacccgtgcgggacccccttgccgatggggtggagggcctgggtagggggtctccagagccaagtgctctcccaccccagcgcattccatctgatatggcctcacccgagcccgagggcagccagaattccctacaggccgccccggcaacaacatctagctgggagcctaggcgggcaagcacagcattctgccctcccgccgcttcctcggaggcgcctgatggcccctctagtaccgccagactggatttcaaggtctcaggattcttcttgttcgggtcacctctgggactggtcttggctctccggaagaccgttatgcccgctctggaagctcagatgcgccccgcatgtgaacagatttacaacctctttcacgctgctgatccatgcgccagccgtcttgagcctctgctggccccgaaattccaggccattgccccattgaccgtcccacgctaccagaagtttccgcttggtgatggttcttcgcttcttctggcagatacacttcagacgcattcatcgctctttctcgaggagctggagatgctggtcccgtctacgccgacatctacctcaggtgctttctggaagggtagcgagctcgctactgaccctccagctcaaccggctgctccgtctaccacgtctgaagtcgtgaaaattttagagagatggtggggcactaagcggattgactattcactgtattgcccagaagctttgaccgccttccctaccgttactcttccacacctgtttcacgcttcatattgggaatcggccgacgtcgtagcatttatactgcgacaggtgatcgagaaggaacggcctcagttggccgagtgtgaggagcccagcatatatagccctgcattccctagggaaaagtggcaacgcaagcggactcaggtgaaaatccggaacgtaacttctaatcaccgagcgtccgacacggtcgtctgtgaagggcgacctcaagtgttgtccggacggttcatgtatggacctctggacgttgttaccctgaccggcgagaaggtagatgtctatataatgactcagcctttgtctggaaaatggatccacttcggaaccgaggtcacaaattctagcggaaggttaacattccccgttccaccagagcgcgctctcggcatcggggtttatcctgtcaggatggtcgttcgaggcgaccatacctatgctgagtgctgccttactgtcgtggccaggggaacagaagctgtggtgtttagcatagatggatcatttaccgcgtctgtgagcatcatggggtctgatcctaaggtaagggccggggcggtggatgtcgtgcggcactggcaagacagcgggtaccttattgtgtacgttaccggacgcccggacatgcaaaagcatcgagttgttgcatggctctctcagcacaacttcccacatggggtagtctcattttgcgacggcttaacccacgatccgctgcggcagaaagccatgtttttacagagcttagtccaagaggtggaactcaacatcgtagccggatatggctcccctaaggacgttgcggtttacgccgctctggggctgtccccctctcagacctatattgtgggacgcgccgtccgcaaactgcaggcacagtgccaattcctgagcgatggatatgttgcccacctggggcagctcgaggcaggaagtcattcacacgcaagttcaggcccaccgagagccgcgctggggaagtcctcctacggcgttgctgccccagtggacttcctccgaaagcagtcccagttgctgagatcacggggtcccagccaggcggagcgggagggacccggcacgccaccaaccaccctagctcggggaaaagcaagatctattagcctgaagctcgattccgaggaatag

SEQ ID NO: 25805 - DNA, 1614 bp, synthetic construct
  source 1..1614: mol_type = other DNA; note = Synthetic coding sequence
atgagcagcagcggctacccccccaaccagggcgccttcagcaccgaacagtccagatatccgccacactccgttcagtacacgttcccaaacacaagacaccagcaggagttcgctgtgcccgattacagaagtagccatctggaagtatcacaggcttctcagctcctacagcagcagcagcagcaacagctgcgtcggaggccgagccttctctcagagtttcacccgggtagcgatagacctcaggagcgccgcacgtcttacgagcctttccaccctggcccttcaccggtggatcacgatagcctggagtctaagagaccaaggttagagcaagtgtcagattcacattttcagagggtttcggctgctgtgctcccattagttcatcctttgcctgaggggctccgggccagtgccgatgcaaaaaaagacccagccttcggcgggaagcacgaagcccctagtagccccatcagtgggcagccctgtggcgacgatcagaatgcttcaccctcgaaactgtcaaaggaggagctgattcaatcaatggacagagttgaccgcgaaatagccaaggtggaacagcagatcctcaagctgaaaaaaaagcaacaacagttggaagaggaggcagccaaaccacctgaaccagagaagcctgtgtcacccccccccgtggagcaaaagcatcgaagtattgtgcaaatcatctacgatgaaaataggaaaaaagccgaagaggcccataagattttcgaggggctgggcccgaaggtcgagctgcccttgtacaaccagccatctgacacaaaagtgtaccatgaaaacattaaaactggtgttccagcccgaaggatgatgaagaaccaggtgatgcggaaaaagctcattctgttcttcaagcgacgcaatcacgctaggaaacagcgggagcagaaaatatgccagcggtatgatcagctgatggaggcatgggagaaaaaggttgaccggattgagaacaatcctcggaggaaggctaaggagtctaagacgagggagtattacgaaaagcagtttccggagatcagaaaacagcgcgagcagcaagagcgtttccagcgggtgggacagcgaggggctggtctgtctgcaaccatcgcccggtccgagcatgagatttcggaaattatcgacggcttaagcgaacaagagaataatgaaaagcagatgagacaactctccgtgattcctccaatgatgttcgatgctgagcagagaagggtaaaatttataaatatgaacgggttgatggaagatcccatgaaagtctataaggacagacagtttatgaatgtctggaccgaccatgagaaagaaatcttcaaggacaaatttatccagcatcctaagaacttcggccttatcgcgagttaccttgaacgaaaaagcgtgcccgattgtgtgctgtactactacttgacgaagaagaatgagaattacaaggcgctcgtcagacgcaattacggaaagcggcggggccgcaaccagcaaattgctaggccttctcaggaagagaaggtggaggagaaagaagaggacaaggccgaaaaaacagaaaaaaagtag

SEQ ID NO: 25806 - DNA, 147 bp, synthetic construct
  source 1..147: mol_type = other DNA; note = Synthetic coding sequence
atggaggacctgttcgagaccttccaggacgagatgggcttcagcaatatggaggatgatggacccgaggaagaggaacgggtggctgagcctcaagcaaactttaatacccctcaggcactgcgccagctgctactgctcatgtag

SEQ ID NO: 25807 - DNA, 798 bp, synthetic construct
  source 1..798: mol_type = other DNA; note = Synthetic coding sequence
atggccagcagcagcgtgccccccgccaccgtgagcgccgccaccgccggccctgggccgggcttcggctttgcttcaaagacaaaaaagaaacattttgtgcaacagaaggtcaaagtgtttcgcgccgccgatcctctggtcggagtctttttatggggcgtggcccactccattaatgaactgtctcaggtacctcctcctgttatgctgctaccagacgatttcaaagcaagctccaagattaaggtaaacaaccacctgttccatagggaaaatcttccctctcattttaagttcaaagagtattgcccccaagtcttcaggaacctccgagacagattcggtattgatgaccaagattatctagtgtccctgactagaaatccaccctccgagagcgaaggaagcgatgggcggtttctcatttcatacgatagaaccctggttatcaaggaagtgagctcagaggatattgccgacatgcattcaaacttgagtaattaccatcagtatatcgtgaaatgccatgggaataccctgctccctcagttcctgggaatgtatcgggtctcagtcgataatgaagatagttatatgctcgtaatgaggaatatgttttctcaccgactccctgtccatcgcaaatacgatttgaaagggtccttagtaagccgtgagcccgccatccggaagcgattaaaaaattgtccccccttgcgtatctggacattttcaacccgcactagaaagtacatcctggtgaagcggaggcgtaaatacttctggaggtcgtag

SEQ ID NO: 25808 - DNA, 462 bp, synthetic construct
  source 1..462: mol_type = other DNA; note = Synthetic coding sequence
atgagccccgaggtggccctgaaccggatcagccccatgctgagcccgtttatctccagcgtggtgcggaacggcaaggtcgggcttgatgctacaaactgcctacgaataacagatcttaaaagtggatgtacttctttgactccagggccgaattgcgaccgctttaagctgcacataccttatgccggtgagactctgaagtgggatatcatttttaacgctcagtatccggagttgcccccagatttcatattcggtgaagacgccgaatttttacccgacccgagcgcattgcaaaatttggcgtcctggaacccctcgaaccccgagtgtctacttctggtcgtgaaagaactggtacaacagtaccatcaattccaatgctctcgattacgtgaatcaagccgcctcatgtttgaataccagaccttgttagaggaaccacagtacggggagtag

SEQ ID NO: 25809 - DNA, 78 bp, synthetic construct
  source 1..78: mol_type = other DNA; note = Synthetic coding sequence
atggagctgcggtgcggcggcctgctgttcagcagccggttcgactccggaaacctggcccatgtcgaaaaagtgtag

SEQ ID NO: 25810 - DNA, 228 bp, synthetic construct
  source 1..228: mol_type = other DNA; note = Synthetic coding sequence
atggccagcgaggtgggccacaacctggagagccccgagacccccggtggcggaggatggacaagagttgaattcccacctcccgctcccaagggagctgccacagtgtggtgtcttaatcgacttggcagtcgcaagctttctctgatttggattacattcaacactggatggaacatgaagtcaaggttaataatcctgatccaacaagtctcttgccaccactag

SEQ ID NO: 25811 - DNA, 1620 bp, synthetic construct
  source 1..1620: mol_type = other DNA; note = Synthetic coding sequence
atggccaccagcgcccccctgcggagcctggaggaggaggtgacctgcagtatttgcttagactacttgagggacccagtcaccatagattgtggccacgtgttttgcagaagctgtaccacggatgttcgccctatctcaggttctcggcctgtatgtccactatgtaaaaagccatttaagaaagaaaatatccggcccgtctggcagcttgctagcctggtggaaaatatagaacggcttaaggtagacaagggcaggcagccaggggaagtgacacgggaacagcaagacgccaagctgtgcgagagacaccgcgagaagttgcattactactgcgaagacgacggcaaactgctttgcgtcatgtgtagggagtcaagagagcacaggccacataccgcagtgcttatggaaaaagcggcacaaccacatcgcgaaaagatacttaatcacttgtccacccttcgtcgtgaccgtgacaaaatacagggcttccaagccaaaggcgaggccgacattctggccgctcttaaaaaactccaggatcagcgtcagtacatcgtggctgagtttgaacaaggccatcagtttttgagggaacgagaagaacaccttttggagcagttagccaagctggaacaggaactgaccgaaggcagagaaaagtttaagtccaggggggtgggtgaattagcccgactagcccttgtaatcagcgagctggaaggtaaagctcagcagcccgccgcagagcttatgcaggacacacgtgactttttaaatcgctatccacggaagaagttttgggtgggaaaacccattgctagggtggtgaaaaaaaaaaccggcgagttcagtgacaagctcctttctctgcagagaggtctccgggaattccagggcaaactcctcagggatttggagtataagactgtatcagtgacacttgacccccaatccgcctccggttacctgcagctttccgaggactggaagtgtgtgacctacaccagcttgtacaaaagtgcctacctgcacccccagcagtttgattgcgaacctggagttctgggctccaaaggattcacctggggcaaagtgtactgggaagtggaagtagaaagggagggttggagtgaggatgaggaagagggagatgaggaagaggaaggcgaggaggaagaggaagaagaggaggccggatatggcgatggctatgacgattgggagaccgatgaagacgaggagtccctgggtgatgaggaagaggaagaagaggaggaggaggaagaggtgctggagagttgtatggtcggcgtcgctcgggacagcgttaagagaaagggggacctaagcttgcggccagaggacggagtatgggcccttagactgtctagctccggtatctgggccaacaccagcccagaggccgaactcttccctgcactgagaccaaggagggttgggatcgcattggactatgagggtggtaccgtgaccttcactaatgccgagtctcaggagcttatttacacattcacagcaacctttactcgccgtcttgttccgttcctgtggctgaagtggcccggcacacggctgttgctccggccatag

SEQ ID NO: 25812 - DNA, 390 bp, synthetic construct
  source 1..390: mol_type = other DNA; note = Synthetic coding sequence
atgcccggcctgagctgccggttctaccagcacaagttccccgaggtcgaggacgtggtgatggtaaacgtcagaagcattgctgagatgggggcatatgtctcactgttagagtataataatatcgaggggatgattctgctgagcgagctcagcagacgcagaatcagatccataaacaagctcatcaggatcggtagaaatgagtgcgttgtggtaattagggtggataaggagaaaggttatattgacctctccaagcgaaggttaactctttgggagacagagtccaacctgaggaacactgaacagagatttttggctgtgaatcctcgcctggaatcgtttcctgtcttgaagacttcaaagcttaatattttttatttttag

SEQ ID NO: 25813 - DNA, 1842 bp, synthetic construct
  source 1..1842: mol_type = other DNA; note = Synthetic coding sequence
atggccaccatccccgactggaagctgcagctgctggcccggcggagacaggaggaggcctcggtgagaggtagagagaaggccgaaagagagcggctgagccagatgccagcctggaaaagaggcttactggagcggcgcagggccaaactggggctcagccccggtgagccctcacccgtcctgggtacagttgaggctgggcctcccgatcctgacgaatctgccgtactgctggaagctattgggcctgtgcaccagaaccgattcatccgtcaagagaggcagcagcagcagcagcaacagcagcggtccgaggagctactcgctgagaggaaacctggccccctggaggctagggaaagaaggccgtcacctggggagatgcgcgaccagagccctaaaggacgggagtcacgtgaagagaggctttcaccacgcgagactcgggaaaggcggctgggaattggcggagctcaggaactgagcttacgccccctcgaggcccgtgattggcgacaatcccccggcgaggtgggagataggtctagcaggctgagtgaggcttggaaatggaggctgagtccaggcgaaacgccagaacggtccctgcgcttggcagagagccgggagcagtctccccgccggaaggaggtggaaagcagactgagtccaggagaatccgcttatcagaagctggggttgacagaggcccacaaatggaggccggacagcagggagagccaggaacagagtctggtgcagctggaagcgacagagtggaggctgcgatccggggaagaaaggcaggactacagcgaagagtgtggcagaaaggaagagtggcccgtccccggtgtggcccctaaggaaacagcggagctgagtgagacacttacgagagaggcccagggcaattctagtgccggggtggaagccgcagagcagagacctgtggaggacggcgagcgcggtatgaagcccacagaagggtggaagtggaccctgaactctggaaaggcaagagagtggacaccacgagacatcgaggctcagactcagaaacctgagccaccagagagtgccgagaagctgctggagagtcctggcgtggaagctggagaaggtgaggcggagaaggaggaggcaggtgcccagggcagaccactccgtgccctccagaattgttgttccgtaccttcccctttgccaccagaagatgctggcacaggcggtctccggcagcaggaagaagaagccgtggagttgcaacctcctccacctgcaccactgagcccaccaccgcctgctccaaccgctccacagcctccgggcgaccccctaatgtcccggcttttctacggcgtgaaagccggcccgggcgtaggagccccccgacgaagtggacatacgtttactgtgaacccgcggcgctccgtgccacctgcaacccccgccacccccacctcccctgctacggtggatgccgccgtcccaggggctggtaagaagagatacccaactgccgaagagattctggtcctgggcgggtatctccgtttaagccgatcctgcctggcgaaaggcagtccagaaaggcaccacaaacagttgaagatctctttttcggagactgccttggagactacctaccaatatccttccgagtcatccgtgctggaggagttaggtccagagcctgaagttccctccgctcccaatcctccagccgcacaacccgatgatgaggaggatgaggaggagctccttcttctgcagcctgaactgcagggtggacttcgaacgaaggccctcatcgtagatgaatcctgtcgacgctag

SEQ ID NO: 25814 - DNA, 1983 bp, synthetic construct
  source 1..1983: mol_type = other DNA; note = Synthetic coding sequence
atcgccaagccccagggcacctaccaggtgctgccccccaacaccggtagcctgtatattgacaaggattgttcagccgtgtactgtcatgagagcagcagcaatatttattaccccttccagaaaagagaacaattgagagcaggtagatacatcatgcggcatacatctgaggtcatctgcgaagttcttgatcccgagggcaataccttccaagtaatggctgacgggtcaatatccacaatcctgcccgagaaaaagctggaggacgacctcaacgaaaaaacagagggatatgattctcttagttccatgcatcttgagaagaatcatcagcagatttacggggaacacgttcccagattctttgtaatgtatgccgatggcagtggaatggagctgctccgagactccgatatagaagaatatctttctctcgcgtacaaggagagcaacactgtggtattgcaggagcccgtccaggagcaaccaggcactctgaccatcacagtcctacgaccattccatgaggcctcgccgtggcaggtgaagaaagaggacacaattgtgcccccaaatttacgatctcggtcatgggagacttttccttcagttgagaaaaaaacacctggccccccgtttggaactcagatctggaaaggcctgtgtatcgagtctaagcagctggtctccgcaccaggcgccattcttaagtcgccatctgtgttgcagatgcgccagttcatccagcatgaggtgataaagaatgaggttaagcttcgcctgcaggtgtccctgaaagactatatcaactacattctcaagaaagaggacgaactgcaagaaatgatggtcaaagacagcaggacagaggaggaacgcgggaacgccgccgatttgcttaaactcgtgatgtccttcccaaagatggaagaaaccacgaagagtcatgtgactgaagtggccgctcacctgacagatctgtttaaacagagtttggccactccccccaagtgtccccccgatacttttgggaaggattttttcgaaaagacctggcgacacacagctagctcaaagcggtggaaggagaagatagataagacccgcaaagagattgagaccacccagaactatctcatggacataaagaatcggattatcccacccttcttcaagagcgagctaaaccagctgtaccaaagccagtacaatcacttggattcactatctaagaagttaccaagctttacaaagaagaacgaggacgccaacgagactgccgtgcaagatacttcagacctgaacctcgatttcaagccacataaggtgtcagagcagaagagctcctcagtgccctcactgcccaagccagagatctcagctgataagaaagatttcactgcccagaaccagactgaaaacctgactaaatcgcctgaggaggctgagtcttatgagcccgtcaagatacctacccagtccctgctacaggatgtcgctggccagacacgcaaggagaaagttaagctccctcactacctgctgagttccaagcccaaatctcagccactggccaaagtgcaggattctgttggcggaaaggtcaatacatcatccgtcgctagtgccgccatcaataatgcaaaatccagtctgtttggattccacctgctcccttcatccgtcaagtttggcgttctcaaggaaggccacacttacgcgactgtcgtgaagttgaaaaatgttggagtggacttctgccgattcaaagttaaacaaccgccaccatccacaggacttaaagtgacatataagcctgggccggtggccgccgggatgcaaaccgagctaaacattgagttgtttgcgactgcggtgggcgaagatggggccaaagggtcagcgcatatctcacacaacattgagattatgactgagcatgaggtcctcttcctgccagtggaagctaacatcttgtag

SEQ ID NO: 25815 - DNA, 2475 bp, synthetic construct
  source 1..2475: mol_type = other DNA; note = Synthetic coding sequence
atgtacagcaacgaggacagccggcagaccatcgtgtacagcgaggagtccaacaccacgatgagctacacacagaagatcaccaacccattgccagctgcctcctctactgatcccgcaccatttgccaatattaacactcccgttctgcaagaagattataggcaggatagccaaacacggcgtatcagcactctaaagctgacacacaatcaggatttaggtagttcttcgcccatcagcacaccccagttcagcaagtccgtggaggtgccttcatttctcaaacggccaaggagcctgacaccaaatcctgtgccagagacccatactgcgtccctttccattcagatagcacctctgagtggccaggatctcgaaagtcacaaacagctaccagaactttcccccgagactgctaaaatccccctacagcaggagcgccagaagtccgcagtagctgcagcatcccagtcctctgactgtcgagtaagccagatcacagtgaacgggaacagcggcggggccgtgagtcctatgagttattaccagcgacctttttcccccagtgcatattcactgcctgccagcctgaactccagcattgtcatgcagcacggcacttcattggactctacagacacctaccctcaacatgcgcagtctttggacggaaccacatcttcttccattcctctataccgctcttccgaagaagagaagcgcgtgaccgtgatcaaggcaccacattaccccgggattggtcctgtcgacgagagcggaattcctaccgccatacgtacaaccgttgaccgcccaaaggattggtataagaccatgttcaagcagatccacatggtacataaaccggacgacgacacagacatgtataacaccccctacacctacaacgctggactctacaaccctccctactcagctcagtctcaccctgcagcaaagacacagacctatcgccccctaagcaagtcccacagcgacaattctccgaatgcgttcaaggacgcctcatccccggtgcctccacctcatgttcctcctccagtgccaccgctgagacctcgtgatcggagcagcaccgaaaagcacgactgggatcctcccgaccgcaaggtagatacgaggaagttcaggtctgaaccacgctcaattttcgagtacgagcctggaaagtctagcatactgcagcatgaacgccccccacccctacctactaccccgacaccagtcccacgggagccggggaggaaacctctctcttcgagtcgccttggtgaagtaactggctctccaagtccgcccccacgcagtggtgctcctacacccagctcacgagccccagcactgagtcctacgcgcccacccaaaaaaccattggactacgtgcaggaccattcctcaggcgtctttaatgaagcatcactttatcagtcaagcatcgatagatccctggagcgtcctatgtctagcgcatcaatggcctccgatttcaggaagagaaggaagtccgagccagccgtcggaccccctaggggactaggagaccagtctgcctctcggacatcccccgggagagtcgatctgccagggagcagcaccaccttaaccaagtcatttactagtagtagtccctcctctcctagtagagctaaagacagggaaagtcctaggtcttacagctcaacacttactgacatggggagaagcgcccctagagagcgaaggggaactccagagaaagagaaactcccagctaaggccgtctacgatttcaaggctcaaacaagtaaggagctgtcattcaaaaaaggcgacactgtttatatcctcagaaagattgaccaaaactggtatgagggcgaacatcacggccgagtaggtatttttcctatctcgtacgttgagaagctcacacctccggaaaaagcgcagccagcgaggccaccgcccccagcacagccaggtgagattggggaagctatcgctaagtacaacttcaacgccgataccaacgtcgaactctccctgagaaagggcgatagagtcatcctccttaaaagagttgatcagaattggtacgaaggtaaaatacctggcacaaacagacagggaattttcccagtgtcctacgtcgaggtagtgaaaaaaaatacaaaaggagccgaagactacccagaccctcctataccccattcatactcttcagataggatccactcgctgtcctcaaacaaaccccagcgccccgtcttcacacacgaaaacatacagggaggcggcgaaccattccaggctctctataactatactccaaggaatgaggatgaactcgaattgcgcgaaagcgacgtgatcgacgtcatggagaaatgtgacgacggttggttcgtgggtacgtcaaggaggacaaagttcttcggtacgtttcctggcaactacgttaagagactttag

SEQ ID NO: 25816 - DNA, 228 bp, synthetic construct
  source 1..228: mol_type = other DNA; note = Synthetic coding sequence
atgcggtactacggcagctactaccggggcctgggctacggctgcggcggcttcggagggcttggctacggctgcgggtgcggcggctatagatacggaagcggttacgggggatatcgctatggctgttgcaggcccagttgcagagaaggatacgggttctcagggtttaagaagctcgcagacagtcataccttgaccccccggtcttgtccctacgcttcatag

SEQ ID NO: 25817 - DNA, 183 bp, synthetic construct
  source 1..183: mol_type = other DNA; note = Synthetic coding sequence
atggtgctgatcctgggccggcggctgaaccgggaggacctgggcgtgcgtgatagccccgccaccaaacgcaaggttttcgaaatggatcctaagtcactaacagggcacgaattctttgatttctcctcaggatctagtcatgcggaaaatatcctccagatcttcaacgaattccgttag

SEQ ID NO: 25818 - DNA, 600 bp, synthetic construct
  source 1..600: mol_type = other DNA; note = Synthetic coding sequence
atgaagctgggcaagaagcccatgtacaagcccgtggacccctactcccgcatgcaaagcacatataactataacatgaggggaggggcctaccctcccagatatttctacccatttcctgtcccaccattgctttaccaggtagagctctcagtcggggggcagcaattcaacggtaaagggaagactaggcaggctgccaagcacgacgctgccgctaaggctcttaggatcctccagaacgaacctcttcctgagagactggaggtgaatggacgggagtcagaagaagagaacctgaacaagtccgaaatttcccaggtattcgagattgcactcaagaggaatctgcccgtgaattttgaatcctttccgctgaaacaagttgccagagaaagcggtcctccccacatgaagaattttgtaacaaaggtgagtgtcggggagttcgttggtgaaggcgagggcaagtctaagaagatcagtaagaagaatgctgctattgcagtcttagaagagctgaaaaaattgcccccactgccagcagtcgagcgcgtcaaaccaagaattaaaaaaaagacaaagcccatcgtcaagtag

SEQ ID NO: 25819 - DNA, 2685 bp, synthetic construct
  source 1..2685: mol_type = other DNA; note = Synthetic coding sequence
atgcccgagcagttcagcgtggccgagttcctggccgtgaccgccgaggacctgtcatctccagctggagcggccgcattcgcggctaagatgccgaggtatcgtggagccgcgctcgcccgagaggagatcctggaaggggatcaagctatcctacaaagaatcaaaaaggctgtccgggccattcactcttccggccttgggcatgttgagaatgaagaacagtatagggaggccgtggagtctctgggtaatagccacctgtcacagaacagtcacgaactttcgacaggcttcctaaatctagccgtgtttacaagagaggtagctgcgctgtttaagaacttaattcagaatctcaacaatatagtgtctttcccgctcgactccttgatgaaaggccaactcagggatggtcgacaagcgagcctgagtctgggttctagagcgaagctagaaaaggagagggaccgtgcccgagtcacaggtggtatccccggggaagtagcacaggatatgcagagggaacgtaggatttttcagctgcacatgtgtgagtatttactgaaagctggcgaaagccagatgaaacagggtcccgacttccttcaaagcttaatcaagttctttcacgctcaacacaatttctttcaggatggatggaaggctgcccaaagcctcttcccgttcatcgagaagctggccgcttccgtacacgcccttcatcaggcccaggaggacgaactccaaaagctgacgcagttgcgagattcgctgcgtgggactcttcagctggaaagccgcgaggagcatctatctcggaagaacagtggatgtggttactccatacaccaacatcaggggaataaacaatttggtaccgaaaaagttggttttttatataagaaatccgatgggatccggagggtgtggcaaaagcgcaagtgcggggtgaagtacggctgtctgactatcagtcactccacgataaatcgtcccccagtcaaactcactctgctgacttgccaagtccgccctaatcccgaagagaaaaagtgctttgatctggtcacgcacaatcgtacatatcattttcaggcagaggacgagcatgaatgcgaggcctgggtgagcgtgctgcaaaatagcaaagatgaagcgctcagttcggcatttctaggggagccctctgcggggcctggatcctggggctcagcagggcacgatggcgaaccacatgacctgaccaagcttcttattgctgaggtaaaaagcagaccaggtaatagtcaatgctgcgattgcggagcagctgacccaacctggctgtctaccaatctgggagtgctcacatgcattcagtgtagcggcgtgcatcgagagctgggcgtccgcttcagtagaatgcagtccctcactctggatctgcttggacccagcgaattacttctggcactcaacatggggaatacctcctttaatgaagtgatggaagcccagctgccctctcatggcggaccaaagccatcggccgaatctgacatgggtactagaagggactacatcatggccaagtacgtcgagcacaggttcgccagacgttgtactcccgagccacagagactgtggacggcgatctgcaatagggatcttctgtccgtgcttgaggcatttgctaacggacaggatttcggacagcctttaccgggtcccgacgcccaggccccggaggaacttgtccttcacctggccgtcaaagtagcaaatcaggcaagcctcccattggttgattttattatccagaacgggggccacttagacgccaaggccgcggacgggaacaccgcattacactacgctgccctttataaccaacccgactgcctgaagttgttgctgaagggccgggcccttgtgggcacagttaatgaagctggcgaaacggctttggacattgcacgaaaaaagcatcacaaggaatgtgaggaactgctggagcaagcccaggcagggacctttgcattccccctgcatgtggactatagctgggttattagcacagagccaggaagcgattccgaggaggacgaggaggagaaacgctgcctgctcaaactgcctgcccaggcacactgggcatccggacgactcgatattagcaacaagacctacgagacagtggcgtccctgggcgcagccaccccccaaggggagtccgaagactgtcctccgccactgcccgttaaaaactctagtcggactttagttcagggctgtgcacggcatgcctcgggtgacaggtccgaagtcagctctctctcctccgaggcccctgagacccccgaatcactgggaagtcctgctagctcctccagtctgatgtctccactggaacctggtgacccctctcaggctcctccaaactccgaggaagggctgagagagccccccggaaccagcagaccatcactcacatcagggaccaccccatctgagatgtacttacccgtccgtttcagttccgaaagtacaaggagctaccggcgcggagcgcgctccccagaagacggacccagtgcccggcagcccttgccccgcagaaacgtgcccgttggcattaccgagggggacggaagccggacgggatctttgccagccagcagcgttcagttactacaagactag

SEQ ID NO: 25820 - DNA, 354 bp, synthetic construct
  source 1..354: mol_type = other DNA; note = Synthetic coding sequence
atggccttcagcggccgggcccggccctgcatcatccccgagaacgaggagattcccagggcggcgcttaacaccgtccacgaggctaacggaacagaggacgaacgagccgttagcaaactccagcggagacactccgacgtaaaagtttataaagaattctgtgacttttatgccaaattcaacatggcaaacgcactggccagtgctacatgcgaaagatgtaaaggtggatttgcaccagccgaaaccattgtcaattcaaatggagagttgtaccacgagcagtgcttcgtgtgcgcccaatgttttcaacagtttccagagggactgttctacgaggagagaacttag

SEQ ID NO: 25821 - DNA, 1797 bp, synthetic construct
  source 1..1797: mol_type = other DNA; note = Synthetic coding sequence
atgttcgtgagcgacttccggaaggagttctacgaggtggtgcagagccaaagagtccttctgttcgtcgcctccgacgtggatgcgttatgcgcctgcaaaattttacaggcattgttccaatgtgaccatgtgcagtacacactcgtgccagtgtcaggatggcaggagctggagaccgccttcctggagcataaggagcaatttcattattttatactcatcaattgtggagccaacgttgaccttctggacattcttcaaccagacgaggacacaatctttttcgtctgcgacactcatagacctgtcaatgttgtgaacgtgtacaacgatactcagattaaactgctcatcaaacaggacgacgatttggaggtgccagcttacgaggatatcttcagagatgaggaggaagacgaagagcactccgggaacgattctgatggaagcgagcccagtgagaaacgtacacgcctggaggaagagatcgtcgaacagaccatgcgccgacgacaacgcagggagtgggaggcccggtccgggtccggaagcgaacctgtggctgcggctctggagaaatctagcaggttgtttgccgggccaatgtctgacagaacagccccgaggagtccaagacgtgacatcctgttcgactatgaacagtacgaataccatggcacttcaagcgctatggtaatgttcgagttggcgtggatgttgagtaaggacctcaatgacatgctctggtgggccattgtcggtctcaccgaccagtgggtgcaggataagatcactcagatgaagtatgttactgacgtgggagtgttgcaacggcacgtgtcaagacacaaccaccggaatgaagatgaagagaacaccctgagcgtcgattgcacacgcatcagcttcgaatatgacctgcgtttggtactgtatcagcattggagcctgcatgactccttgtgtaacacgtcctacacagccgccagatttaaactgtggtcagtgcacggccagaagcggctccaggaatttctggccgacatgggccttccactaaagcaagttaaacaaaagttccaggccatggacatttccctcaaagagaatctcagggagatgatcgaggaaagcgccaacaagtttggtatgaaggacatgcgagtgcagactttctccattcattttggttttaagcacaaattcctggcttcagatgttgtgttcgctacaatgagtctgatggaaagccccgagaaagacggcagcggcaccgatcatttcattcaggccttggactccctgagtcgttcaaatctcgataaactgtaccatggactggagctggctaaaaagcagctgcgcgcaacacagcagacgatcgcttcttgcctgtgtactaacttagtcataagtcagggcccatttttgtactgcagcctgatggaaggaacccctgatgttatgttgttctcccggcccgcatccctgtcgctcctgagcaagcatctccttaaatcttttgtatgcagcaccaaaaacaggagatgcaagttgttacccttggtgatggctgcgccgctgagcatggagcatggtaccgttactgtcgtgggtattccaccagaaactgattcatcagatcggaaaaactttttcgggcgcgcctttgagaaagccgcggagagcacctcttcacgaatgttacacaaccattttgatctatcggttatcgagctgaaggcagaggataggagcaagttcctggacgccttgattagccttctaagctag

SEQ ID NO: 25822 - DNA, 2994 bp, synthetic construct
  source 1..2994: mol_type = other DNA; note = Synthetic coding sequence
atgcccagcgagaagaagatcagcagcgccaacgactgcatcagctttatgcaagcaggctgtgaattgaagaaagtgcgccctaacagcaggatatataaccggttcttcactctcgacacagatctgcaggcccttcgctgggagccttccaagaaggacctggaaaaggccaagttagacatcagcgctattaaggagattcgccttggcaagaacacggaaacttttcgaaataatggcttagcggaccagatttgcgaggattgtgcgtttagcattctgcacggtgaaaactacgagtcgcttgacttagtcgccaacagtgcagacgtcgctaacatctgggttagcggcttaaggtatctggttagtaggtctaaacagccgctggacttcatggagggaaaccagaatactccccggttcatgtggctgaaaactgtctttgaagctgcagacgtggacggaaacgggattatgctggaggacacaagtgtagaattgattaaacagctgaacccaacactgaaggaagcaaaaatcagactaaagtttaaggaaatccaaaagtcgaaagagaaactcacaacaagagtgaccgaagaagagttttgcgaggccttttgcgagctctgtacccgtcccgaggtttacttcctgctagttcaaatctctaaaaataaggagtatttagatgcgaacgatctgatgctcttcctggaggccgaacaaggggtgacccatattaccgaggacatctgcctggatataattcgacgatacgaactgtccgaggaaggccgccagaagggattcttagcgattgatggttttacccaatatctgcttagttccgaatgtgatatctttgatcctgagcagaagaaggtggcacaggatatgacccagcccctgtcccattactatattaatgccagccataacacgtaccttattgaggaccaattcagaggccctgccgacattaatggttatattcgagcactgaagatgggctgccgctctgtcgaactggacgtgagtgacggcagcgacaacgagcccattctttgcaatcgcaacaacatgacaacgcatgtgtcctttcgctctgtcatcgaagtaattaataagtttgctttcgttgcaagtgagtatcccctgatactttgtcttggcaatcactgttctttgcctcagcagaaggtaatggcgcagcagatgaaaaaggtatttggaaacaagctttacaccgaagctcctctgccatccgagagctatctgccttcacccgaaaagttgaagcgaatgatcatcgtgaaaggaaagaaactcccaagcgatcccgatgtactggaaggtgaagtgaccgatgaagacgaggaagcagaaatgagccggaggatgtctgtggattacaatggtgaacagaagcagatccggctgtgcagagaactgtctgatctcgtgtcgatttgtaaaagtgttcaatatagggactttgaactgtctatgaaaagtcaaaattactgggaaatgtgcagttttagcgaaacggaggctagcaggattgcaaacgaatatcccgaggattttgttaactacaataaaaaatttctctcccgtatatatccttccgcgatgagaatcgactcctctaatttgaatccacaggatttttggaactgtggctgtcagatcgtggccatgaattttcagaccccgggccccatgatggacctgcacacagggtggttcctgcaaaacggcggatgcggatacgtgctgcgccccagcattatgagggacgaagtatcgtacttctctgccaacactaagggcatcctgcccggtgtgagtccactggcacttcacattaaaattatttccggccaaaatttccccaagccaaaaggtgcttgtgccaagggggacgtcattgatccctacgtctgtatcgaaatccatggaattccagcagactgcagtgagcaacgtaccaaaactgttcagcagaactcagataaccccatcttcgatgaaactttcgaattccaggtgaatctcccagaactcgcaatgattaggttcgtggttcttgatgacgattacatcggtgatgaatttattgggcaatacaccattccctttgaatgtctgcaacccggatatagacatgtgcctctgcgctccttcgttggcgacattatggagcacgtcactcttttcgttcatatagcaataacaaacaggtccggcggtggcaaagcgcaaaaacggagcctttcagtgaggatgggcaagaaagtgcgggaatatacaatgctccgcaatatcggtttgaagaccatagacgatattttcaaaatcgcagttcatcccttgagagaggcaatcgacatgagagaaaacatgcagaacgccatagtcagcatcaaagagctttgtggtttacctccaatcgcctcattaaagcagtgccttctgacgctcagttcgcgcttgataaccagcgataacactcccagcgtttcactcgtcatgaaagacagcttcccttatttagagccattgggggctatccccgatgtccagaaaaagatgctgactgcgtacgatctgatgattcaggagtcacggtttcttattgaaatggcagatacggtccaagaaaaaattgtgcagtgccaaaaagccggaatggaatttcacgaggagctgcacaacttgggtgctaaagagggcctgaaagggagaaagctgaataaggcgaccgagtcattcgcatggaatataaccgtcctgaagggacagggggacttgctgaaaaatgccaaaaacgaggcaatagaaaacatgaagcagatccaattagcctgtttgtcgtgtgggctgagcaaagctccctcaagttccgccgaggccaagtcgaagcgttcacttgaggccatcgaagagaaagagtcctcagaagaaaacgggaaactgtag

SEQ ID NO: 25823 - DNA, 612 bp, synthetic construct
  source 1..612: mol_type = other DNA; note = Synthetic coding sequence
atgcggaacggcgacttcctgcccacccggctgcaggcccagcaggacgccgtgaacatcgtgtgccacagcaagactaggtcgaatccggagaacaatgtgggtcttatcacacttgccaacgattgcgaggtattaactacacttactcctgatacgggacgcatattatctaaactgcacacggtgcagcccaaaggaaaaattaccttttgtacaggcatacgagttgcccacctggccctgaaacaccggcaggggaaaaatcataagatgcggatcatcgcctttgtgggatcaccagtcgaggataacgaaaaagatttggtgaaacttgccaagcgactgaaaaaagagaaggtgaatgtggatattatcaatttcggggaagaggaagtgaataccgaaaagctgacagcgttcgtgaatacattaaacggaaaagatggcaccggatcccacctggtgaccgtgccaccgggtccttctctagctgacgccctaattagttcgcctattctggctggcgagggcggcgccatgctggggttgggagcctctgactttgaattcggcgtggatccttcagcagacccagagctggctctgtag

SEQ ID NO: 25824 - DNA, 429 bp, synthetic construct
  source 1..429: mol_type = other DNA; note = Synthetic coding sequence
atgagcatcagcagcgacgaggtgaacttcctggtgtaccggtaccttcaagaaagtggatttagccatagcgcgtttacgtttggcattgagtcacacatctcacaatctaacattaacggtgcactggttcctccagctgcgctgatcagcatcatccagaagggactacagtacgtagaggcagaagtctccatcaatgaggatggcactctctttgacggtcgacccatcgagagcttgtcgttaatcgacgcagtgatgccagacgtggtgcagactaggcaacaagcttaccgggacaaactggctcagcaacaagctgcagccgccgctgccgctgcagctgcggcctcccagcagggcagcgctaagaacggagagaacacagctaatggtgaggaaaatggagcccatactattgcttag

SEQ ID NO: 25825 - DNA, 1410 bp, synthetic construct
  source 1..1410: mol_type = other DNA; note = Synthetic coding sequence
atgtgcagcctggccagcggcgccaccggctacagccacctgctgaaaaagcatttccacactgtctccctgtctattagcctgattctgacagcctggttcatcaacatgaacccaactgtggaatacatgaactctatatacaatcctgtaccctgggagaaagaagaataccttaaacccgtcctggaggacgacctcttgcttcagtttgacgtggaggacttatatgaacctgtcagcgtgcctttcagctaccctaacggcctttcagaaaatacaagcgttgttgagaaactaaagcacatggaggcacgtgcgctatctgctgaggcagccctggcccgggcccgcgaagacctgcagaagatgaaacagtttgcccaagatttcgttatgcacacggacgtgcggacctgctcttccagtacctccgtaatcgccgatctccaggaggacgaagacggggtgtacttctctagctacggtcactacggcatccatgaagagatgctgaaggataaaatccgcaccgaaagctacagagattttatttatcagaatcctcatattttcaaggacaaggtcgtcctggacgtggggtgcggaactggaatcttgtccatgtttgctgctaaggccggcgctaaaaaagtgttaggagtcgatcaatccgagattctttatcaggcaatggacatcatcagacttaataaattggaggacaccatcaccctcattaaaggcaagattgaggaggttcatttgccagtagagaaggtagatgttattatttcagagtggatgggttatttcctgctttttgagtccatgctggactctgtcttgtatgctaagaataagtacctcgccaaagggggatccgtgtatccggacatatgcaccattagcctcgtcgccgtctcggacgtcaacaaacacgctgacaggatcgctttctgggacgacgtatacggcttcaaaatgtcatgtatgaaaaaagcagttatccctgaagccgtggttgaagtgctggaccccaagaccctgatcagtgaaccctgcggaattaaacatatcgactgtcatacaacctctatctcagacctagaattttccagcgactttactttaaaaataactcgaacttccatgtgcacggcaattgccggctacttcgatatttattttgaaaagaactgccataatcgcgttgtcttcagtactggaccacagtctacaaagacgcactggaagcagacagtcttcctcctagaaaagcctttcagcgtgaaggcaggcgaggctctaaaggggaaagtcaccgtgcataagtcgaaaaaggatccccggtccctaactgttaccttaacgcttaataactcaacccagacttacggactgcagtag

SEQ ID NO: 25826 - DNA, 525 bp, synthetic construct
  source 1..525: mol_type = other DNA; note = Synthetic coding sequence
atggccagcgccggcacccagcactacagcatcggcctgcggcagaagaactccttcaagcagagcgggccttccggcactgttccagccaccccacccgaaaagcccagtgagggtcgagtgtggcctcaggcccaccagcaagtgaaacctatctggaaactcgaaaaaaagcaggtggaaacgctctctgctggacttgggccaggtcttttgggggtccctcctcaaccagcttacttcttctgcccttccaccctctgttcgtctgggaccaccgctgtcatcgccggacacagcagtagttgctatctgcatagtttgccagacctgtttaattccaccctgctctataggaggagtagttatagacagaaaccctaccaacagctggagtccttttgtcttcggtcatctcctagcgaaaagagccctttcagcttgcctcagaagagtttacctgtgtcccttaccgccaacaaagccacaagctcgatggtcttttcaatggcacaaccgatgtag

SEQ ID NO: 25827 - DNA, 1572 bp, synthetic construct
  source 1..1572: mol_type = other DNA; note = Synthetic coding sequence
atgcagaaggagcgggagctgcaggagaccatctacttcaagaacacttggccggcatgcatgttcctcatcgttgcccccttgtctgttctgtataactggaaggacgaacttgacacatggggctatttccgggtcactgtcctccacggcaaccgcaaggacaatgaactgatccgagtgaagcagcgaaaatgcgaaatagccctcacaacctatgaaacgctgcgcttatgtcttgacgagctgaatagtctggagtggagcgctgtgattgtcgatgaggcgcacagaatcaaaaaccccaaggctcgcgtgactgaggtcatgaaggcccttaaatgtaatgtgaggattggtctaactggcaccatcctgcagaataacatgaaagagctttggtgtgtcatggactgggccgtccctgggctcttgggatctggtacctattttaagaaacaatttagcgatcccgttgagcacggccagagacacaccgccacaaagcgggaactggccacggggcggaaggcgatgcaacggttagccaagaagatgtctggttggtttttaagaagaacaaagactcttattaaggatcagctgcctaagaaggaggataggatggtatactgctcgctgaccgatttccagaaggctgtgtaccagactgtgctagagaccgaagatgtgacgctgatcctgcagtcctcagagccttgtacctgccgcagtggacagaagcgcagaaactgttgttacaagaccaactcacacggcgagacagtgaaaacactttacctgtcgtacctcacggttttgcagaaggtggccaatcacgtagcactgctacaggctgcttccacctcaaagcagcaagagacattgataaagaggatctgcgaccaggtattcagcaggtttcccgacttcgtccaaaaatctaaagacgccgcctttgagacactcagcgatcctaaatactcgggcaaaatgaaagtcctgcagcagctgctgaaccactgtaggaagaacagagacaaggtcttacttttttcattcagtaccaagctccttgatgtcctacagcagtattgcatggccagcgggcttgactatagacgcttagacggctccactaaaagcgaggagcggctcaaaatcgtaaaagagttcaactcaacacaggatgtcaatatatgtctggtgtccactatggccggcggcctcggtcttaacttcgtgggagctaacgtggtggtgctgtttgacccaacatggaaccctgccaatgacctacaagcgatagacagggcctacaggatcggacaatgtcgagatgtgaaggtgctgcgactgatcagcctgggtaccgtggaagaaatcatgtacctgaggcagatatacaagcaacagctccactgtgtggtggtcgggtctgaaaatgcaaaacgctacttcgaggcagtccagggaagcaaggagcatcagggtgagctgtttggtatccacaacttattcaagtttagaagtcagggaagctgtctgacgaaggacattctggaggtttag

SEQ ID NO: 25828 - DNA, 1179 bp, synthetic construct
  source 1..1179: mol_type = other DNA; note = Synthetic coding sequence
atgggcaccacctgcctgcacctgggcaccctggagcagagcctggtattcgaaaataaagtgaatagtgagaaggtgaagctttctctccgcaatttccctcataacgactacgaagatgtatttgaagagccctcggaaagtggctcagacccttctatgtggacagcccgcggcccatttcgccgtgaccgatggagctcagaggatgaagaggcagcagggcctagccaggcattatcaccccttctgtcagacacgcgcaaaattgttagtgagggcgagctggaccagcttgcacagatccggccactcatcttcaatttccacgaacagaccgctatcaaagactgtctgaagattctcgaagaaaagacagccgcttatgacattatgcaggaatttatggccctggaactgaagaacctacccggagaattcaacagcggcaatcagccttctaaccgggaaaaaaaccggtaccgcgatattctgccctatgattctacacgggtacccctgggtaaatctaaggattatatcaatgccagttacattaggattgtcaactgcggcgaggagtatttttatattgcaacccaagggcccctgctatcaacaatcgacgatttctggcagatggtgctggagaataattctaatgtcatagccatgataactcgcgaaatcgaaggaggaatcatcaagtgctatcattattggcccatcagcctgaaaaagcctctcgagctgaaacacttccgggtgttcctcgaaaactaccagatcctgcaatatttcattattaggatgttccaagtggtagagaaaagcacagggacatctcattccgttaagcaactccaatttacgaagtggccagatcatgggacccctgcatctgcagatagtttcatcaagtacattagatatgctcgaaagtcacacctcacgggcccaatggtggtgcactgttctgccggtatcggacggacaggcgtttttctgtgcgtggacgttgtgttttgtgccattgtcaagaactgttccttcaatattatggatatagtcgctcagatgagagagcagaggtctggaatggtgcaaaccaaagaacaatatcatttttgctatgatattgtcctggaagtgctccgtaaactgctgactctggattag

SEQ ID NO: 25829 - DNA, 1566 bp, synthetic construct
  source 1..1566: mol_type = other DNA; note = Synthetic coding sequence
atggagcagagcagcctgtacttctgggacctgctggagggcagcgagaaggcagtcgtgggaacaacttacaagcatttgaaggatctcctttcaaagctcttgaactcaggatactttgagagcatccccgtccccaagaacgcaaaagagaaagaagtgcccctggaagaggagatgctaattcagtctgaaaagaagacccaactctctaagaccgagagtgtgaaagagtcagaatccctcatggaatttgcacagccggagattcaaccacaggagtttcttaatcgcagatacatgaccgaagtagattatagcaacaagcagggcgaggaacaaccctgggaagccgactacgcacggaagccaaacttgccaaaaaggtgggatatgcttaccgagccagatgggcaggaaaagaagcaagagtcctttaagtcctgggaggcttctggaaagcaccaggaagtatccaagccagcggttagtctggagcagcggaaacaggatacctctaagctcaggagtacattaccagaggagcagaagaaacaggagatcagcaagtctaagccgagcccatcacagtggaaacaggacacgccgaagtcgaaagctggatatgtgcaggaagagcaaaaaaagcaggagactccaaagctgtggcctgtccagctgcagaaggaacaggacccaaagaagcagactcccaagtcatggacaccctctatgcagagtgagcagaacacaaccaagtcttggacgacaccaatgtgtgaggaacaggattctaaacagccggagaccccgaagtcctgggagaacaacgtggagagccagaagcatagcctgacttctcagagccagatcagccccaagtcatggggcgttgccaccgccagtctgatccccaatgatcagctgctaccccgcaagttaaatactgagccaaaagatgtgcccaagcctgtgcaccaacccgttggcagttctagcaccctgccaaaggatcccgttctgcgaaaagaaaagcttcaggacctgatgactcaaatacaagggacctgcaatttcatgcaggagtctgtcctcgattttgataaacccagtagcgccatcccgacctcacaaccaccctccgcaacaccaggaagtcccgtcgcaagcaaggaacagaacctgagctctcagtctgacttcctccaagagccactgcaggccgcaattccacccgggaaacagccatcttcattggcatctcccaatcccccaatggccaaaggatccgagcaagggtttcagagccctcctgccagttctagcagtgtgacaatcaacacagcgcccttccaagccatgcaaacagtgttcaacgtgaatgctcctctgcctccgcgaaaagaacaagagattaaggagtctccatacagcccgggctacaaccagagtttcactacggcttccactcagacacctcctcagtgtcagctgccttcaatacatgttgaacagacagtccacagccaggaaaccgcccccgggaaccatcattcaacattctag

SEQ ID NO: 25830 - DNA, 480 bp, synthetic construct
  source 1..480: mol_type = other DNA; note = Synthetic coding sequence
atggccaccagcgcccccctgcggagcctggaggaggaggtgacctgctcgatctgccttgactacctaagagaccctgttaccatcgattgtggccatgtattctgccgatcttgtaccaccgatgtgaggcctatttctggatccagacctgtctgccccctgtgtaagaaacccttcaaaaaggagaacatacggcctgtgtggcagcttgaaaagatcctcaaccacctgtctactctgagaagagatagagacaagatccaaggcttccaggccaaaggtgaagctgatattcttgccgcactgaagaaactgcaagatcagcgccagtacatagtggctgaattcgagcaggggcaccagttcctaagggagagggaggaacatcttcttgagcaactcgccaagctcgaacaggaattaactgagggcagagaaaaatttaaatcccgtggcgtcggcgaactcgctagatag

SEQ ID NO: 25831 - DNA, 270 bp, synthetic construct
  source 1..270: mol_type = other DNA; note = Synthetic coding sequence
atgagcgagcagggcgacctgaaccaggccatcgccgaggagggcggcacagagcaagaaactgcaacacccgaaaacgggattgttaagtctgagagcttggacgaggaagagaagctggagctgcagcggcggctagaggcccagaatcaagaacggaggaagtcaaaatcaggggcgggtaagggcaaactgacgcgctcccttgcagtgtgcgaggaaagctctgctcgccctgggggcgaatcgctgcaggaccagactctctag

SEQ ID NO: 25832 - DNA, 1356 bp, synthetic construct
  source 1..1356: mol_type = other DNA; note = Synthetic coding sequence
atggccgagggcgcccagccccaccagcccccccagctgggccccggggcagcagctcgaggcatgaagagagagagcgagctagagctgccagtgccaggcgccggcggagacggcgcagatccagggcttagtaagcgcccccgtacagaagaggctgccgctgacggagggggaggaatgcagaacgaacccctgacaccaggctaccacgggttcccagcccgggactcccaggggaaccaggagccaaccaccacgcccgatgcaatggtacaaccttttaccacaatccctttccccccacccccccaaaatggcattcccaccgaatacggggtacctcacacacaggattacgcaggccagaccggcgaacacaatctgacattgtatggcagtacacaagcgcacggagaacaatcgtctaacagcccttccacccaaaacggctcactcactcagaccgagggcggggcccaaactgatggccagcaatctcaaacgcagtcaagcgaaaattctgagtctaagagtacacctaagcgactacatgtgtccaacattccttttaggttccgagatccagacctgcgccagatgtttgggcagttcggtaaaattctagacgttgagataattttcaacgaaagaggttctaaagggttcggattcgtgactttcgaaaacagtgctgacgctgatcgggccagagagaagctgcacggcaccgtagtggaggggaggaagatcgaagtgaataacgctaccgcaagagtgatgactaacaagaaaatggttaccccatacgcgaacgggtggaaactgagtccagtggtcggtgccgtctatgggcccgagctctacgccgcaagctcctttcaggcagacgtgagcctggggaatgacgccgccgtacctctttcagggcgtggcggaataaatacatatatccccctcatcagcctccccttagtgcctggttttccataccctactgccgcgactaccgctgccgcatttagaggcgcccatctgagaggaagagggcggaccgtgtatggcgccgtgagggccgtcccccccacggcaatccccgcataccctggggtcgtatatcaagatggcttttatggtgcagacctttatggcggctacgccgcctatcgctatgctcaacctgcgaccgccacagcagctaccgcagcagccgcagctgccgcagcttactccgacggctacgggcgtgtgtacaccgccgacccctaccatgcactcgcaccggctgcctcctatggcgtgggagccgtcgctagcctctataggggtggctacagtagattcgctccatactag

SEQ ID NO: 25833 - DNA, 855 bp, synthetic construct
  source 1..855: mol_type = other DNA; note = Synthetic coding sequence
atgttcagccggcggagccacggcgacgtgaagaagagcacccagaaggtgctggaccccaagaaagacgtcttgacccgcctgaagcacttgagagctctactagataacgtcgatgctaatgatcttaagcagttcttcgagacgaactattctcaaatctactttatcttttacgagaacttcatcgctctggaaaattcgctgaaactcaaaggtaacaacaagagccagcgggaggagctggattccattctgttcctgttcgaaaagatcctccagttcttgccggagcgcattttcttcaggtggcactaccagagcattggctctacactgaaaaaattgctccacacaggtaattcaatcaagattcgatgcgagggaatacggctgtttctcctctggttacaggcattacagaccaactgtgccgaagagcaggtacttatctttgcatgtctggttcctgggtttccagcagtgatgtcctccagaggtccttgcaccctcgaaacactcatcaacccttccccttcagtcgcggacgtaaagatttaccccgaagaaattacgcctctgctccctgctatctccggcgaaaagattgcagaggaccagacgtgcttcttcctccagatccttctgaagtatatggtgatccaggctgccagcctcgagtggaaaaacaaagaaaatcaggacactggatttaaattcctgttcactctgtttcgaaagtattacctgccgcacctgtttcctagctttaccaagctcacaaacatctacaagccggttttggatatcccgcaccttcgacctaaacctgtgtatatcactaccacccggtag

SEQ ID NO: 25834 - DNA, 846 bp, synthetic construct
  source 1..846: mol_type = other DNA; note = Synthetic coding sequence
atgggcgacaccgtggtggagcccgcccccctgaagcccaccagcgaaccaacgagtgggccccccggaaataatggcgggtccctcttatctgtcataacggagggcgtcggcgaactgagtgttattgacccggaggtggcacaaaaagcctgccaggaagtcctcgagaaggtcaaattattgcacggcggcgtggctgtgtcctcaaggggaacaccattagaattagtcaatggcgacggcgtggacagcgagattagatgtctcgacgatccccctgcccagatcagagaagaagaggacgaaatgggggccgccgtggccagcggtacggccaagggcgcccggagaaggcgccagaacaatagcgcgaaacagagctggttgcttcgtctctttgaatccaaactcttcgacatttcaatggcaattagttacctgtataactccaaggagccaggtgtgcaggcctatattggcaataggttgttctgctttcggaatgaggacgtggacttttatctgccacagctcttaaacatgtacatccacatggacgaggatgtaggcgacgcgatcaaaccctacatcgtgcacaggtgcaggcagagtattaacttttcactgcagtgtgcattactgttgggggcctatagttccgacatgcatatctcgacacagcgtcacagcagggggactaaacttaggaaacttattctctccgacgaacttaaaccggctcacaggaagcgcgaattaccatccttgagccctgctccggatacaggactcagcccctctaaaaggactcaccaacggagcaaatctgacgccacggcgtag

SEQ ID NO: 25835 - DNA, 591 bp, synthetic construct
  source 1..591: mol_type = other DNA; note = Synthetic coding sequence
atggaggacctgttcgagaccttccaggacgagatgggcttcagcaacatggaggacgacggacccgaagaagaagagagggttgctgaaccccaagccaattttaacactccccaggcgctgaggttcgaggagctcttagccaatctgctgaatgaacagcatcaaatcgccaaagaactgttcgaacaacttaagatgaagaaaccttctgccaaacagcagaaagaggtcgagaaggtcaagccacagtgtaaagaagttcaccaaaccctaatccttgatcccgctcaacgcaagcggctgcagcagcagatgcagcagcatgtgcagttgctaacacaaatacacctccttgctacttgcaatccgaaccttaacccagaagcctcttccacaaggatatgtcttaaggaactcggaacatttgcccagtcttccattgcactgcaccatcagtacaaccctaaattccagaccctgttccagccatgcaatttaatgggtgctatgcagctgattgaagacttttctacccatgtttcaattgattgctcccctcacaaaaccgtgaaaaagactgtgtgctag

SEQ ID NO: 25836 - DNA, 1620 bp, synthetic construct
  source 1..1620: mol_type = other DNA; note = Synthetic coding sequence
atggccaccagcgcccccctgcggagcctggaggaggaggtgacctgttctatctgtttggactacctccgcgaccctgtgactatcgattgcggacacgtgttttgcaggtcatgcacaaccgatgtgcggccaatctctggctctcgtccggtgtgccctctctgcaagaagccgttcaagaaagaaaacattcgcccggtatggcaacttgcctctctggtggagaacatagaaagactcaaggtggataagggcaggcaaccaggggaggttacacgcgagcagcaagatgccaagctgtgtgagaggcaccgcgaaaagcttcactactattgtgaggacgacggtaaattgttgtgcgtcatgtgcagggaaagccgggaacacaggccccatacggcagtgctgatggagaaggccgctcagcctcacagagagaaaattctgaatcacttgagtactttgagacgtgaccgggacaagatccaggggtttcaggccaagggggaggccgatatcctcgcggctctcaagaagctgcaggaccagagacagtacatcgtggctgaatttgaacagggtcatcagttcctccgtgaacgagaagaacacctgctggagcagctagctaagctcgaacaggagctgacagaagggcgggaaaagtttaaatcgcgcggcgtgggtgagctcgctcgtttggccctcgtgatcagcgaactcgagggtaaagcccaacagccagcagctgagttgatgcaagacacacgtgattttctgaaccgttatccgcggaagaagttctgggtgggcaagcctatcgcacgggtggtgaaaaagaagacaggcgaattttccgataagcttctgtccttgcaacgcggcctgcgcgagtttcagggcaagctccttcgcgacctggaatacaagaccgtgtcggtgactctggatcctcagtccgcttccggatacttacaactgagtgaagactggaaatgtgtaacatatacgagcctttacaaatcagcatatcttcatccgcagcagttcgactgtgagcccggagttctgggtagcaaaggatttacttggggcaaagtatattgggaagtggaagtcgaacgcgaagggtggagcgaggatgaagaggagggggacgaagaggaggaaggtgaggaagaagaagaagaagaagaggccggttacggggacggatacgatgactgggagaccgacgaagatgaagaatctttaggagacgaggaggaggaggaagaagaggaggaagaagaagtgcttgagtcatgcatggtgggcgtggctagggatagcgtgaaacggaagggtgacctctcgttgcggcctgaagacggcgtgtgggccttacgcctgagttcatcgggcatctgggcaaatacctcccctgaggcagagctctttcccgccctgcgacccagacgagtgggtatagcattggactacgaaggcggtacggtgacatttacaaacgctgagtcccaggagctgatctatacatttacggcaacttttacccgcaggctggtaccttttttgtggttgaagtggcctggaacccgtctgctcctacggccctag

SEQ ID NO: 25837 - DNA, 1086 bp, synthetic construct
  source 1..1086: mol_type = other DNA; note = Synthetic coding sequence
gtgaccaccgagaagacctacaccagcaccagcaacaacagcatctcaggtagcctgaagagattggaggacacaacagcgcggttcacaaatgccaattttcaggaggtgagtgcacataccagttctgggaaggacgtatcagaaactcgtggcagcgagggcaagggcaagaagagctctgctcattccagcggacagcgagggcgaaaacccggtgggggcaggaatcctggaacaacagtctctgcagcctcccctttccctcaggccggatacaaacgagcacagacgtcgggcattgaggaagaaacagtcaaagaaaaaaaacggaaaggcaataagcagagcaagcacggcccggggagacccaaaggaaacaagaatcaggagaacgtgagccacctgtccgttagcagcgcaagtcccacatctagtgtggcttctgcagcaggcagtataacaagctcttccctgcaaaagtccccaactctgttgagaaacggaagtctccaaagtctgtcagtggggagctcaccagtgggctccgaaataagcatgcagtataggcacgacggcgcctgtccaacaaccactttttctgaactcctgaacgctatacataatgatcggggcgactcaagtacactcactaagcaggagctcaagttcatcggcatttacaactctaatgacgtagctgtgtcattccccaacgtggtatcgggaagtggatcatccactccggtgagttcaagccacttgccccagcagagttccgggcacctgcaacaggtaggagccctttcaccttcagcagtctccagtgccgcacctgccgtcgccactacccaggctaacactctgagtgggtcatcactgtcacaggctccatctcacatgtacgggaacaggtcaaactctagtatggcagcgctcattgcccagagtgagaataaccagaccgaccaagatttgggggataatagccgcaacctggtaggccgtgggtcatcgccccgggggtctttgtctcccagatcccccgtgtcctcacttcaaattcggtatgaccagccgggatag

SEQ ID NO: 25838 - DNA, 426 bp, synthetic construct
  source 1..426: mol_type = other DNA; note = Synthetic coding sequence
atggccgccgccccccccagctactgcttcgtggccttccccccccgggccaaggacggcctggtcgtttttggaaagaacagcgcccgaccacgcgatgaggtgcaggaggtcgtgtatttctccgcggcagatcacgagcccgagagcaaagttgagtgtacgtacatatctatcgatcaggtgcctaggacatacgccattatgatcagccgtcctgcatggctctggggcgcggagatgggtgccaatgaacacggagtgtgtatagcaaacgaggccatcaatactcgagaaccggcagccgagatcgaagcgctgctgggaatggatttagtaaggctgggtctggaacggggtgagacagctaaggaggcccttgatgtgattgtgtccctgttggaagagcatgggcaaggggggtag

SEQ ID NO: 25839 - DNA, 573 bp, synthetic construct
  source 1..573: mol_type = other DNA; note = Synthetic coding sequence
tgacagctggccgccctgaaggagatccaggccgaggtgcaggagaaggagagcgacgctgtcaaaccaaagaaccaggatattcaaggaggcaaagctgccccagctgaggcactgggaatccctgatgaacattaccttgataacttatgtatcttctgcggtgagaggagtgaatctttcaccgaagaaggtctggacctgcactattggaaacactgcctgatgctgactagatgcgatcattgtaagcaggttgtggagatcagttccttgactgaacatctactgactgaatgtgataaaaaggatggctttggtaaatgttatcgatgttcagaagccgtcttcaaagaggagttgcctaggcacataaagcataaagactgtaaccctgctaagccggaaaagttggccaaccgctgccccctctgtcacgagaacttctccccaggggaggaggcatggaaagctcacctaatgggtcctgcaggctgcactatgaaccttcggaagacacacatcttgcagaaagcccctgcactgcagcccggagaagggcagagaagatag

SEQ ID NO: 25840 - DNA, 723 bp, synthetic construct
  source 1..723: mol_type = other DNA; note = Synthetic coding sequence
atgaccgtgggcaagagcagcaagatgctgcagcacatcgactaccgcatgcgatgtatcttgcaggatggccgcattttcattggtacatttaaggccttcgacaagcacatgaatcttatcttgtgcgattgcgacgaattccgcaagatcaagcccaagaacagtaagcaagccgaacgggaggaaaaacgcgtactcggtctggtactgctgagaggcgagaacctggtgagcatgaccgttgagggtcccccccccaaagatacaggcatagctcgtgttccattagctggcgccgccggcggcccaggaattggacgggcagcagggaggggtattcccgctggcgtgcccatgcctcaggcacctgccggactggccggccctgtaagaggcgttgggggacccagtcagcaggtgatgactccacaaggcaggggcaccgttgccgccgctgctgccgctgccaccgcttccattgcaggcgcccctacgcagtatcctccgggtcggggcggaccaccccccccaatgggtagaggggctccacccccaggaatgatgggccccccacctggcatgcgcccccctatgggcccccccatggggattccaccaggacgaggcacgccaatggggatgcctcctcctgggatgaggccacctccacctggcatgcggggccccccaccacccggtatgagaccccctcggccatag

SEQ ID NO: 25841 - DNA, 420 bp, synthetic construct
  source 1..420: mol_type = other DNA; note = Synthetic coding sequence
atggagaccgactgcaaccccatggagctgagcagcatgagcggctttgaagaggggtctgagctgaacggctttgaaggaaccgacatgaaagacatgcggttggaggcagaagctgttgtcaatgacgtgctatttgccgtgaacaacatgtttgtaagcaaatccctccggtgtgctgacgacgtcgcgtatataaacgtcgaaactaaagaacggaataggtactgcttggaactgaccgaggccggtctcaaggtggtaggctacgccttcgaccaggtggatgaccacctccaaactccctaccacgaaaccgtatattcattactcgataccctcagcccagcatacagggaggcctttggtaatgcactactgcaacgcctcgaggccctgaaaagggatggtcagtcctag

SEQ ID NO: 25842 - DNA, 606 bp, synthetic construct
  source 1..606: mol_type = other DNA; note = Synthetic coding sequence
atggccggcctggaggtgctgttcgccagcgccgcccccgccatcacatgtcggcaagatgctctggtgtgcttcttacattgggaagttgttactcacggatatttcggtctgggcgtgggagaccagccagggccgaatgacaaaaagtccgagctgttgccagctggttggaataataacaaagacctatatgttctgcggtatgaatacaaggatggctccaggaagcttttggtcaaggcaataaccgtggaatcttccatgatcctcaatgtcctggaatacggcagccagcaagtagccgatttgaccctgaacttagatgactacatagacgccgaacacttaggagacttccataggtgtgaccctctcggaccatttgtcgtggggggcgaggacttagatcctttcggaccccgccgcggtggcatgattgtagatccactgcggtcaggattcccacgcgcccttattgaccccagttctggtttacccaaccggctgccacctggcgccgtccctccaggcgccaggttcgacccgttcgggcccatcgggactagccctccaggtcctagaccagataggcgaggccagtag

SEQ ID NO: 25843 - DNA, 747 bp, synthetic construct
  source 1..747: mol_type = other DNA; note = Synthetic coding sequence
atggccaccagcgcccccctgcggagcctggaggaggaggtgacctgcagtatctgtctggactatctgcgggacccagttaccatcgactgcggccatgttttctgccgtagctgcaccactgacgttaggcctattagcgggtccagacctgtttgccctctgtgtaagaaaccattcaaaaaagagaatatccgcccagtctggcagttggcttcgctggtcgaaaacattgaacgactaaaagtggacaagggcagacaacctggagaagtgactcgggagcagcaggatgccaaactttgtgagagacatagagaaaagctacattactactgcgaagacgatgggaagcttctgtgtgttatgtgccgggagtcccgcgaacatcggccccacacagccgtcctgatggagaaagccgcacaaccccatcgcgagaagattttaaaccacctctcgacgctgcggcgtgatagagataagatccagggctttcaagctaaaggcgaggccgatattctggcagccttgaagaagctgcaggatcagaggcagtacatagtggccgagttcgagcagggacatcagtttctgcgagagcgcgaagagcacctgcttgaacaactggcaaagctggagcaggagctgacagaggggcgtgaaaagtttaagagcagaggagtaggggaacttgccaggctggctctggtgatctccgagctagaaggaaaggcacaacagtag

SEQ ID NO: 25844 - DNA, 1842 bp, synthetic construct
  source 1..1842: mol_type = other DNA; note = Synthetic coding sequence
atggccaccatccccgactggaagctgcagctgctggcccggcggcgccaggaggaggcgagtgtcagagggagggagaaagccgaacgcgagaggctgtctcagatgcctgcatggaagcgcggcttgctggaaaggcgacgggccaagcttggtctgtcacccggggagccatcgcctgtactcggaacagtcgaggctgggccccctgacccggatgagtctgccgtgctgctggaagccataggcccagtccatcagaatcgctttatcagacaggagaggcagcaacagcagcaacagcagcagcggtctgaagagcttctggcagaacggaaacctggtccactagaagcccgtgagcgaagaccaagccctggcgagatgcgcgatcagtcacctaaggggagggaatctagagaggagcggttgagtccaagggagacccgggagcgtaggttgggaatcggaggagcgcaggagctgtcgctaagaccactcgaggctagagactggaggcagtctcccggggaggtaggtgatcggtcgagccggctcagcgaggcctggaagtggagactaagccccggcgagacccccgaacgaagtcttcggctggcagaatccagagagcagagtcctagacgcaaggaggtagagtcccgactgagtcctggggagtcagcttatcaaaagctgggcctcactgaggctcataagtggaggcctgactcaagagagtctcaggagcaaagtctggtacagctggaggccaccgagtggagattgagatccggcgaggagcgacaagactactccgaggagtgcggacgtaaagaagagtggccggtgcccggagttgccccaaaggaaactgcggagctaagcgagactttaacacgcgaggcacaaggtaactcttcagctggagttgaagctgccgagcagcgacccgtagaggacggggagagaggcatgaaacccactgaaggttggaagtggaccctgaactccggcaaggccagagagtggaccccacgggacatcgaggcacaaacccaaaagcccgaacctccagagtctgccgaaaagctgctggagtccccaggggtggaggctggggagggagaagcagagaaggaagaagctggggcccagggaaggccactgagggcactccaaaactgttgtagcgttccaagtcccctccctcccgaggacgcagggacaggtggccttaggcagcaggaagaagaagcggtggagcttcagccaccaccccctgccccactttccccacctccccccgcgcccactgctccacaaccacctggcgaccctttgatgagccgtctcttctacggcgtgaaagcaggtcccggcgtcggggccccacgaagatccggccacaccttcacggtgaaccctcgcaggtcagtacctccagctacccccgctacccctacctctcctgctactgttgacgccgccgttccaggagccggcaaaaaacggtaccccaccgcagaggaaatcttagttctagggggttacttgaggctcagccgttcctgcctggctaagggatcacctgagcgtcaccacaaacagctgaaaatcagcttcagcgagacagctctcgaaactacttaccagtacccgtctgaatcgtccgtacttgaggagttgggacctgagcctgaggtgccctccgcccctaaccctcctgcagctcaaccggacgatgaagaggatgaggaagagctgcttctgctgcaaccggagttacagggcgggctgcggacgaaggctctcatcgtggatgagtcatgcaggcgatag

SEQ ID NO: 25845 - DNA, 1620 bp, synthetic construct
  source 1..1620: mol_type = other DNA; note = Synthetic coding sequence
atggccaccagcgcccccctgcggagcctggaggaggaggtgacctgtagcatatgcctggactacctcagggaccctgtgacgattgattgtggtcacgtgttctgtcgatcttgtacaaccgacgtgagaccgatttctggaagccggccagtttgtcctctgtgcaaaaaaccttttaagaaggaaaacattcgtcccgtgtggcagctggcctccctcgtcgaaaacattgagaggcttaaggtcgataaaggaagacagcccggcgaggtgaccagagagcagcaggacgcgaagctctgcgagcgccacagggagaaattacactactactgcgaagacgatggaaagcttctctgtgttatgtgcagggagagccgggaacatcgaccccacaccgcagtgctaatggagaaggctgcccaaccccatcgcgaaaagattcttaatcacttgagcactttacgtcgcgacagagataaaattcagggattccaggccaagggggaagcagacatcctggcagcgctcaaaaaactacaggaccagaggcagtacatcgtggctgaatttgaacaaggccaccagttcttgcgagaaagggaagagcatctgctggagcagctcgctaaactagaacaggaattaactgaagggcgcgaaaaattcaagagccgaggcgttggcgaattagcacggctcgctctggtcatttcagagctcgaaggcaaagctcaacagcctgctgccgaactaatgcaggacactagagatttcctgaaccggtaccccagaaaaaaattttgggtgggcaaacccatcgccagggtcgtcaaaaagaagactggagagttcagcgacaagctgctgagcctgcagcgtgggctacgagaatttcaaggaaagctgcttcgagatttggagtacaagaccgtgtccgtgacactggatcctcaaagcgcatccgggtatctccagttgtctgaggactggaagtgtgtgacctatactagtctgtataagagcgcgtatcttcacccacagcagtttgactgtgagcctggcgtactcggatcgaaaggctttacatggggaaaagtctactgggaggtggaggtggagagagaagggtggagcgaggacgaagaagaaggtgatgaggaagaagagggggaagaggaggaagaagaggaagaagcagggtacggtgacggttacgatgattgggaaactgacgaagatgaggagtccttgggcgatgaagaagaggaggaggaggaggaggaggaagaagtcctggaaagttgcatggtgggagtcgcgcgcgattccgtgaagcggaagggagacctctcactgagacccgaggatggcgtgtgggcgctgaggctgagctcctccggaatctgggccaacaccagccctgaggccgagctatttcccgcattgcggcccagacgagtcggtatagctctggattatgaaggggggactgtcacatttactaacgcggagtctcaggaactcatttacactttcacggccacatttacacgtagactcgtgccttttctgtggttgaagtggccaggcacaaggctgctgcttcgaccctag

SEQ ID NO: 25846 - DNA, 1089 bp, synthetic construct
  source 1..1089: mol_type = other DNA; note = Synthetic coding sequence
atggcccccaagcccggcgccgagtggagcaccgccctgagccacttagtacttggtgtggtgtcattgcacgccgctgtcagcacagcagaggcctcccggggagcagccgcggggttccttctgcaggtcctggctgccaccacaacattggcaccaggtctgtctactcatgaggattgcctggccggcgcgtgggtggctacagttatcggtctacctctcctcgcttttgattttcattggtgtaccaacgggcacctcatgtgcgccggctgcttcatccacctgctagcagacgcaagactgaaggaggaacaggccacatgcccgaactgtagatgtgagatttctaaatctttgtgttgccgtaatctcgccgtagaaaaagcggtctctgaactcccaagcgagtgtggcttctgtctgagacaatttccacgcagtctgctcgagcgacaccagaaggaagaatgtcaagacagggtaacccagtgtaaatataaaaggatcggttgtccatggcatggtcctttccacgagctgacagtgcacgaagccgcttgcgcacaccctaccaagaccggctctgagctgatggaaatcctagacggaatggaccagagccatcgtaaggagatgcagctgtataactccattttctcccttctctcgttcgagaagatcggctacaccgaagttcagttcaggccttaccggaccgacgattttatcacccgcttgtactatgagactcctcgctttaccgttctgaaccaaacctgggtccttaaggcccgcgtcaatgactcggagaggaaccctaaccttagctgcaagagaactctgtcctttcagctcttactgaagtcaaaagtgacagccccccttgagtgctccttcctcttgttgaagggcccttacgacgacgtgcgtattagcccagtcatttaccacttcgttttcacgaacgagagtaatgaaacggactacgtacccttacctatcatagactctgtggaatgtaataagctgctggcggctaaaaacattaacctgaggttgtttctattccagattcagaagtag

SEQ ID NO: 25847 - DNA, 273 bp, synthetic construct
  source 1..273: mol_type = other DNA; note = Synthetic coding sequence
atggccatggcccccagccccagcctggtgcaggtgtacaccagcccagcggccgtagcagtgtgggaatggcaagacgggctgggcacgtggcacccctatagcgccaccgtatgcagcttcattgagcagcaattcgttcaacagaagggacaaagatttggtcttggttccttggcccacagcatacccctgggccaagccgatccatcgttggcaccatatataatcgacctgccaagttggacacagttccgccaagacacagggtag

SEQ ID NO: 25848 - DNA, 2502 bp, synthetic construct
  source 1..2502: mol_type = other DNA; note = Synthetic coding sequence
atggccgtggaggacagcaccctgcaggtggtggtgcgggtgcggccaccgacaccacgagagctggattcccagcgacgccctgtggtccaggtcgtcgacgagcgcgtgctggtgtttaaccctgaggaacccgatggggggttcccaggcttaaagtggggcggcacacacgatggacctaagaaaaaggggaaagacttaacgttcgtatttgaccgggtgtttggcgaagccgccacgcagcaggacgtgtttcagcacaccacccattccgtactagattcgttccttcagggctataattgcagcgtgttcgcatatggtgcgactggagcaggaaagactcacactatgctgggtagggagggtgatccagggataatgtacctgactactgtagaactctaccggagactagaggcccgccagcaggagaaacatttcgaagtcttgatttcatatcaagaagtgtacaacgaacagatccatgatttgctggaacccaagggcccgcttgcaatcagggaagaccccgataagggagtcgtggttcagggactcagttttcatcagcctgcgtcagccgagcagcttctagagatccttacccgaggaaaccgaaatcgtacccagcatcccaccgacgcaaacgcaacctcctcccggtcgcacgccatcttccaaatcttcgtcaagcagcaagaccgcgttcccggcctgacccaggccgttcaggtggccaagatgtcattgattgacctcgccggatcagagagggcttctagcacacacgctaaaggggaaaggctgagggagggggctaacatcaataggtccctgctcgcattgatcaatgttttgaacgccttggccgacgctaagggtagaaaaacacatgtgccctatagggactccaaactcacccgcctcctgaaagatagcctaggcgggaattgccgtaccgtgatgattgccgcgataagtccatcatctctgacatacgaagatacgtacaacaccttgaagtatgccgacagggcaaaggagattagactgagcttgaagtcaaacgttacaagtctcgattgccatatatctcagtatgccactatttgccaacagctccaggctgaagtcgcagcactccggaaaaagcttcaggtctatgagggcgggggccagccccctcctcaggatcttccagggagccccaagtctggaccgccacctgaacatctgccctcttctccactccccccacaccccccatcccaaccatgtacacctgaattaccagctggtcctcgcgctctgcaagaggaatcacttggaatggaggctcaggtggagcgggcaatggaaggtaactcctccgaccaggagcagtcccctgaggatgaggatgaggggccagctgaggaagtccccactcagatgcccgaacagaaccccacccacgcactgcccgagagccccaggttaacgctccagcccaagccagttgtcgggcattttagcgcgcgggaactggatggggataggagtaagcaactggcccttaaggtgctgtgtgtcgcgcagcgtcaatattcgctcctccaggccgccaatctgctgactccggacatgatcaccgaatttgagacccttcagcagctggtccaggaagagaaaatcgagccgggcgccgaggcgctgcgcacgtctggcctggcaagaggggccccccttgcccaggaactctgtagcgagtccattcccgtcccttcccctctttgtccagagccacccggatatactggccctgtcaccaggacaatggccaggaggctgagcggtcccctccacaccttgggcatcccacctggccccaattgcactcctgcacaggggtcccggtggcccatggagaaaaaacgccggcgcccatccgctctggaggccgattcgccaatggctcccaagcggggcaccaaaaggcaaaggcagtcattcttaccatgcttgaggagggggagcttgcccgacacccagccttcacaagggccaagcactccgaagggcgagagagcatcttctccttgccactctccacgtgtttgtcctgccaccgtgattaagtcccgcgtgcctcttggccccagtgccatgcaaaattgctcgactccgctagcactgccgacccgggacctaaatgccacatttgaccttagcgaggagcctccttccaagccgagtttccacgagtgtatcggttgggataagatcccacaggagctctctcggctggaccagccatttattcctagggctcccgtgcccctgtttacgatgaaagggccgaagccgacgagtagcttgcccgggacatccgcatgcaaaaagaagcgcgtcgcatcctcttcagtatctcatgggcgatctaggatagcccggttgcctagctccactctcaaaaggcccgccggccctctggtgttacctggggattggcactag

SEQ ID NO: 25849 - DNA, 1842 bp, synthetic construct
  source 1..1842: mol_type = other DNA; note = Synthetic coding sequence
atggccaccatccccgactggaagctgcagctgctggcccggcggagacaggaggaagccagtgttaggggcagggagaaggcggaacgcgaaagactgagccagatgcctgcgtggaaaagaggcctattagaacggcgccgagctaagctggggctttcccccggagaaccgtccccagtcctgggcactgtcgaggctggaccccctgacccggacgagtccgcagtgctgttggaggctatcggccctgtccaccaaaacagatttattagacaggaacgtcagcagcagcagcagcagcaacagcggtctgaggagttgctggcagaaagaaaacccggccccttagaggctcgcgaacggagaccatctccaggcgagatgagagaccaatctccaaaaggccgagaatcaagagaggagcggctctctccgagagaaactcgggagcgaagactggggatcggaggcgcccaggagttgtctttgaggccccttgaagcccgagactggcgacagagccccggtgaagtgggcgaccggtctagccgcctatccgaagcctggaagtggaggcttagccccggggaaacccctgagcggtccctgagattggccgaatcccgcgagcagagcccaaggcggaaggaggtggagtctcgcctttcaccgggagagagtgcttatcagaaacttgggctcacagaggctcataagtggcggccggacagccgcgagtcacaagagcagagcttggtccagttagaagctacagaatggcgtctgagaagcggagaggagaggcaggactacagtgaggagtgcgggcgcaaggaggagtggcctgtcccgggagtggcccctaaggagactgcagagttgtccgagactctgactcgcgaagcgcaggggaatagcagcgccggggtcgaagcggctgagcagagacccgtagaggatggagaacgagggatgaaacctaccgaggggtggaaatggactcttaactcaggcaaggccagagagtggacgccccgagacatagaagcccagactcagaaacccgagcctcccgaaagcgctgaaaagctcctcgagtcccccggtgtggaggccggcgagggtgaggcagaaaaagaagaggccggcgcccagggccgtcctctccgtgcgctgcaaaactgctgctctgtgccctctccactgccccccgaagatgccgggacaggcggactgcgacagcaggaggaggaggccgtggaactacagccccccccgccagccccattgtcgcctccaccccccgcgccaacagctccccaaccacctggggacccactcatgtcaagattgttctatggggtcaaagcaggaccaggcgtgggcgcccctaggcggtcaggacacacgttcacggtgaatcctaggagaagcgttccaccagctacccctgccacgcccacctcacccgccacggtcgatgccgcggtccccggcgctggcaagaaacgctaccctacggctgaagagatcttagtcctaggtggctacttaaggctctccaggtcttgcttggccaagggcagccccgagagacaccacaaacagctaaaaatttccttttccgagacagccctggagacgacctatcagtatccttctgagtccagcgtgctggaagagctaggacccgagcccgaagtccctagcgcccccaacccgccagccgcccagcccgacgacgaagaggatgaggaggaactgcttctcctccagcccgaattgcagggaggcctgcggacaaaggcactcatcgtagatgagtcatgcagaaggtag

SEQ ID NO: 25850 - DNA, 654 bp, synthetic construct
  source 1..654: mol_type = other DNA; note = Synthetic coding sequence
atgaacagccagccccagacccggagccccttcttccagcggccccagatacaaccgccacgtgcaaccatcccaaacagcagtcctagtatacggcctggtgcgcagactccaaccgctgtgtaccaagccaaccagcacattatgatggtcaatcatctgcctatgccctacccagtaccacagggacctcaatattgcatccctcagtacaggcactcaggtcccccatacgtgggaccaccacagcagtacccagtgcagcctcccggtccagggccattttaccctgggcccggccctggcgatttccccaatgcatacggaaccccgttctacccctcccagcccgtgtatcaatcagctcccattatcgttcccacacaacagcagcccccccccgctaagagagaaaaaaaaaccatccggattcgagacccgaatcagggcggtaaggacattacagaggagatcatgtcgggcgggggatcccgtaatccgacccccccgatcgggcggcccacgtcaactcccactcctccccagcagctgcctagtcaggtgcccgagcacagtcccgtggtttacggcactgtggaatctgctcaccttgccgcttctaccccggtgactgcagccagtgaccaaaaatag

SEQ ID NO: 25851 - DNA, 969 bp, synthetic construct
  source 1..969: mol_type = other DNA; note = Synthetic coding sequence
atgtacttctgctggggcgccgacagccgggagctgcagcggcggagaaccgctggctcaccaggcgcagaactcctgcaggccgccagcggtgagcgacattctctgctactgttgaccaatcacagagtactaagttgcggcgacaattccaggggccaacttggcaggcggggcgcccagagaggagagttaccagaaccaatccaggctttggagactctgatagtcgacctggtgtcgtgtggcaaagaacatagtctggccgtgtgccacaaaggacgggtttttgcttggggggccggatccgagggacaactgggtataggggaattcaaggagatctctttcaccccgaaaaaaatcatgactctgaatgatatcaagattatccaagttagttgcggccactaccattccctcgcactcagtaaagacagtcaagtcttcagctgggggaagaacagtcacggacagctggggctcgggaaagagtttccttcccaggcatctcctcaaagggtccggtcattggagggcatccccctcgcccaagtggctgccggaggggcccattcgttcgccttatctctctgcggtacatcgttcgggtggggctctaactcagctggccaactcgccctctccggacgaaacgtccccgtgcagtccaacaagcccttgtctgttggcgccctcaaaaatctgggagtggtgtatatcagttgcggtgatgctcatacagccgtgctgactcaggatggaaaagtgtttacattcggcgacaatcgctcggggcagctgggatacagtccaacccccgaaaaaagagggccccaactcgttgagaggatcgatggcctagtgagtcagatagactgcggacgtctccgcggttgttccagccagacgcacttctgctggaatatttgtcaactctgtgacaattcctctgtaaagcttgaatag

SEQ ID NO: 25852 - DNA, 1743 bp, synthetic construct
  source 1..1743: mol_type = other DNA; note = Synthetic coding sequence
atgcgggccctgaccgtgcagcgggtgaagttcgccatggacctgcctctgcttaagagggctggtcaggatctggccgagaagacaaaaaactttgtgtcgcggtcactggtcattggtgaagtactgagcatggcggacatggctacgggcgtgaagtgcgggattatctattggttatttggcggggctatccggaacctgggcagtcccgaacacgtaaccaagtggtttcagccattacaagagcagaagtacacaggtatgttcgccatgactgaaagggggcacgggagcaacgccagaggtattcagaccgaagccactttcgatctttcagcccaggagttcgtgatcgataccccttgcgagaacgcggaaaagatgtatattggtaacgcaatgtacggcaattacgccgccgtcttcgcgcagctcatcattgatggaagatctcagggcccccattgcttcatcgtgcccgttcgggacgagaacgggagcttataccctggcgtgacggcaattgacatgatgtataaggagggattacacggtgtcgataacggcatcctgatctttgacaaagtccgcatccctcgcgagaatctgttagacaagttcgggtcagttgccccagacggtcagtatcactctcccattcggaataagagtgcgcggtttaatgccatgttggccgccctgacacctagcaggctagcagtggcgtttcaagctatgggggccatgaaactcggattaaccattgcgatacggtactcccacagtcggagacaatttggcccgaagaccaaggaggaggtcaagatcattgagcaccaaacacagactttacggttaatgccccacttggctacagcactggctctgacttttgtgagccgctatgcgggcgctctcttggatgaagacgtgtttcagggcaaggagctagtgaattctcgatccctccaagccctcgtcgccggacttaaggcttatagcacgtgggaaaacattcggtgtctgcaggattgccgggagtgtacaggcggtatggttgtggggcgtgagctgttggcgcagtatacaaaacagtacgaagagaagccattgtttggactgctgcagaactgggctgagtccgtcggagataaacttcggacttcctttttggccttcaatatggacaccgtggatgacttggcatttctgctgaaggccgtgaagttccgtgagcgtgttttacaaagaggcctcgtcgcccgcatatactacaaggtgaagacgaagaaggaggatttcttccacgcctggaactcctgcctgcaccatgtggcaagcttgtcgttggcacatacccacagagtcaccttggagcagttcagccttgctgtgaaatcatgccctgatcaggaagatcagaccctcctgatgaaattttgcctcctgtacggcaccaaactcgtatttcaggagcgagcatggtacttggaacataagtatctgactcctatggctagcacaagaattcgtaatcaacttctggacttgtgcgacagcgtaaaggacgacgctcgacgggtaatatccactttcaatataccacacacctatttgcatgcccctatcgccgggattagtaatcccagagctgcatgggccttctaccctgctcctctgcagcctcgaccaagagaggaggcgcgcagtcggcgccccaaactgggagcaaaattatag

SEQ ID NO: 25853 - DNA, 561 bp, synthetic construct
  source 1..561: mol_type = other DNA; note = Synthetic coding sequence
atgggcgtgaaccagagcgtgggcttcccccccgtgaccggcccccaccttgtgggatgtggagacgtgatggaaggccagaacctgcagggcagtttcttcagactgttctacccctgtcagaaggctgaagaaaccatggagcagccactgtggatccctcgctatgaatactgtaccggtctggctgaatatttacagttcaacaagagatgcgggggacttctgttcaatttggcagtcgggagttgccggttacccgtgagttggaacggacccttcaagaccaaggattcgggataccctcttatcatcttcagtcacggattaggtgcattcaggacgctgtactcagctttctgtatggagctcgcaagtcgggggtttgtcgtggccgttccggagcaccggtgcgtgtatttccgagataggagcgccgctaccacttacttttgcaagcaggcccctgaggagaaccagccaactaacgaaagcctacaggaagaatggattccattcaggagagtggaagagggcgaaaaagaatttcacgtcaggtag

SEQ ID NO: 25854 - DNA, 1620 bp, synthetic construct
  source 1..1620: mol_type = other DNA; note = Synthetic coding sequence
atggccaccagcgcccccctgcggagcctggaggaggaggtgacctgtagcatctgcctggactatctgcgcgaccctgttacgatcgactgtggccacgtgttctgtcgcagctgcaccactgatgtgcgcccaattagcggcagtcgacccgtctgccccttgtgtaagaagccctttaaaaaggagaacattcgacccgtgtggcaactggcgtccttggttgagaatatcgagcgactgaaggtggataagggcagacagcccggcgaagtgactcgagagcaacaagatgccaaactgtgtgaaaggcaccgagaaaagttacactactactgcgaagacgacggtaagcttttgtgcgtgatgtgcagggagtccagggaacaccggccacacaccgccgtgctgatggaaaaggcggcccagcctcaccgggaaaagattctcaatcatctatctacattgcgcagagaccgggacaagatccaaggcttccaggctaagggtgaggctgatattctcgcagccctgaagaagttacaggaccagcgccagtatatcgtcgcggaattcgaacaaggtcatcagttcctgcgggagagagaggaacacttgctggaacaactggcaaagcttgagcaagagctcactgagggacgggagaagttcaaatcacggggagttggagagctcgcgcgtctcgcgctcgtgatttcagagctggagggaaaggcccagcagcccgccgctgaactgatgcaagatactcgtgactttctcaaccgttaccctaggaaaaaattttgggttggcaaacccatcgcccgcgtcgtaaagaaaaaaactggtgagttttccgataaactgctctcgctgcagaggggcctgcgggaatttcaagggaaattactccgcgacctagaatacaagaccgtcagcgtgacgctggatccacagtctgcgtcaggatacctacagctctctgaggattggaaatgcgtaacctacacttccctgtataaatccgcctacctacatccacaacaatttgactgcgaacccggagtattggggagtaagggttttacctggggcaaggtgtattgggaggtggaggtcgagcgagagggatggtctgaagacgaggaggagggtgatgaggaggaggaaggcgaggaggaagaggaagaagaagaagccggatacggcgatggatacgatgactgggaaacggacgaggatgaagaatccctgggagacgaggaggaagaggaggaagaagaagaagaagaggtccttgaatcttgcatggttggggttgctagggattccgtcaagcgaaagggtgacctctctctaaggcccgaggatggggtctgggcactgcgattaagctctagtggaatttgggccaacacgagccctgaggccgaactctttcccgccctgcgtccacgcagagttggaatagcactagattacgagggcgggaccgtgacttttacgaatgctgaatctcaggaattgatatatacattcactgcaacttttactagacggcttgtgccctttctttggctcaaatggcctggaaccagacttctcttgaggccatag

SEQ ID NO: 25855 - DNA, 2613 bp, synthetic construct
  source 1..2613: mol_type = other DNA; note = Synthetic coding sequence
atgagccggaaccccagcagcaacagccccgaggaggacaccgtgcccgtgcctaagggctccgtcccagccgcccggccatcgcgcgggggaatgagcgtagtaggtatcgacctcgggtttttaaactgttacatcgccgtagccagaagtgggggcatcgagactatcgctaatgaatacagtgatcgatgcaccccggcctgcatcagcctcggatctcgtacccgtgccatcggcaatgctgccaaatctcagatcgtgactaatgtgagaaatacgatccatggcttcaagaagctacacggccgctctttcgacgatcctattgtacagactgagcggatcaggctgccgtacgagctgcaaaagatgccaaatggctccgcaggagtgaaggttcgctatttggaggaggagagaccttttgctatcgagcaggttactgggatgctgctggccaagttaaaggagaccagcgaaaacgcactgaagaagcctgtagccgattgtgttattagcattccaagcttctttaccgacgcagaacgacggagtgtgatggcggccgcgcaggtggccggtttgaactgcctccgactgatgaatgagacaacagccgtggcacttgcctatggcatttacaagcaagacctcccccctcttgatgagaagcctagaaacgtggtgttcattgacatgggtcacagcgcttatcaggtcctggtgtgcgccttcaacaaagggaaactgaaggttctggcaaccacctttgatccttatctgggaggaagaaatttcgacgaagctttggtggactatttttgtgatgagtttaaaacaaagtataagataaatgtcaaggaaaattcaagggctcttttgaggctttaccaggagtgtgagaaattgaaaaagctcatgagcgctaacgccagcgacttaccattgaatatagaatgcttcatgaacgacctggacgtgtcttccaagatgaatagagcacaatttgaacaactgtgcgcaagcctccttgctagggtggaacctccacttaaggccgtgatggagcaggccaatttgcagagggaggacatttcatcaatagagatcgtagggggagcaactcgaattcccgcagttaaagaacagatcacgaaatttttcctcaaggacatttcaacaacattgaatgctgacgaagcagtggcacgaggctgtgcattgcagtgcgccattctctcgcccgcatttaaggtgcgcgagttcagcattactgacctggtgccatattcaattactttacggtggaaaacaagcttcgaagacgggtcgggcgaatgcgaggtcttttgtaagaatcacccagctccctttagtaaggtaatcacattccataaaaaagagcccttcgagctagaagcattctacacgaacctgcacgaggtcccttacccagacgccagaataggctcttttaccatccagaacgtgttccctcagagcgacggtgattcctccaaagtcaaggttaaagtgagagtgaacatccacggcattttctccgtggcgtcggctagtgttattgagaagcaaaatctggaaggcgatcactccgacgctcccatggaaaccgaaactagcttcaagaacgaaaacaaagataatatggacaaaatgcaagtggaccaggaagaaggtcaccagaagtgtcacgccgagcatacacccgaggaagaaatagatcacaccggcgcaaagactaagagcgccgtgtccgataaacaggaccgtttaaatcagactctcaaaaaaggaaaggttaaaagtattgatttgcccattcaatcatccttgtgtcgtcagctggggcaagatctacttaactcttatatcgaaaatgaggggaaaatgattatgcaggataaactggaaaaagaacgcaacgacgccaaaaacgcagtggaagaatatgtctatgactttcgcgaccgccttggaactgtgtatgaaaaatttatcaccccagaggatctttccaagctgtctgccgttttggaggataccgagaattggctctacgaagatggggaggaccagcctaaacaggtttacgtggacaagctacaggaactcaagaagtacggccagccaatccagatgaagtacatggagcatgaggaaagacccaaagctctgaatgacctagggaagaagatacagcttgtgatgaaggttatcgaagcatacaggaataaagatgagcgttacgaccatctggatcccaccgagatggagaaggtggaaaaatgtatttccgatgcaatgagctggctgaattccaagatgaacgctcagaacaagctgtctttgacccaggatcctgtcgtgaaggtcagcgagatcgtggctaagagtaaagagcttgataatttctgtaacccaattatctacaaacccaagccaaaagccgaagtcccagaggacaaacccaaggcgaatagcgaacacaatggacctatggacggtcaatctggcactgaaactaaaagcgatagtacaaaggactcctcacagcataccaagagctctggagagatggaagtggattag

SEQ ID NO: 25856 - DNA, 5463 bp, synthetic construct
  source 1..5463: mol_type = other DNA; note = Synthetic coding sequence
atggagcccccccaggagaccaaccggcccttcagcaccctggacaatcgcagcgggcaagtgcaggtactgtccgctacaccgctgcttcagcggaacccatattcctcccccgacattatgcacatcaagggatccgaagcaagtagtgtgccgtacgctctgaatcagggcaccacagctctgcctaagaataagaaccaagaggggaccgggcatcgcctgttaaacatgctgagaaaaacacttaaggaaagcgacagcgaggagctggaaattacccaggagacaccaaacctcgtgccgttcggcgacgtggtcggctgtctcggcattcatataaagaactgtcgacatttcatgcccaagattagtctgcagcattacgcaaatctgtttatccggattagcataaacaaggccgtgaagtgcaccaagatgtgcagcttgttgtcaaaaaacgatgaaaagaataccgtgatcaagttcgatgaagtcaaatacttttcagtacaagtgcctagaaggtacgatgacaagcgcaataacatattacttgagttgatccagtatgacaatagagagaaacgcgcctttctactggggtctgttcaaatccatttatacgaggtgatccaaaaaggttgcttcatcgaggaagtgcaagtcctgcacggaaatatattcgtgtgccggcttgaggtggagttcatgttcagctacggaaacttcggatatgggttctctcaccagcttaagccacttcagaagatcacagagccatcaatgttcatgaatctggctccacctccggaacgaacagatccagtgactaaggtgatcactccccagacggtggaatatccggcgttccttagccccgatctcaatgtgacggtcgggacaccagcagtccaaagtagcaatcagcctagcgtagtgcgattggagaagctgcagcaacagccgagggagaggcttgaaaagatgaagaaggagtatcgtaatctgaatacctggattgataaggccaactatttggagtccatattaatgcccaagctggagcataaagattctgaggagacaaacatcgacgaggcgagcgaaaacactaaaagcaatcaccccgaagaagaactcgagaacattgttggcgtggatattcccctcgtgaacgaagaggccgagaccaccgcaaatgaattactggacaacgattccgagaagggacttactatacctacactgaaccagtctgaccaggataactcaaccgcggacgccagcaaaaacgacgagtctaccccttcccctacagaggtccacagtctgtgcacaatcagcaatcaagaaactatcaaggccggcagaattcctcccttgggggagcgccaatccgaaagtatgccagatcggaagatgaagaacgttttctttccgctggaggtgaaactgaaagacaactatccgtctattttaaaggcggattctagtctgtcggaagtcgctttttcccccaaggagtacaatagcccatcctttcggccggagtacatagagtttaaacctaagtttcagttccaaaagtttaacaagaatggcttcgatccttttctgaggaacatcaataagatgagtgtgcggaaacgaaaagaccaggacatctataagtatcgcaacattctgggtgcggaagttatcgaacatgaggatcaagaccctccctatccagcgcagtcaaagacagcagggcccgccaatacaacttgggcccatgaccctaatatattcaccacaaagatgctagaaactgaaaataagctcgcaccagatcccacgataaacacaataaaaggtctggacactaaaaattccctcaaagaaaatctgccgaacgtttctttgccaagcatcaaaggggaaagttctagagccggaaacgtgcaggccaatacctgtcacttgagcaagagccttaatttcaccccccacattgagtacctcaaacagtcgatgatcctgaagagcattcttagcgagaacctgcaggatctgagcgacaagcttttcagtaaaccggaagtgtccatgaattccgaagcaagggagaagtcctcgtcccccctattgagcatccatgataaaagctcttcgtccatggaagacaacgtcctggagaaaaaacaggatctcaataactggctgagcgaaaaggacatcctgaactctaaaacgacactctctcagattattaagaatattcctgctgatagtttctctgagggatcacagatcattgagaatattcccgcagattccctactggaaggaggccaggtaatcaaaaacatccccgagtattcactcagcgaaggcgggcagattatcaagaatattcccgccgatagctttctggaatcagggcctggtcaatcacccgaagtagaggagcatgtttctaaaaaacacttcgaagcagacgagcgagacttccctattaagaagaactcttccaccaagaaaaagcacttgatcagtgaggtccctaatagtaagtctggatcctcagggaccgtgcacgactacatcatgcggcaaatctttaccgcaccaatattttcagagctcgagatcgaggtaaaagagccctccgaaacccccatgaatctcgagaaccaattgcctacgccatggaagaggtcactctcatcgcacattctgtttcacgaagaaaacgcagacgagattgagctcccccagcccaggtcagcaaccagccagatcatccaggcgtttcccattgacacgctgctggaaagcggcatcattaaggtgatcgagctggacaaagagcaccataaaagctcgctgctgggcactggaatcacatcgcctaaaggcaatttgaaagattcccaggaatactactcagagatccgatctgaaacagagcctcttagtgaacagagcatcccaatcattccaaaagatactacaagtgttagcagagcggagttcatacaggaagaccagaacatgttcccacaggacagcagttattatagcatcgccaacaaagagctgtacttgccacggaatgggcaacggttgtgcaaagataagaacgacctctcgagcaccctggaaagcctaacaaactccctcatggacaagctatctgagagtgacgaaatcatgctcaagtcgtttcttaagaatatattcaacgtgtttttcaagtacaatcattccgaaaggaggggccaaccggagaaagaactggagcggcttatccagcccagcttcacctccgataccgagcacctggaggagcttcaggaggatttcgacaaagcagacaaacttgatcggaagcccatcttgtccccaaaactgcgggtctttctcgaggaattatccgagagcgaagtgaaacacctcaaaagcgaactcagtaagcagatacagcactatttggtggagcggctgagcgagtcaggccacatcacgaaagaggatttacctaagatttaccagaacctctacctaatgaacgagaaggcggaacagaaaggtccaaactctttccagggcaaatacagcgagacagttaaagaaatcatgtcctttgtgaataactttaatcaccactttatagacaagcacctggaaataaaactgcgatcatttctcaaggagatcttgcaaaattacttccttaagaatatttcagagtcctccctgttcaatgaaaccgcctctgagactatttatcccaacatctcaagtttgaggacgaaaagcgtgtctatctcatttcatgagttagagcaggatatttccaaaggatccttcggacggcgcttcgagatcaacatgaagtacccactctccaaaagcttacagaattatcttatcgcattatccgaaaacgaactgttgcatctaaaagccgatttgagtaagcacctgcaatcactgttcatcgaaaaactctccaagagcggcctgatgacgaagaaacagctcgaaggaattaaccaacacattaacctgctgaactccagttccatccctctgaagtacatcaagactcacttacccttccgagacgactgccatttcgtcgagaagcacagtgagaaacagaacaaatacagtagaatagtacaacaaaccaccctgcagaccgttagcgaggacaagctcagagaagccgagctgattcgggaaaaagagaaaaagtatttccccctgcagaacctgaaaggaaactcttcacttatcaaggagcagaaaagttattacaccaaggaggaagctaaaaccccctccctcattaaggtccagccctcctctaatgaaaatatccaggcctcgcctctgtctaagtccagcgagatactgacagacatcctcctaaaaaaactgagaaaagagcacgtgttcactcagctgccacaggcagagaactcagtgcataaaacagagattcaggacccatactcctgggggggaaaatccaagatcacccagagtaaggcctggtgcgaaaagacccttaagatgaagtcactcgacaggaaggagcacgtcaatatttacaagtggactgttcaagaaaagccagaggccgtgctcacatcatatccccggatccccaatgctaggatgccaagggaggacgagtatctaaacagaattaccttccctagctggcagtcgtcaacattaacgcatttcaacaccgaaacaggcgagaagtctaagctggaggatcagtactgccagactctgaagggcaataacaataataacaaaaaacatctggtgactttcgcccagtataaaaaagagatacagactttgtacatcaaacccgacgagatttgctccgagaagtgcgcgaagttccccgaaatacagtcatttcagtataaggtagtcgaggatgagaagaacctgaagcctcacctgttcccagagctgtttaagatcgaagatctgaagcctaaggtccgcaaggagcgggacagagttgcacagccgaagaaaagcttcaataaaatagtgcgaattctcccgaccacgctaccaaccacacggatccacctcaaaaaatctgttcctagaactctgttgcactggacggcacgaagaaccatccacgattgtagcgataagttcgaagacctccacgacatgacctcctttacgcaccttaagaaagtgaaaagtaggagtcgtctgctaggtaagtcttcagacgatatccacaaccacgcgaggcacagcgccaggccctacaccgcccccgaggttaacaaacaacgtgagtcatattcagggaaattcacatcccggcgaatggttagctctggtctggtgcatatcaatgacaaaacctctgactacgaaatgcacaagatgcgacccaaaaagattaagagaggctattag

SEQ ID NO: 25857 - DNA, 498 bp, synthetic construct
  source 1..498: mol_type = other DNA; note = Synthetic coding sequence
atggagcccacccgggactgccccctgttcggcggcgccttcagcgcgattctgccgatgggtgcaatcgacgtgtcagacctgcgtcctgtcccggataaccaggaagttttttgtcaccccgtgacagaccagtcacttatcgtggagctcctcgaactgcaggcgcacgtgcgaggcgaagctgctgcccgatatcactttgaagatgtggggggtgtacaaggcgccagggctgtccatgtggagtccgttcagccactgagcttagaaaacctagctcttagaggcaggtgccaagaagcttgggtgctctctggtaagcagcagattgccaaggaaaaccaacaagtgcgcgcaagagagtgtgttatgtcttggaaaggtgggagtggagacgctgagatccaggttagcatcctcactctaatacccctgggcagcaagggacgcgatacctcatccggactggcagaggccgcacccgttcctgattag

SEQ ID NO: 25858 - DNA, 4482 bp, synthetic construct
  source 1..4482: mol_type = other DNA; note = Synthetic coding sequence
atggccagcatcacccagctgttcgacgacctgtgcgaggccctgctcccagctgcaaaaactcaccttgggcagcgctccgttaatcggaaaagagcgaaacggtctctcaagaaggttgcctacaatgccctatttaccaacctgtttcaggatgaaacacaacaactccagccggacatgtctaagcttcccgcccggaacaaaatcctgatgctgagcttcgacctgagagtgggcggcctgggacccaaggcagatagactcgaggaactcgttgaagaacttgaagccgcaccttgttgccctctcctggaggtgggttctgtcctcgatctgttagtacagctagctggaagcggaccccctcaggtccttccacggaaacgggattatttcctgaacaacaagcacgtcgggagaaacgtgccatacagcggctacgactgcgacgacctgtcggtgtttgagatggatgtgcagagtcttatctctagagaggaatgcctgtgccatagcatgattcaggagacactacaggttatggaagccgcccctggcaccgggctccccaccgttggcttgttttccttcggagacccctgtggggaccgatttgagagggacacccgggtgtccctcttcggggccctggttcactctcgcacttacgacatggacgtgagactcggactgccccctgtccctgataatgccgaccttagtggactcgctatcaaggtgcccccatccgtagaccagtgggaagacgagggttttcagagcgcttccaacctcactccagattcccaatctgagccctctgtgacacctgatgttgatctgtgggaagccgctctgacgtacgaagcctcgaaacgcagatgctgggaacgcgtcgggtgccccccggggcatcgagaggagccttacctcactgaagccggacgggacgcgtttgataagttctgtaggttacatcagggcgagttgcagctgttagcagggggcgtgctacaagccccccagcctgtcctcgtgaaggaatgcgagcttgttaaggacgtcctcaacgttctgatcggggtcgtgagtgccactttcagcctttgtcagccagcccaggcgtttgtggtcaaacgtggggttcacgtctctggggcctcaccagagagcatcagtagtctgctttcagaagtggcggaatacggcacatgttatactcggctgtcccacttttctttgcagcccgtgctggattctttatatagcaaaggactggtctttcaagcatttacgtctggcctgcggcggtatctgcaatattacagggcttgcgtgttaagtaccccacccacactgtccctgctgacaattggattcctgtttaagaaactcggtcgccagctccgctacctggccgagctgtgcggagttggcgccgttcttcctggcacatgtgggggaggcccgcgtgctgcatttccgacgggtgttaaactcctctcatatttgtatcaggaggctctgcataattgttctaacgagcactacccagtgcttttgtcacttttaaagacttcatgtgagccttatacaagatttatccatgattgggtgtactctggggtcttcagagatgcatatggggaatttatgatacaggttaaccatgaatacctttcttttcgagacaaactttattggacccacggctacgttttgattagtaaggaggtcgaggattgcgttcccgtgtttctcaagcacatcgcgcatgatatctatgtttgcggcaagaccatcaacctgctgaagctctgttgcccccgtcattatctgtgttggtctgacgtgccagttcctcgcatctctgtcatcttttcattagaagagcttaaagaaatcgagaaagattgtgccgtgtacgtcgggaggatggagcgagttgcacggcactcttcagtcagcaaggaagagaaggaactacggatggaaatcgccaaacaagaactcatcgcccatgcacgcgaagccgcatcacgggtgctcagcgccctttcagaccgtcagatgtccgaacgcatggctctggatgcgcgaaagcgggaacagtttcagcgactcaaagagcaattcgttaaggaccaagaaaggagacaggcagccaggcaggaagagctagatgacgatttcagttatgcccgggaactgagggacagagaacgccggctaaaaagtttggaagaggagcttgaacgtaaagctagacaggctctcgtggaccactattctaagctctcagccgaagctgctcggagagaacagaaggccctttggaggatccaacggcatcggttagaatctgcccgcctgcgattcctgctcgaggacgagaaacacatccaagagatgctgaaagccgtttccgaagctcatcaaccacaagagccccccgatgtccttctttcagtacaccctcaggtaacgtcccctggcccagagcacccagaaggcggacaaggttgcgacagcggttccgctgagcagcacagccctgcctgggacggatggaatcggcccggattgctcacaccgcaacccctgaagccacttgctgtcggagctggcggacgggggctgcagcaagctgaaggggccagaccattttcggacagtctgagcattggggactttctccccgtgggccccggcgccgaacccagcgtgcagactggcatggtacctctgttggaagtggcgctgcagacaattaatctcgacctccctccatctgcacctggagaggctcccgccgccgcttccacgcagcccagccggcctcaggagtacgactttagtaccgtgctgcgccctgctgtagcaactagtccagccccagggcctctccaggccgctgagtgctccctgggctcatcaggcctgcagctgtgggaagactcttgcggaaagatggacgcttgtggaagcgccagtagggagacactgttgccaagtcaccctccacggcgggcggctctggaggagggctccagtcaacccacagaacgcctgttcggccaggtctccggtggtggactgcctacgggagattatgcctcggaaatagcacctacccgccctagatggaacacccacggtcacgtgagcgatgctagcattagggtcggagagaacgtgtctgacgtggccccaactcagcctaggtggaatacacatggccacgtgtcaaatgcatccatttccctgggcgagtccgtgtctgacgtggcccccaccagacctaggtggaacatccatggtcacgtgtccaacgccagcattcgcgttggcgagaacgtttccgatgttgcgcctacccgcccgcgttggaacactcacggccatgtaagtaacgcctccattagggtaggggaaaacgtctccgacgtagcccccacccgtccaaggtggaacacccacgggcacgtgagcgacgcatcgatttcactgggcgagagtgtctcagacatggcccccgctcggccccgatggaacactcatggacacgttagcgatgccagtatttctttaggagaatcagtttctgacatggccccaactagacctcgatggaatactcatggacacgtctccgacactagtatccgcgtgggcgagaatgtcagtgatgtggcccccatccgctctagatgtaatacgcacggacacgtgagcgatgcgagcatatcgctgggcgagccagtctctgatgtagtgagcacccgaccaagatggaacacacatgtgccaattccaccaccacacatggttttaggcgcattaagccctgaggccgagcccaacacccccaggccccagcagtccccaccaggtcacacaagtcagtctgcccttagtctgggggctcagtcaaccgtcttggactgcggacctcggctaccagtggaggtgggtccatctttaagtagtccatcaagtgggtgtggcgagggtagtattagcgttggggaaaatgtatcagacgttgctcccacacaaccatggtggccaaacacacccggcgattctgtgagcgaggagttagggcaatctagggttgccggagggcaagaatgggactgcgggacccaccgcgcctgggaggccttggggggggcgggcaccctccggacttctcttcagatcggcctgagcacacaccgcaagacacaattgcccagagcggcccaggcagtggtcagaaggagacggcaccgacggcggcggcttagagtaggctcccgtcctacatggcaagcctggcaggggtccaccacatggagcgggacccgcaccgttaccagtccctgtccatccaggcctcttttgatattttgtgccccctgctttcctggccccagcccatccccatggacgccccggtcttcactgcccctcatgcgccttctctgtagctag

SEQ ID NO: 25859 - DNA, 1077 bp, synthetic construct
  source 1..1077: mol_type = other DNA; note = Synthetic coding sequence
atggccccccagaacctgagcaccttctgcctgctgctgctgtacttgataggcgccgttatcgctggacgggacttctataagattctgggcgtgccgaggagtgccagcattaaggatattaaaaaagcatacagaaaactcgccctccaattacaccctgatcgcaacccagacgacccccaagctcaggaaaagtttcaggatctgggggccgcatatgaagtgctttcggattccgagaagaggaaacaatacgacacatatggtgaggagggactgaaggatgggcaccagtccagtcatggggacatctttagccatttttttggagacttcggctttatgtttgggggaacaccgcggcagcaagataggaatattcccaggggatcagatataattgtggatttggaagttacattggaagaggtgtatgcggggaattttgtggaagtggttaggaataagccagtggctcggcaagcacccgggaagcgaaagtgcaactgtcgccaagagatgcggaccacccaactcggccctgggcgattccaaatgacacaagaggtggtttgtgatgaatgtcctaatgttaaactggtcaacgaagaaaggaccctcgaggtggaaatcgaaccaggagttcgggatggtatggagtatccattcatcggcgaaggagaaccccacgtcgacggggagcccggtgacttgcgctttcgcatcaaggtcgtgaaacatccgatttttgagcggcggggagacgacttatataccaacgtgactatcagcttagtggaatctttagttgggtttgagatggatatcacacatctcgacgggcacaaggtgcacatcagccgggataaaatcactagaccaggcgctaaattgtggaagaagggggagggattacccaactttgataacaataacatcaaaggatcacttataatcaccttcgatgttgacttcccgaaggaacaactgacagaggaggcacgtgagggaatcaaacagttgcttaagcagggtagcgtgcaaaaagtgtataacggactgcaggggtactag

SEQ ID NO: 25860 - DNA, 2757 bp, synthetic construct
  source 1..2757: mol_type = other DNA; note = Synthetic coding sequence
atggccagcctgagccgggccctgcgggtggccgccgcccaccccagacagtccccaaccagaggcatggggccatgcaatctatctagcgccgccggacctaccgctgagaaatcagttccctaccagagaacgttgaaggaagggcagggcacctcggttgtggcacagggaccatccagacccttgccttcaacagcgaatgttgtagtgatagggggcggtagtttaggctgccagactttataccacctggctaagctgggtatgtccggagcggttctgctggaaagggagcgcctgacttctggaacaacttggcacaccgccggcctcctctggcagctaagaccatcagatgttgaggtggagctgctggcccatacacggagagtagtgtcacgcgagttagaagaagagactggcctgcacaccggatggattcagaatggtggcctttttatcgcctctaatcggcaacgcctggatgaatacaagcggctgatgagtctaggtaaggcttatggcgtggaaagccacgtgctgtccccagcggaaactaagactctgtacccacttatgaacgtcgacgacctctacggtaccttgtacgtgcctcacgacggaacgatggatcccgcaggcacttgcacgacgctcgccagggctgcttctgcccggggcgcgcaggtcattgagaactgccccgtgactggcattcgcgtctggaccgatgatttcggtgttcggcgggtggcgggggtcgagactcagcacggctccattcaaaccccttgcgtggttaattgcgctggagtatgggcgtctgccgtgggacgtatggctggcgtgaaggtgcctttggttgctatgcatcacgcctatgtagtgacagagcggattgagggcatccagaatatgccgaacgtaagagatcacgatgcctcagtctatttgagactgcagggcgatgccctatctgtaggaggatacgaggccaatcccatcttttgggaggaggtttctgacaagtttgcctttggcctgtttgatcttgactgggaggtcttcacccagcacattgagggggcaatcaatagggtgcctgtcttggaaaagaccgggattaagtccactgtctgtggtccagagtctttcacacccgaccacaaacccctgatgggagaggcacctgaactacgggggttcttcctgggctgcggtttcaatagtgcagggatgatgctgggcggggggtgtggccaagagctagcccactggatcattcacggccgtccggaaaaagatatgcacggatatgacattcgacggtttcaccatagcctgactgaccaccctcgctggatcagagaaagatcacatgaatcatatgcaaaaaactactctgttgtattccctcatgatgaaccgctagctggtcggaatatgcggcgtgaccctctgcacgaggagttgttgggccaggggtgtgtgtttcaggagcggcatggctgggagcggcctggatggttccatccaaggggacctgccccggttttggaatacgactattacggtgcctatggttctagggcacacgaagattatgcttatcgacggttactggccgacgagtacacctttgcttttcctcctcatcacgatacgataaaaaaagaatgtctggcctgccggggtgcggccgcagtgtttgatatgtcctatttcggcaaattctatctggtggggctcgacgccagaaaagccgcggactggctcttcagtgcggatgtctccagaccgccgggtagtaccgtttacacctgcatgctgaaccacagaggcgggactgagagcgatttgaccgtgtccagactggcaccgtcccatcaggcttcacctctggctcctgcctttgaaggcgatggatattacctcgctatgggtggagcggttgcacagcataactggagccacatcacgaccgtgctacaggatcagaagtcacaatgccaacttatcgatagctctgaggatttgggcatgatctcaatccaggggccagccagccgggccattctccaggaagttctcgacgccgatctctccaacgaagctttccccttctctacacataagctactgagggctgccggccacttagttagggctatgcgcctcagctttgtgggtgagctggggtgggaactccatatccccaaggcgagctgtgtgccagtttaccgcgccgtgatggctgccggcgctaagcatggcctcatcaatgctgggtatcgtgctatcgattccctgagcatagaaaagggttaccgccattggcatgccgacctcaggcccgacgactcccctctggaggcgggactggccttcacctgcaagttgaagtcacctgtcccttttcttggccgggaggctctggaacagcagcgagccgccggacttaggaggagactagtttgcttcactatggaagataaggtgcccatgtttgggctcgaggccatctggcgaaatggccaggtcgtgggccacgttaggcgggccgattttggcttcgcaatcgacaagacgattgcctatgggtacatccatgacccgagtggtggaccggtgtcgcttgattttgtgaagagcggagactacgctctggagagaatgggcgtcacatatggagcacaggcacacttgaaaagccctttcgatccaaataacaagcgcgttaagggtatttattag

SEQ ID NO: 25861 - DNA, 222 bp, synthetic construct
  source 1..222: mol_type = other DNA; note = Synthetic coding sequence
atgagctaccagcagcagcagtgcaagcagccctgccagccccccccccctgtgtgccgcctgccaaagcgacctgagccgtgtcccccattaaaatgccctgagccatgtccaccccctaaatgtccacagccttgcccgcctcaacaatgtcagcagaagtatcctctcgtgacaccaagtcctccatgtcagcccaagtgcccacccaaatccaaatag

SEQ ID NO: 25862 - DNA, 576 bp, synthetic construct
  source 1..576: mol_type = other DNA; note = Synthetic coding sequence
atgggcaagaagaccaagcggaccgccgacagcagcagcagcgaggacgaagaggaatatgtcgttgagaaagtgttggaccgacgcgtcgtgaagggccaggtggaatacctcctgaaatggaagggattcagcgaagagcataatacatgggagccggaaaagaacctcgactgtccggagctaatttccgagttcatgaagaagtacaagaaaatgaaggaaggggaaaataataagcctcgcgagaagagtgagtccaataagcgcaaatctaatttcagcaactccgctgatgacattaaatcgaagaagaagagggaacaaagtaatgatatcgcccgcgggttcgagcggggactggagcccgagaagataattggcgccacggacagctgtggtgatctgatgttcttgatgaaatggaaagacaccgacgaagctgatcttgtactggcaaaagaggctaacgtgaagtgcccccagattgtgattgcattctatgaggaacgactgacctggcacgcttatcctgaagacgctgaaaataaggaaaaggaaaccgctaagtcctag

SEQ ID NO: 25863 - DNA, 60 bp, synthetic construct
  source 1..60: mol_type = other DNA; note = Synthetic coding sequence
atgctgaagaacaagggccacagcagcaagaaggacaacctggccgtgaatgcagtgtag

SEQ ID NO: 25864 - DNA, 1026 bp, synthetic construct
  source 1..1026: mol_type = other DNA; note = Synthetic coding sequence
atggagagcaacttcaaccaggagggcgtgccccggcccagctacgtcttctcggccgacccaatcgcacggccatccgagataaatttcgacgggattaaacttgacctgtcacatgaattttcgttggttgccccgaacaccgaggccaattctttcgagtcaaaagactacctgcaggtatgccttcggatacggccattcacacagtctgagaaagagctcgaatccgaaggttgtgtgcacatcctcgatagtcagaccgtcgtgctgaaggaaccacagtgtattctgggcaggttgagcgagaaaagctctggacagatggcccaaaagtttagcttctcaaaagtattcggacctgctacgacccaaaaggagtttttccagggttgcataatgcagcctgtaaaagaccttctgaaggggcagtctcgattgattttcacatacggactgaccaactctgggaagacatatacttttcagggaaccgaagaaaacatcggcattttgcccagaactcttaatgttctttttgactctttacaggaaaggctgtacaccaagatgaacctcaagccgcataggtctagagagtatctgcggctcagtagcgagcaggaaaaagaggagatcgcttcaaagagcgccctgctccggcagattaaagaagtcaccgtccacaacgacagcgacgataccctgtatggctcccttaccaattctcttaacatttctgaattcgaggaatcaataaaggattacgaacaggctaacctgaacatggcaaatagcataaaatttagcgtgtgggtgtccttttttgagatctataacgagtacatttacgacctattcgtgccagaacttgctaaaacaaagggagaacttatcaaaacaaaggaggagctcaagaagagagagaatgaatccgactccttgattcaggagctcgagacttccaacaagaaaattattactcagaatcagcgcattaaggagcttatcaatattattgactag

SEQ ID NO: 25865 - DNA, 27 bp, synthetic construct
  source 1..27: mol_type = other DNA; note = Synthetic coding sequence
atggccgacaccgacctgttcatgtag

SEQ ID NO: 25866 - DNA, 2628 bp, synthetic construct
  source 1..2628: mol_type = other DNA; note = Synthetic coding sequence
atgatgtacaccgtgctgcccgacggcagccccgtgccccagggcatggccctgtatgcaccacctccacccctgcctaacaacagccgtcctctgacaccaggtacagtcgtttacggccctcctcctgccggagctcctatggtgtacggccctcctcctccaaatttctctattcctttcatccctatgggcgtacttcactgcaatgtccctgaacatcacaatctcgaaaacgaagtttcacgcttggaagacatcatgcagcacctgaaatctaaaaagcgcgaagagagatggatgcgcgcttcaaagcggcaaagcgaaaaggaaatggaggaactgcaccacaacatcgatgatctcttacaggagaaaaagtctctggaatgtgaggttgaggagttacaccggaccgtccagaaacgccagcagcagaaagatttcattgacggaaatgtagaatcactcatgactgaactagagatcgagaaatcactcaaacaccacgaagacattgttgacgaaatagagtgtatcgaaaagaccctactcaaacgaaggtctgagctccgtgaagccgaccggctgttggcggaggctgaatccgaactgtcttgcacaaaggagaagaccaagaatgctgtcgaaaaattcacggatgctaagcggagcttgcttcagactgagtctgatgcagaagaactcgaacggagggcccaagagactgctgtcaacctggtgaaggccgaccagcagctaaggagcctccaggctgatgccaaagacctagagcaacataagatcaagcaagaagagatcctaaaggagataaataagatcgttgccgccaaggattccgattttcagtgcctgtctaagaagaaggaaaagctgaccgaagaactccagaagctccagaaggacatcgaaatggccgaaagaaatgaagaccatcatctgcaggtgctcaaggaatctgaggtcctgctccaggctaagcgcgccgagctggagaagctgaagagtcaagttaccagtcagcagcaggagatggccgtgctggaccggcagctcgggcacaagaaggaagaactccacctacttcagggctctatggtgcaagcaaaggccgatctccaagaagcactgcggctcggtgaaacagaggtcactgaaaaatgcaaccacattagagaggttaaatcactgctggaggagctgtcttttcaaaagggtgagctaaacgtgcagattagcgaacggaaaacacagttgactctgataaagcaggagattgagaaagaggaggagaacctgcaggtcgtattacgccaaatgagtaaacacaaaaccgaacttaaaaacatcctagacatgctgcaactcgaaaaccacgagctgcagggcctgaagctgcagcacgatcagagagtcagtgagctggaaaagacacaggtagctgtccttgaagagaagctggaactcgagaatctgcaacagatttcacagcagcagaagggagagattgaatggcagaagcagttgctcgagcgagataaacgggagatcgagcgcatgacagccgaaagcagagccctgcagagctgcgtcgaatgtctttcaaaggagaaagaagatctccaagaaaagtgcgacatttgggagaagaaactcgcccaaacaaagcgggtgctggccgctgctgaggagaactccaagatggaacagtctaatctcgaaaagctggagctaaacgtgcggaagttgcagcaggaactggaccagcttaatagggacaagctgtccctgcacaatgatatctctgccatgcagcagcagcttcaagaaaaacgcgaagctgtgaattcacttcaggaggagctcgcgaacgtgcaggatcatctcaacctggccaagcaagacttgctgcacacgactaagcatcaggatgtgctcctctccgagcagactcggcttcagaaagacatatccgagtgggctaaccggttcgaggactgtcaaaaggaggaggagaccaaacagcaacagctccaggttctccagaacgagattgaagagaataagttaaagttagttcagcaagagatgatgttccagagactgcagaaggagcgggaaagcgaggagagtaagttggagacttccaaagtcaccctgaaagaacagcagcatcaacttgagaaggaactgactgaccagaaaagtaaactcgatcaggtgctatctaaggtcctggcagcggaggagcgggttcggacgttgcaggaggaggaacggtggtgcgaatctttggaaaaaaccctgagtcaaacaaagagacagctttccgaacgggaacagcagctcgtggaaaagtctggcgagctgcttgcactccaaaaagaggccgatagtatgagggcggacttctccctgctgcgtaatcagtttctgacagagcggaagaaggccgagaagcaggtggcttcactgaaagaagccctgaagatccagcggtcacagcttgagaagaacctgctgacagcacgagaagccgaggctcaaaagctgaagaagcaggtgtgtgcccagaaggcgcagcttgctagcctgggtcgggaatag

SEQ ID NO: 25867 - DNA, 1188 bp, synthetic construct
  source 1..1188: mol_type = other DNA; note = Synthetic coding sequence
atggagcccccccaggagaccaaccggcccttcagcaccctggacaatcgcagcggtcaggtacaggtgttaagcgctactccgttgttacagagaaacccttattcaagtcctgatatcatgcacatcaagggctcggaggcttcgagtgttccgtacgcacttaatcaaggaactacagccctgccaaagaacaagaatcaggagggtaccggccaccgactcctgaacatgctgagaaaaacattgaaagaatccgacagtgaggagcttgagataactcaggaaactcccaaccttgtgccatttggagacgtggtgggctgtttgggcatacatattaagaactgtcggcacttcatgcctaagatctctctgcagcactatgcaaatctattcatccggattagtattaataaggctgtgaagtgtaccaaaatgtgttccctgctgagcaaaaacgacgaaaaaaacactgtgatcaagttcgacgaggtaaaatacttctcagtgcaggtgcctcgccgctatgatgacaaacgcaataacattctcctagagctgatccagtacgacaaccgggaaaaacgagcgttcttgcttggcagcgttcaaatacacttatacgaagtgatccagaaggggtgcttcatagaagaagtccaggttctccacggcaacatctttgtctgtagactggaggtcgaattcatgttttcatacgggaatttcgggtatggtttctcccatcagctgaaaccgctccagaaaatcacagagcccagcatgttcatgaacttggcccctccaccagaaagaactgacccagtgactaaagttatcactcctcagactgtcgagtaccccgccttcttgagccccgacctgaatgttacagtcggaactccagccgtccagagcagcaatcaacccagcgtggtgcgactggaaaagcttcagcaacagccgagggaaagattggagaaaatgaaaaaggagtataggaacctcaacacctggatagataaggcaaattatctggagtctatcctcatgcccaagctggagcacaaggactcggaagaaacaaatatagatgaggcgtccgagaacactaaatctaatcatcccgaggaggaactcgaaaatattgtcggcgtgggcggattttttacaaagcgcatctag

SEQ ID NO: 25868 - DNA, 282 bp, synthetic construct
  source 1..282: mol_type = other DNA; note = Synthetic coding sequence
atgagctactaccagcggcccttcagccccagcgcctacagcctgcccgcatcactgaactcctctatcgtgatgcagcatgggaccagcctcgacagcacagacacatatccccagcatgcccagtctctcgacggcacaactagctctagcattccactttacagaagcagcgaggaggaaaagcgagttacagtgatcaaggccccacactaccccggaattgggcctgtcgatgagagcggtattcccaccgccatcaggacgacggtggatcggtag

SEQ ID NO: 25869 - DNA, 558 bp, synthetic construct
  source 1..558: mol_type = other DNA; note = Synthetic coding sequence
atggccgccagcgtggagcagcgggagggcaccatccaggtgcaggggcaggctctcttctttcgggaagccttgccaggaagtgggcaggctagattctccgtcctcctgctccatgggataaggtttagcagcgagacctggcagaatctggggactcttcacagattggcacaagccggctacagggctgttgccattgatctccctgggctcggccatagtaaggaggccgccgcgcctgctccaatcggcgagctcgcccctgggagcttcctcgcggcggtagtagacgccctggagctgggaccacccgtcgttcccgtggcgccaatctgtacagataagatcaacgcagccaattatgcatccgtgaagacaccagccttgatcgtctacggggaccaagaccctatgggacagacctccttcgagcacctcaagcaattgcccaatcatagagtcctgataatgaagggagccggccacccctgttaccttgataaaccagaagagtggcataccgggcttctggattttctgcagggacttcagtag

SEQ ID NO: 25870 - DNA, 1443 bp, synthetic construct
  source 1..1443: mol_type = other DNA; note = Synthetic coding sequence
atgctggagcggccccccgccctggccatgcccatgcccaccgagggcacccctccgcctctaagcggcacaccaatcccagttcccgcttacttccgacacgcggagccaggcttctcgctgaagcgccctcggggcctatctagaagcctccctcctcctccgcccgccaagggctctatacccatctcaaggctttttcctccacggacacctggctggcaccagttgcagcctcgtagagtgagctttcgaggagaggcctcggaaaccttgcaatcgcctggatatgatccctcccgccctgagtcatttttccaacaatccttccagcgtctgtcacggctgggacatgggagttatggtgaagttttcaaagtcaggtcaaaagaggacggccgtctgtatgctgtgaaaagatcgatgtcaccctttcgcggacctaaagatagagccaggaaactagcagaagtgggcagccacgagaaggtgggtcagcacccttgctgtgttcggctggagcaggcgtgggaggagggcggaatcttgtacctgcaaacggaattgtgtgggccatcactgcagcaacattgcgaagcctggggcgcctctttacctgaagcccaggtttggggctatctgagggatacgttactggccctcgcacacctgcactctcaggggctggtccacctggacgtgaaacctgccaatatatttctgggtccacgggggcggtgcaagctcggcgattttgggctgttggtggaactgggaaccgccggggccggagaggtgcaagaaggcgacccaaggtacatggccccggaattgctccaggggagctatggaacggctgcagacgtgtttagccttggcctaaccattcttgaggtcgcctgcaatatggagttaccccatggcggggagggatggcagcaacttcggcagggctacttgccacccgaattcactgccggcctgagctctgagttaaggtcagttctggtaatgatgctggaacctgaccctaaactccgggctaccgctgaggcactacttgccctgcccgttctcagacaacccagagcatggggcgtgctctggtgtatggccgccgaagcactttcgcgaggatgggctctatggcaggcgctgttagccctgttatgttggttgtggcatggtctcgcacaccctgcctcttggttgcagccattggggcctcctgcgacccccccgggctcccccccctgctctctattactggacagctcactctcctccaattgggacgacgatagcctcggccccggacacccaccttgcctggcttgtccccctgctgggctccactcccccctgaggctgagttggcctggtctatggggagcccctccgccccccggcgcaggagcccaccctggtatgccttggacctag

SEQ ID NO: 25871 - DNA, 1740 bp, synthetic construct
  source 1..1740: mol_type = other DNA; note = Synthetic coding sequence
atgagcgccgccaaccccgagacccccaacagcaccatcagccgggaggcctctactcagtcaagcagtgcagctgccagccaagggtgggtgctgcctgaggggaagatcgtccccaataccgtattcgtcggcggtattgacgcccggatggatgaaacagaaatcggttcttgttttggtcgttacggcagtgtcaaagaggtcaaaattatcaccaaccgcacgggggtgagcaaagggtatggattcgtaagctttgtgaatgacgtcgatgtacagaaaatagtgggctcacagattcactttcacggcaaaaaactgaaactaggcccagcaatcaggaagcaaaagctgtgtgccagacacgttcaacccagaccactggttgtgaatccccctcccccccctcagtttcaaaacgtgtggcgcaatccgaatacagagacctatctgcaaccacagatcacaccaaaccctgtgactcaacatgtccaatcggctgccaatccggagactcccaatagtaccatctctcgcgaggctagcacgcagtcgagttccgcggccgcctctcaggggtgggtcttgcccgaaggaaagatcgtccccaatactgtgtttgtcggtgggatcgatgcccggatggatgagactgagattggctcttgtttcggccgatacgggtcggtgaaagaggtgaaaattatcacgaatagaactggggtgagtaaaggatatggatttgtgtccttcgtaaacgacgtggacgttcaaaagatcgtagggagccagatccacttccacgggaaaaaacttaaactgggacccgccatcaggaagcagaagctctgtgcacgtcatgtacagcccagaccgttggtagtcaatccaccgccaccccctcagtttcaaaacgtgtggcgaaacccaaatactgagacctatctgcagccccaaattacacctaacccggtcactcaacatgtccaagcatatagtgcttacccccattcaccaggtcaggtgattaccggctgtcagttattggtctataactatcaggagtaccctacctatccagactccgctttccaggtgacaaccggataccaactgcctgtttacaattaccagccctttccagcttaccccagaagtccattccaggttacagccgggtatcagctgcctgtgtacaattatcaagccttccctgcttacccaaactctccttttcaagttgcaacaggctaccagttcccggtgtataactatcagccttttccagcctatccatctagcccgttccaggtgaccgctgggtaccaattgccggtgtataattaccaggcgttcccagcctatccaaactccccatttcaagtggcaacagggtatcaattcccagtgtacaattatcaagcttttcccgcctatcctaacagtcccgttcaagtgacgacaggatatcagctccccgtgtacaattatcaggccttccccgcctatccgtcatcacctttccaagtaacaactggctaccaactgcctgtgtacaattatcaggcttttccggcctatccaaattctgcagttcaagtgaccaccggataccagttccatgtttacaattaccaaatgcctccccagtgtcccgtgggggaacagcgccgcaatctctggacagaggcctataagtggtggtacctggtttgtctcatccagaggcgcgattag

SEQ ID NO: 25872 - DNA, 975 bp, synthetic construct
  source 1..975: mol_type = other DNA; note = Synthetic coding sequence
atggaggccctgggccccggcggcgaccgggccagccccgccagcagtaccagctcactggatctgtggcacttgtcgatgcgtgctgacagcgcctactctagcttttccgccgcatccgggggcccagagccacgaacccagtcacccggaactgatttacttccttacctagattgggattatgtgcgtgtcgtgtggggaggtccagggccagcccctccagacgctgcactctgcacctctccccgtccacgccctgcagtagccgctaggtctggcccacaacctactgaggtgcctggaacacctgggccactgaatagacaagccacacctctgctttacgccctggccgctgaggccgaggcagcagcccaggccgccgagcctccatctccgcctgccagtcgggcagcatatcggcaacggctgcaaggcgctcagcggagggtgcttagggagacttcttttcagagaaaagaattaaggatgagcctccctgcgaggctgaggccgaccgtaccggcaaggccaccagcaactcatccccggagcgctagcctcagtcatcccggaggggaaggggagcccgctcgaagtcgagcaccagcacccgggactgcaggcagaggccccctagctaaccagcagcgcaaatggtgttttagcgagcccggaaaattagatcgggtgggtcgggggggcggacccgccagagagtgtctaggcgaagcctgctcttctagtggcctgcctgggccagagcctcttgaatttcagcatcccgccctagcaaaatttgaagaccatgaggtcgggtggttacctgagacacagccgcaggggagcatgaatctcgatagcgggtcacttaagctaggtgatgcgttccggcctgcatccagaagtcggtcagcaagcggtgaagtacttggatcatggggcggctcgggagggaccatacctatttag

SEQ ID NO: 25873 - DNA, 780 bp, synthetic construct
  source 1..780: mol_type = other DNA; note = Synthetic coding sequence
atgccccgggcccggagcggccggcggagccggggcgccggcggccgtgaagaaacattcctgagggttcgtgctaacaggcagacacgcctgaacgctcggatcggcaaaatgaaaagaaggaaacaagatgagggacaacgcgaggggtcttgcatggcggaggacgacgccgtcgacatcgagcacgagaataacaacagattcgaggagtatgaatggtgcggacagaaaagaatcagagccacaaccttgctggaaggcggcttccgggggagcgggtttattatgtgcagcgggaaagagaaccctgatagtgacgctgacctggacgtggacggtgatgacactctggaatatggtaaaccccaatacacagaagcggatgtgataccatgtacgggtgaagagcccggggaggctaaagaacgtgaagctctgagaggggcagtgctgaacggcggtccacctagcaccaggataactccagagttttccaaatgggccagcgatgaaatgcctagtacctctaatggagagtcaagcaagcaggaggccatgcagaagacttgcaagaattctgatattgagaaaattaccgaggattctgccgtcacaacattcgaggctctcaaggctcgcgtgcgcgaattagaacgacagctgtccagaggagacagatacaaatgcctgatctgcatggactcttactctatgccactgacatcaatccagtgctggcatgtccattgcgaagaatgctggttacggactctttag

SEQ ID NO: 25874 - DNA, 369 bp, synthetic construct
  source 1..369: mol_type = other DNA; note = Synthetic coding sequence
atggccaccagcgcccccctgcggagcctggaggaggaggtgacctgtagcatttgcctggactatctccgggatccagtaaccattgactgcggccatgtgttttgccgcagctgcaccaccgacgtgcgcccgatttcgggctctcggcccgtttgcccgttgtgcaaaaagcctttcaagaaagaaaatatccgtccagtgtggcagctggccagtctggtggagaacatcgagcgcctcaaagtggacaaagggaggcagcctggagaagtcaccagagaacagcaggatgccaaactctgtgagcggcaccgtgaaaagctgcattactattgtgaggacgacggcaaactcttatgtgtttag

SEQ ID NO: 25875 - DNA, 984 bp, synthetic construct
  source 1..984: mol_type = other DNA; note = Synthetic coding sequence
atggccagcttcctgaagggcgcccacgtgaccatcaacgcccgggccgaagaggatgtcgaacccgaatgtatcatggaaaaagtggcgaaagcttcaggcgccaactactcttttcataaggagtccggcagatttcaggacgttggtcctcaagctcccgtggggagtgtgtaccagaagactaatgctgtatctgagattaaaagggtcggaaaagactccttctgggccaaggcggaaaaagaggaggaaaaccgacgcctggaggagaagcgtcgagctgaagaggctcagcgacagttagagcaggagcgtagggaaagagagctaagggaggctgctaggcgggagcagcgctaccaggagcagggcggagaggcatccccccagcgaacgtgggagcaacaacaggaagtggtgtctcgtaatcggaacgaacaagagagcgctgtccaccctcgcgaaatttttaagcaaaaagagcgggccatgtccaccacctcaatctcttcaccgcaacctggcaaactgagatcaccttttttacagaaacaattgacccagcccgaaacccatttcggaagggagcctgctgccgcaatttcccgaccacgggccgaccttcccgccgaggagccggctccctcaacacccccctgtctagtgcaggcagaagaagaagcggtgtatgaagagccgcccgaacaagagactttctacgagcagccacccttggtgcagcagcagggcgccgggtccgagcacatcgatcaccacatccagggccagggcttgtcaggccaggggctgtgcgcgcgcgctctttacgattaccaagccgctgacgacaccgaaattagcttcgaccctgaaaaccttatcactggcatcgaagtgatagacgaaggttggtggagggggtatggaccagacggccattttggcatgttccccgccaattatgtcgaattgatcgaatag

SEQ ID NO: 25876 - DNA, 438 bp, synthetic construct
  source 1..438: mol_type = other DNA; note = Synthetic coding sequence
atgcagggccggatcaccaaggtgctgaacatgaagccccccgagattctgtccatgattgaggaggccgctggcactcggatgtacgaatacaaaaaaatcgctgcacagaagactattgaaaagaaggaggccaagctgaaggagatcaagactattctcgaagaggagataactcccacaatccagaagctgaaagaagagcgctcgagctatctggagtaccagaaagtgatgcgggagatagagcatctgtctcgtctgtacatcgcataccagtttctgctggccgaggataccaaggtgaggagcgctgaagaactcaaggaaatgcaggataaagtgataaagttacaggaagaactgagcgagaacgataaaaagatcaaagctctgaaccacgaaattgaagaactcgaaaaaagaaaagataagtag

SEQ ID NO: 25877 - DNA, 816 bp, synthetic construct
  source 1..816: mol_type = other DNA; note = Synthetic coding sequence
atggagaaggagaccggcatcagccagcagcggaactactacttcacacaaagcaaaggggagcccctgcagattgatcaccttgtctttgtagtccacggaattggaccagcctgtgatctccggttccgcagtattgtccagtgtgtgaatgacttccgttctgttagtctgaacctactccagacgcactttaagaaggctcaggagaatcagcagattggcagagtagagtttttgcctgtgaactggcatagtcctctgcactctacaggagtcgatgttgacttgcagcggataaccctgccaagcatcaataggttgagacatttcactaacgacacaattctagacgtgtttttttacaactctccaacctactgtcagacaatcgtggacactgtcgcatccgaaatgaacaggatttacacgctatttctccagagaaacccagatttcaaaggaggcgtgtctatagccggacacagtcttggttctttgatcctgtttgatatcttaactaaccagaaagactctctgggagatatcgacagcgaaaaagatagcttgaacattgtgatggaccagggtgacaccccgacgcttgaggaagacttaaaaaagcttcagttgagcgagttctttgacatcttcgagaaggagaaggtggacaaagaagccctggccctgtgtaccgacagggatcttcaagaaattgggatcccacttggtccaaggaagaatctctctagtgctgtggcagtgattttggaaatggtaacaatctggatgctggccctggggcgttgtttgtag

SEQ ID NO: 25878 - DNA, 1818 bp, synthetic construct
  source 1..1818: mol_type = other DNA; note = Synthetic coding sequence
atgggcggctgcttcagcaagcccaagcccgtggagctgaagatcgaggtagtcctgccagagaaggaaagaggcaaggaggaactgtccgccagtggaaagggcagtccccgagcataccaaggaaacgggactgcaaggcacttccacactgaggagcgactcagcactccacacccttacccatctccacaagattgcgttgaggccgccgtatgccatgtgaaagacctcgagaacggccagatgagagaagtagaattggggtggggtaaggtgctgctggtgaaggataacggcgagttccacgcattagggcacaagtgtccacactatggggccccgctcgtcaagggggtactgtcccgcggcagagtgcgctgcccatggcacggagcatgtttcaacatctctaccggcgacctggaggatttccccggactggactctttgcacaaatttcaagtgaaaattgaaaaggagaaggtttacgtgcgcgcttccaaacaggccttacagcttcagaggcgcacaaaggtgatggcaaagtgcatcagtccaagtgctggttactccagctcgacaaatgtgcttatcgtgggtgccggggctgcagggctcgtatgcgcagagaccttgcgccaagaagggttttccgaccgaatcgttctgtgtactctcgacagacatctgccatatgatcgtccaaagttaagcaagtccctagacacgcaaccagaacagctggcccttagacctaaggaatttttcagagcatacggtatcgaagtcctcactgaagcccaggtggttactgtcgacgttaggactaaaaaggttgtgttcaaagatggtttcaagttagagtacagcaaactgctccttgcccctgggtctagcccaaagaccctgagttgtaaaggaaaggaggtggagaatgtctttacaataagaacacctgaggacgccaacagggtcgtaaggcttgcgagaggaagaaatgtagtggtggtgggggccgggttcctgggcatggaagttgccgcctatctgaccgagaaggctcactctgtcagcgtcgtggaactagaggagacgccttttcgaagatttctgggagagagggtcggaagagcgctcatgaagatgttcgagaataaccgggtcaagttctatatgcagacagaggtgagcgagctgcgtggacaggaaggtaagctgaaagaggtggtactgaagtcttccaaagttgtgagagcggatgtatgcgtcgttggcattggtgccgttcccgctactggattcctccgtcagagtggtattggtctggactccagagggtttattccagtgaacaaaatgatgcagacaaatgtgccaggggtgttcgcagcaggcgatgctgtgaccttccccttggcatggcggaataaccgcaaggtcaacatacctcactggcaaatggcccacgcccaaggacgagttgctgcccagaatatgctggcccaggaagccgagatgtcgaccgtaccgtacctctggactgcaatgtttggcaaatcgttgagatatgcaggatatggcgagggttttgatgatgttatcattcagggagatcttgaggagctaaaattcgtggcattctacacaaagggcgacgaagtgatcgctgttgccagtatgaactacgatccaatcgtcagcaaggttgccgaagtgctagcctcgggccgtgccatccgcaaacgagaagtggagctcttcgtgttacattccaaaacaggcgacatgtcttggctcactggtaaaggaagttag

SEQ ID NO: 25879 - DNA, 294 bp, synthetic construct
  source 1..294: mol_type = other DNA; note = Synthetic coding sequence
atgcagaccagcagcagccggagcgtgcacctgagcgagtggcagaagaattattttgcaatcacttccgggatctgcaccgggcccaaggcagatgcttatagggctcagatactcaggatccagtatgcatgggccaactcagagatttctcaggtctgtgctaccaaactgttcaagaagtacgcggagaagtactccgccattatcgactctgataatgttgagagtggattgaataattacgcagagaacattcttacccttgcaggtagtcagcagacagattcttag

SEQ ID NO: 25880 - DNA, 333 bp, synthetic construct
  source 1..333: mol_type = other DNA; note = Synthetic coding sequence
atggaggagatccccgcccaggaggccgccggcagcccccgggtgcaatttcaaagtcttgagactcaatccgagtgcctgtcacccgagccccaatttgtgcaggacaccgacatggaacagggcctgacaggcggaatacttctgagattacccactactcggattcactcggtcaattcttgccctgccctgtcccacacccaagcatccgctttttccggcgagaccttggccgtgctgacagcgggcatcagtaagaggtggcccaagtatagactcccaattgatattgcccggccctgttccgaaacgccattcccacgactgtag

SEQ ID NO: 25881 - DNA, 627 bp, synthetic construct
  source 1..627: mol_type = other DNA; note = Synthetic coding sequence
atggagccccccatggagcccagcggcggcgagcaggagcccggcgctgtgaggtttctggatctaccatgggaggacgtcctgctgcctcacgtgctcaacagagtacccctgcgccagttgttacggctccagagagttagccgcgcattcaggagtctagtgcaactgcaccttgcaggcctcaggagattcgacgcagcacaagtaggccctcaaatccccagggcagctcttgcacgtctgctcagagacgctgagggtctgcaggagttggccctcgcaccttgtcatgagtggctctctgatgaagatctggtgcccgtactggcgcgaaacccccaactcaggtccgtggcactagggggatgcggtcagctgtctcgacgagctctaggagccctggctgaaggttgtcccaggcttcaaaggctgagcctcgcgcactgcgattgggtagatggactcgcactccggggcctggcagataggtgcccagccctggaggagctcgatttgaccgcctgtagacagctcaaggacgaggctatcgtctatctagcacagcgccgcggtgcaggacttcgaagcctgagtctggctgtcaacgcaaacgtgggagattag

SEQ ID NO: 25882 - DNA, 1419 bp, synthetic construct
  source 1..1419: mol_type = other DNA; note = Synthetic coding sequence
gtgacccactacaagcagtacccccccaacaccagcaaggtgtacagttactttgaatgccgcgaaaagaagaccgaaaactcaaaactgcggaaggtgaagtacgaggaaaccgtcttttatgggctgcaatacattttaaataaatatctgaagggaaaggtggttaccaaggagaagatccaggaagccaaagacgtttataaggagcacttccaggacgatgttgtgaatgagaaaggatggaattacatcctggagaagtacgacggacaccttccaattgagattaaggccgtgcctgaggggttcgtcataccacggggcaatgtgcttttcaccgttgaaaatactgatcctgagtgctactggcttacgaattggattgagacaattctcgtgcagtcctggtatcccattaccgtcgcaactaattcccgtgaacagaagaagattctggccaagtacttgcttgaaaccagcggcaacctggacggtctcgagtataagctgcacgattttggttaccgcggagtgagcagtcaagaaaccgcagggatcggggcttcagcacaccttgttaactttaagggaacagataccgtggccgggttggcactaaacaaaaaatactatgggaccaaagatcccgtcccaggatacagcgtgcccgctgcagagcactccaccataactgcctgggggaaagaccacgagaaagatgcattcgagcacattgttacccagttttcctctgtgcctgtgtccgtcgttagcaattcctacgacatctataacgcttgtgaaaagatctggggggaggatctgagacaccttatcgtgtccaggtccacccaagcccccctcatcattcgccccgattccgggaaccccctggataccgtcctcaaagtgttggagatcctggggaagaagttcccagtgaccgagaatagcaaaggatacaaactgctgcccccttatctacgggtaatccagggcgacggagtcgacattaatactctgcaggaaatcgtggaaggcatgaagcagaagatgtggtctatcgaaaacatagcctttgggtcaggcggcggcttgctacagaagcttacaagggatttactgaattgcagcttcaagtgctcatacgttgtaacaaatgggctggggatcaatgtgttcaaggacccagtcgcggacccaaacaagcggtctaagaagggcaggctctctcttcatcggacccctgcaggtaactttgttactctcgaggaaggtaaaggggatttggaagaatatggccaggatctgctgcatactgtgttcaaaaatggcaaggtgactaagagctattcctttgatgagatccggaagaacgcacagttgaatattgagctcgaggccgctcaccactag

SEQ ID NO: 25883 - DNA, 519 bp, synthetic construct
  source 1..519: mol_type = other DNA; note = Synthetic coding sequence
tgcaagcagagcaccaagaccgaggagaagctgcggcccacccggactagcagtgaatccatatattcccggccaggctcttcaatccccggctccccagggcatactatctacgccaaggttgacaacgaaattctcgactataaggacctcgcagccattcctaaggttaaggctatctacgatatcgaaaggccggaccttattacctacgaacccttttatacatctggctatgacgataagcaagaaagacagagtctcggagagtcaccccgcacgctgagccccaccccttcagccgaaggctaccaggacgtaagagatcgcatgatacaccgtagcacctctcagggctctatcaatagcccagtctattcacgccattcttatactccaaccacctcgagaagtcctcagcacttccatagacctgaccagggcataaatatctaccgtaagccacctatctataagcaacatgtactgtttgaggtcatcctgttgctgctgatctag

SEQ ID NO: 25884 - DNA, 2445 bp, synthetic construct
  source 1..2445: mol_type = other DNA; note = Synthetic coding sequence
atgcggctgctggacggcaagcagaccagccggtacagcgagaacgcctgtgaaaaaaagattttctcaatttatggacattaccccgtggtacgcgctgcactgaggaggaagggttgggttgagaagaaattccattttctcccaaaggtcatcccagatgttgaggatgaaggcgctagagttaacgatgatacgtgcgccaaagtgaaagagaaccaggaaatggcgcttgagaagaccgacaacatacacgatgttatgtcacgcctcgtgaaaaatgagatgccatatctgctatggaccataaaaagggatatcatagattatcactcactcacctatgaccagatgctgaaccactatgccaaaactgccagcttcaccaccaagatcgggctgtgtgtgaacatgagatctctgccctggtacgtgcccgcgaatccagattcattcttcccccggtgctactccctctgtacagaatctgaacaacaggagttcctggaagatttccggcgaacaatggctagcagtattctgaagtgggtcgtttcccatcagtcatgttcacgcagctctcgttccaaaccccgtgaccagagggaagaggcggggagctctgacttgagctcccgtcaggacgcggaaaatgccgaagcgaagttgagggggttacctggacagctggtggacattgcttgtaaggtctgtcaggcataccttggccagctggaacacgaggatatcgacactagtgcagatgctgtcgaggacttgaccgaagccgagtgggaagatctcacccagcaatactacagcctggtgcacggagacgcattcataagcaatagccgaaattacttttcccagtgccaggcactactgaaccgtatcacctccgtcaacccccagacggatattgatggcctgagaaacatctggataattaagcccgcagccaagtctagaggacgcgatattgtgtgtatggacagggtggaggaaatactggaattggccgcagctgatcacccactaagcagagacaataaatgggtagtccaaaagtacattgaaactccactgttaatctgcgacactaaattcgacatcaggcagtggttcctagtaaccgactggaacccattaactatctggttctacaaagaaagctacttacgattctctacgcaacgcttttctctcgacaaacttgactccgccatccacctgtgcaataacgcggttcagaagtacttgaaaaatgacgtggggcggagccccctgcttccagcccacaacatgtggacatccacgaggtttcaggagtatctgcagcggcagggccggggagccgtctggggttctgtgatttatccctcaatgaagaaggccatcgcacatgcgatgaaagtggcacaagaccacgtcgagccacgtaagaacagcttcgaactttatggagccgacttcgttctcggccgcgatttcaggccatggttgatcgagattaacagctcacctacaatgcacccttccaccccagttacagcccagctgtgcgcccaggttcaggaggacactattaaggtcgcggtcgaccgatcatgtgacattggcaatttcgaattgctgtggcgtcagcccgttgtggaaccccctcccttctccgggtctgatctatgcgttgcgggggtttccgtacggagagctcgtcgccaggtccttcccgtctgtaatttaaaagcctccgcttccctcttagatgcccagccgttaaaggcccgggggccctccgcaatgcccgatccagcccaaggtccaccctcacccgcactgcaacgcgacttgggactcaaggaagagaaggggctgccactggccctgctggcaccacttaggggggccgctgagagtggaggagctgcccaaccaactaggaccaaggccgcagggaaagtcgagctccctgcatgtccttgcagacatgtggattcccaggcaccaaatactggtgtccccgtggctcagcccgcaaaatcctgggaccctaaccaactaaacgcccaccccctggagccagtactccgaggccttaaaaccgccgaaggcgccctccggcctccaccgggaggcaaaggagaaggaactgtctgtagccgactgcctcatcacggccatcacgttgccgcctgccagaccaccgggactacctgggatggcggcccgggcgtgtgtttcctccgccagttgctggcatccgaacttccgatgggtcccggacttccacgggacccgcgagctcccccatgtctggtgtgccggggtcttctgcctccggctggcccctgcaagaggtgcagatctttttgcgccgcagtcctccaaggtgcttcatttgtccgactcggtgggcgatcatgcagccctcgcacaccatag

SEQ ID NO: 25885 - DNA, 318 bp, synthetic construct
  source 1..318: mol_type = other DNA; note = Synthetic coding sequence
atggacaagaacatcggcgagcagctgaacaaggcctacgaggcctttcgtcaagcctgtatggacagggattcagcagtcaaggaactgcagcagaagacagaaaactacgaacagagaatccgcgaacagcaggaacagctgtccctgcagcagaccattatcgacaaactgaagtcccagctcctcctcgttaattctacccaggataataactacggttgcgttcctctgttggaggactcagagacccgcaagaataacctgacattggaccagccacaagacaaggttatctcaggcattgccagggaatag

SEQ ID NO: 25886 - DNA, 816 bp, synthetic construct
  source 1..816: mol_type = other DNA; note = Synthetic coding sequence
atggcccccgtgggcgtggagaagaagctgctgctgggccccaacggccctgcagttgccgcggcaggggatctgacatcggaggaggaagaaggccagtccctttggtcttctatactcagtgaggtcagtacacgcgcccgaagcaagctgccaagcggaaaaaatattcttgtctttgaccacacacgctgtaacgtttggattcttgatggtgacctctaccacaagggcctgcttaaatttgctgtctccgctgaatcacttcctgaaactcttgtcatcttcgtcgctgatatgagtcgcccctggaccgtgatggagagccttcagaagtgggcctccgtcctgagagaacacatcgataagatgaaaatccccccagagaagatgagagaactcgaacgaaaatttgtgaaagatttccaggattacatggaacctgaagaaggatgccagggatccccgcagcgaaggggtcctctcacctccggctcggatgaggagaatgtagcactgcccctgggcgataacgtattgacacacaatctcggcatacccgtactcgtcgtctgcactaagtgcgatgctgtgtccgttctggaaaaggaacatgactatcgcgatgagcatcttgacttcattcagtcacacttaagacgtttttgccttcaatatggagccgcacttatttatacgtcagtgaaagaggagaagaacctagacctgctttacaagtacatcgtgcacaagacatacggttttcattttacaaccccagcattagtcgtagaaaaggatgccgtgtttatgtag

SEQ ID NO: 25887 - DNA, 522 bp, synthetic construct
  source 1..522: mol_type = other DNA; note = Synthetic coding sequence
atggccgaccggatgcagatcgtggtgatcctgagcgagttcttcaacaccacctggcaggaagccaattgtgcaaactgtctgaccaacaactcagaggaactcagcaactctacagtttacttcctgaacctgttcaatcacacactaacctgttttgagcacaacctacaggggaacgctcactcccttctgcagaccaaaaactacagtgaagtctgcaaaaattgtagggaagcctacaagacactgtcttctctctattctgaaatgcagaaaatgaatgagctggaaaacaaggcagagccggggactcacctctgtatcgatgtcgaggatgcgatgaacatcacccgaaaattgtggtctcggacattcaactgtagcgtgccatgctccgacaccgtacccgttatcgctgtgtccgtgtttatcctgttcctgccagttgtcttctacctcagctcctttcttcactctgagcagaaaaaaagaaagctgatcttgccaaagcgcctgtag

SEQ ID NO: 25888 - DNA, 435 bp, synthetic construct
  source 1..435: mol_type = other DNA; note = Synthetic coding sequence
tgattcatccactgcaccgacgacagccccgacccctgcatcgagtatgagcttgtgcttcgcaagtggtgtgagcttataccaggggccgagttccgttgctttgtcaaggagaacaagttgattggcatttcccagcgtgactacactcagtattatgaccatattagcaaacaaaaggaggagatcaggagatgcatacaggactttttcaaaaagcatattcagtataaatttctggatgaagattttgtgtttgatatttatcgtgactctcggggcaaagtctggttgattgattttaacccttttggtgaagtgacagattccttacttttcacatgggaggagctgatctcagagaataacttgaatggtgatttttccgaagtcgacgcacaggaacagaagagaaaccagcaagaagatgattag

SEQ ID NO: 25889 - DNA, 978 bp, synthetic construct
  source 1..978: mol_type = other DNA; note = Synthetic coding sequence
tgaatccagggcgaggccagccggcgggccgccggcgagcccgaggccgggagcgactacgtgaagttttccaaagaaaagtacattctagattcttctcccgagaagcttcataaggagctggaagaggaactgaagctatcatcaactgatttaaggtcacacgcatggtaccacggaaggattccacgagaggtcagcgagaccctggtgcagaggaatggcgatttcctcatcagagactctctgacaagcctgggggactatgtgctgacctgcaggtggaggaatcaagctctgcattttaagattaataaagtcgtagtcaaggcaggagagtcgtatactcatatccagtatttattcgaacaggaatcctttgaccatgtccccgcattggtgcgataccatgtgggcagccggaaagccgtgagtgaacagagtggcgcgattatatactgccctgtgaacaggacattcccactccggtatctggaggctagttatggcctcgggcaaggctcttcgaagcctgcatcccctgttagcccaagcgggcccaaagggtctcacatgaaacggagatcagtgactatgacggatggattaaccgccgacaaggtgactcgcagtgatggttgccctactagtacttcattgccgcgtcccagagattccattcggagctgcgccctgagcatggatcagatacctgacctccactcaccaatgagcccaatttcagagagcccaagctcaccagcctactctacagttacgcgagtacacgctgcacctgctgctccgagtgcaacagccctgccggcttcccctgtggccagacgcagcagcgagccacagctgtgcccaggtagtgcccccaaaacacacggcgagtctgataaaggcccacatacctccccgtcgcacacactgggtaaggctagccccagcccctcccttagctcatatagttag

SEQ ID NO: 25890 - DNA, 330 bp, synthetic construct
  source 1..330: mol_type = other DNA; note = Synthetic coding sequence
atgagcagcaagggcagcagcaccgacggccggaccgacctggccaacggtagcttgtcttcctctccagaagagatgtctggggccgaggaggggcgggagacatcctccggaattgaggtggaggcaagcgacttatcactgtctctgacaggtgacgatggcgggcccaaccggactagcaccgagagcagaggaaccgacactgaatcctccggcgaggacaaggacagcgactccatggaggacaccggacattattccattaacgacgaaaatcgcgtccacgatcggtcggaggaagaggaggaggaagaggaagaagaatag

SEQ ID NO: 25891 - DNA, 1638 bp, synthetic construct
  source 1..1638: mol_type = other DNA; note = Synthetic coding sequence
gccgccggcgccccccggctgctgggccccggcgccgtgcggggccccgcaggcgtgggacgcgtggccgccggcgcgatggagggggtactgtataagtggaccaattacctgtccgggtggcagcctcgctggtttcttctgtgcggaggcatcttaagctactatgacagccctgaagatgcctggaaagggtgtaagggatctattcagatggccgtgtgtgagatccaggtccatagcgttgacaacacccgtatggatctgatcattcctggagaacaatacttctacctgaaggccagatcggtggctgagagacaacggtggttggttgccctgggcagcgccaaggcttgtctgaccgactcccgtactcagaaggagaaggagttcgccgagaacacagagaatttgaaaaccaagatgtccgagcttcgactgtattgcgacctgttagtgcagcaggttgataagaccaaggaagtaactactacgggggtcagcaattctgaggagggtatcgatgtcggtacgctcttgaagagtacttgtaatacattcctgaaaactttggaggaatgcatgcagatcgccaacgcagctttcacaagtgagctgttatacaggaccccccccgggtccccccagctagcaatgctgaagagttctaagatgaagcaccctattatcccaatacacaattcactcgagagacagatggaactcagtacatgcgaaaacggctcccttaacatggagatcaacggtgaagaggagatacttatgaaaaataagaacagtctttatctgaagtccgctgaaattgattgttccatcagtagtgaagagaatacagatgataatattactgtgcagggggagatacgcaaggaagacggtatggaaaatttaaaaaatcacgacaacaatctgacacagagcggctcggactcatcttgctccccagagtgtctctgggaggaaggcaaagaagtcatcccgacattttttagcacaatgaatacctcattcagtgacatcgagcttctcgaggatagcggaatcccaacagaagccttcctagcaagctgttacgctgtggtccccgtcctcgacaaactgggtccaacggtgtttgcgccagtcaagatggatctggtggggaatatcaaaaaggtgaatcagaagtacatcacaaacaaagaagaatttaccacgctgcagaagattgtgctacacgaggtggaagccgatgtggcgcaggtccgaaactccgccactgaggctttactatggctcaagcgagggctcaagtttctgaagggatttctgacggaggttaagaatggcgaaaaggacatccagacagcattgaataacgcgtatggcaaaacactaaggcaacaccatggatgggtcgtcaggggcgtgttcgcacttgcccttagagccgccccatcttacgaggattttgtagcggccctaaccgtcaaggagggcgatcatcagaaggaagccttctccattggcatgcagcgggatctgagtctgtacttgcccgccatggaaaaacagctcgccatactcgataccctgtatgaagtgcacggtctcgaatccgacgaggtggtttag

SEQ ID NO: 25892 - DNA, 522 bp, synthetic construct
  source 1..522: mol_type = other DNA; note = Synthetic coding sequence
atgtacaccctgctgagcggcctgtacaagtacatgttccagaaggatgagtattgtatactgatactgggactggataacgcagggaagaccacctttcttgagcagagcaagactcgcttcaataaaaattacaagggcatgtctctttccaagattactacaactgtgggtttgaatattggcaccgtggatgtggggaaggctaggctcatgttctgggacttgggagggcaggaggagctgcagagtctgtgggacaagtactacgctgaatgccacggggtcatatacgtcattgactccacggacgaagagaggctcgctgaatcgaagcaggctttcgaaaaggtagtgacatccgaggctctgtgtggggtccctgtgctggttctagcaaataagcaggacgtcgaaacatgtctctctatccccgacatcaaaactgcctttagcgactgcacatccaagattgggagacgagattgtcttacgcaagcttgtagcgccctgactggctag

SEQ ID NO: 25893 - DNA, 729 bp, synthetic construct
  source 1..729: mol_type = other DNA; note = Synthetic coding sequence
atgggcctggtgtgcgtgctgggcgacggcaagaccgagcagaagggaggggacaaaaaaagaggggtgaaacggcccagggaagatcacggacgcggttactttgagtacatagaggagaataagtatagtagggcaaaatcacctcagccaccagtggaggaagaggacgagcatttcgatgataccgttgtgtgtctggacacctataactgcgacctgcattttaaaatatcgagggaccgactgagcgcctcttcacttaccatggaatccttcgcattcctgtgggccggtggccgggccagttatggcgtgagcaaaggaaaggtgtgcttcgaaatgaaggtcactgaaaagattcctgtcagacatctgtatacaaaggacatagatatacatgaggtgagaatcggctggtcactgacgacatccggtatgctgctgggagaagaggagttctcatacggctactccctaaagggcattaagacgtgcaactgcgaaacggaagactatggagaaaagtttgatgaaaatgatgtgattacttgttttgccaatttcgaatcagatgaggtcgagctgagttatgctaagaacggtcaagatctcggagtggcctttaagatctcgaaggaggtgctggccggtcgacccttgttcccacacgtcctttgccataactgcgctgtggagttcaattttgggcagaaggagaaaccctag

SEQ ID NO: 25894 - DNA, 2922 bp, synthetic construct
  source 1..2922: mol_type = other DNA; note = Synthetic coding sequence
agcagcagcgacaaggagagcatcctgaccatcctgaaggtgctgggcgatctcctatctgtgggcaccgaccggagaatccactatatgatcagtaagggcggtagcgaagcgttgttgcagactttagttgatacagccagaacagccccaccagactatgacatcctgctcccactgttccgtttactggcaaaggttggcctccgcgataagaagatcggacgcaaggccctcgaactggaagctctggatgttaccctaattctggctcgaaaaaacctgagccatggccagaatctgctgcactgcctgtgggctttgagggtttttgccagttccgtctccatgggcgctatgctaggtattaatggagcgatggaactgttgttcaaagtaataacaccttacacgcgcaagaggacccaagctatccgcgcagccacagaggtcctagctgctctgctgaagagtaaatcaaacggcaggcgggccgtaaaccgaggctacgtgacatcccttctgggcctgcatcaggactggcactcgcacgacacggcaaatgcatatgtccagatccggcggggcctgctgctctgcctacgtcatatagctgcattaaggagcggaagagaggcctttttagcagcgcaagggatggagatactattcagcacaactcagaattgcttggacgataaatccatggaacccgtgatctcagtggtgctccagatcttgcggcagtgttaccccacatccccgctgcccctggtcacagcgtctagcgcgtacgcatttccagtacctgggtgtatcactacggagcctcctcatgatttgcctgaagaagattttgaggacgacggtgatgacgaggtggataaggacagtgatacggaagatggaaaggtagaagatgacgatctggagacagatgtgaataagctgagttcaaaacctgggctcgaccggcccgaggaggaacttatgcaatatgaagttatgtgcttggagctcagctacagctttgaggagcttcagtccaaactgggcgatgacttaaattcagagaaaacccagtatgctaatcatcaccacattcctgcggctgcttcctcgaaacagcactgttactccaaggaccagagctcttgcggccaggagcgggagtacgcagtgcagacctcattgttgtgccgtgtcaagacgggcaggtccacagtacacttgggaagcaagaaaaaccccggagtcaatctatatcaaaatgtacagtctaactccctcagaagagactctagcgagagcgaaatacctgacatccaggccagcccaaaggcggacgcttgggatgtggacgctatattctgcccacggatgtctgctagtttcagtaattccaccagaacacgcgaggtggtcaaagtgattgacaagctcctgcagacccacctgaagcgcgtgcctttccacgatccatatctttatatggccaaggcacggaggacttctagtgtcgtagatttcaagatgatggcatttccagatgtgtggggacactgcccccccccaacgacgcagcctatgctggagaggaagtgcggtgtgcagaggattaggatattcgaagacatcaggcgcttaattcaacccagcgacgtcataaataaagtggtgttctccctggatgaaccctggcctctgcaagacaatgccagtaattgcttaagattcttttctaagtttgaaagtgggaatttacgaaaagcgatccaggttagagagtttgagtatgacctgttggtgaatgccgatgtcaattctactcagcaccaacagtggttttattttaaggtgtctggcatgcaggctgccattccctaccactttaacatcattaactgtgaaaaacctaactctcagttcaattatggcatgcagccgacgctgtactcagttaaggaggccttactaggaaagcctacctggattagaactggacacgaaatttgctactacaagaatcactatcgacaatctaccgcggtcgccggcggcgcttcaggaaagtgttattacacattgacattcgccgtgactttcccacacagtgaggacgtgtgttatttagcgtaccattatccctacacatatactgcacttatgacacacctggacattcttgaaaaatccgtaaacctgaaggaagtttacttcaggcaggatgtgctgtgtcaaaccctgggcggcaatccctgtcccttggtgaccataactgctatgcctgagagcaacagcgatgagcacctggaacaattcagacatagaccttaccaggtaataacagccagagttcaccccggcgagtcaaacgcatcatgggtcatgaagggaaccttggagttcctcgtgtcctccgaccctgttgctcggctccttagggagaacttcatattcaagatcattccaatgctcaaccccgacggtgtcatcaatgggaaccaccggtgctcattgagtggggaggatctcaatcggcagtggctcagcccgtctgctcacctgcaaccgacaatataccacgccaagggattgttgtaccacctgagtagtatcggcaggtctcctgtggttagtcacttcctcctcgtcttctgtgacttccacggccattctcagaagaagaatgtgtttctttatggctgtagtatcaaggagaccctctggcaagctgcctgcactgtcgggacgagcactattttagaggaagtgaattacagaacactgcccaaaatactggataagctggcccctgctttcacaatgtcgtcttgtagcttccttgtggaaaagagccgagcaagcaccgcccgagttgtcgtgtggcgggaaatgggtgtgagcaggtcctatacctag

SEQ ID NO: 25895 - DNA, 7752 bp, synthetic construct
  source 1..7752: mol_type = other DNA; note = Synthetic coding sequence
tgaagcagcatcaccttcagcgtgaaggtggagggccggcccgtgcccaccgtgcattggctacgcgaagaagctgagcgtggtgtgctttggattggacccgacacacccggttataccgtggcatcttctgctcagcagcacagtctcgtgcttctagacgtcggccgccagcaccagggaacatacacgtgcatcgctagcaacgcagcgggccaagcgctctgttcggcgtcactgcacgtgagcggtctgcctaaggtggaggagcaggaaaaagtcaaagaagcccttatcagcacctttctgcagggaactacacaggccatctccgctcaggggttagaaaccgcttcctttgcagacctgggaggccagcgcaaggaggagcccctcgcagccaaagaagccctgggccatttgtccctagccgaagtgggcaccgaagagtttcttcagaagctgacttcacagattaccgaaatggtcagcgctaaaattacccaggccaaacttcaggttcctggcggcgatagcgatgaggactccaagactccatctgcttcccctcggcacgggagatctagaccctcttcatcaatccaagaatctagttctgaatctgaggatggagacgccaggggagaaatttttgacatctacgtcgttacggccgactatttgccacttggcgcagagcaggacgcaatcacgcttcgggaggggcagtacgtcgaagtcctcgacgcggcacatccgctgagatggctcgtgagaacgaaaccaaccaaatcgtcaccttctcgtcaaggctgggtgtcccccgcttacctggatagacgtctgaaactctctccggagtggggcgcagccgaggctcctgagttcccaggagaggcggtatcagaggatgagtacaaggcccgcctgagctctgtgattcaagagctgctgagctccgagcaagccttcgtagaagaactgcagttcctacagtcacatcacctgcagcacctggagagatgcccccatgtgccgatcgctgtggccgggcaaaaagctgtgatatttcgtaacgtgcgggatatcgggaggttccacagctccagcttcctgcaagaactgcagcagtgcgataccgatgatgatgtggccatgtgtttcattaagaatcaggctgcttttgaacagtacttggagttcctcgtgggacgcgttcaagcagaatcagtcgtggtcagcaccgcaattcaggagttttacaagaaatatgccgaagaggctctgcttgcaggagacccgtctcagccacctcctcctcctcttcaacattacctcgagcaacctgtggaacgggtgcagaggtaccaggctctgctgaaggagctgatccgaaataaggccaggaaccgccagaactgtgctctgctagagcaggcctacgccgtggtttccgccctcccgcagcgagccgaaaacaagctacatgtgtcactgatggagaactatcctggcaccctgcaggcattaggcgagcctataagacagggccattttatcgtctgggaaggagcaccaggcgcacgaatgccttggaagggccacaaccgacatgtatttttgttccggaaccacctggtgatctgtaagcctagaagggattcacgaactgatacagtctcatatgtgttcagaaacatgatgaagctgtcgtccatcgacttaaatgaccaagtagaaggagatgatcgcgccttcgaagtgtggcaagagagagaggactcggttaggaagtacttactgcaggctcgcacagcaataataaagtcgtcttgggtcaaagagatttgtgggatacagcagagattggctcttcccgtgtggagaccccccgactttgaggaggaattggccgattgtactgccgaactgggagaaactgttaaattggcctgccgcgttaccggaacccccaaacccgtcatctcctggtacaaagatggcaaagcagtgcaggtggatcctcaccacatcctcatcgaggaccctgacggctcctgcgccctaatacttgattcactgactggcgtcgattcgggtcagtacatgtgctttgccgcatcagctgctggcaattgtagtacattaggaaaaattttggtgcaggttcctcctagatttgtaaataaagtccgcgccagccccttcgtagaaggcgaagatgcccaatttacctgcactattgagggcgccccttatcctcaaatccgttggtacaaggacggcgctcttttaacgactgggaacaaatttcagaccctgtccgagccgcgatccggactattggtcctggtcataagggcggccagcaaggaggatctgggactttatgaatgcgaactagtcaacaggttaggttcggcgcgagcatcggccgaactgcgcattcagtcacctatgctccaagctcaggaacaatgccatagagagcagctggtcgcagcggtggaggacacaacacttgaacgcgcggaccaggaggtgacgtcggttctgaagcgcctgctgggcccaaaagcacccggaccttcaacgggcgacctgacaggccccggtccttgtcccagaggcgctccagcattacaggagaccgggagccagccccccgtcaccgggacaagtgaggctcctgccgtcccacctcgcgtgccacagccattgctgcatgaagggcccgagcaggaaccagaagctatcgccagagctcaggaatggacggtccctatcaggatggaaggtgccgcgtggcccggcgccggcacaggagagctgctgtgggacgtacactctcacgtggtgcgggagaccacacaaaggacatacacctatcaggctatcgatacacacaccgcacgaccccctagcatgcaggtcaccatcgaggatgtccaggcgcagacaggcgggacggcccagttcgaggccatcatagaaggagacccccagccatctgtgacatggtataaggatagcgttcagctggttgactcaacacgccttagccagcagcaggagggaacgacctactccctggtcctgcggcatgtggcctccaaagacgccggtgtgtacacttgcttggcccagaacacaggagggcaagtgctgtgcaaggctgaacttttggtcctggggggcgacaatgagcctgactccgaaaaacaatcacatcgacgtaaactgcatagtttttacgaggtgaaagaggaaatcgggcgcggcgtgttcggattcgtaaaacgcgtccagcacaagggaaacaaaatcttgtgtgctgctaagttcatccctcttcgcagccgtacaagagcccaggcttacagggagagggacatattggcggcactgtcacaccctctggtgacaggattgctcgatcagttcgagacccggaagaccttgatcctgattttagaactgtgttcgagtgaagagctcctggatcgcctataccggaaaggcgttgtcacagaggcggaggttaaggtgtacatacaacaactcgtggaggggttacattacttacattctcatggcgtattgcacctggacattaagccttctaatatcctgatggtacatcccgcgagagaggacatcaaaatttgtgattttggattcgctcagaacatcacccctgcagaactccagttctctcaatatgggagtcctgagttcgtgtcaccagagatcatccagcaaaaccccgtgtctgaggcctcggatatttgggccatgggcgtgattagctacttgtctttaacttgttcttccccttttgctggcgagagtgatcgcgcgacgctcctgaacgttctggaaggcagagtgagctggtcctctcctatggctgcgcacctgagcgaggacgctaaagacttcattaaggctacattgcagagggctccacaggccagaccttccgctgcccagtgcctgagtcacccttggttcctgaaaagcatgcccgccgaggaagcacacttcatcaatactaaacagctgaaatttctcctggcaaggtccaggtggcagagaagcctgatgagctacaagtccatactagtgatgcgtagcatcccagaactccttaggggaccacctgattcaccttctttgggtgtggcacgccacctctgtagggatacgggcggcagtagtagtagcagtagctcttccgacaacgagctggccccctttgctcgtgcgaaaagtttgcctcccagtcccgttacccacagtccactgctgcacccccgtggattccttagaccgtcagcctctctgcctgaggaggcggaagcaagcgaacggagcactgaggctcccgctccaccggcttcccctgagggggcaggcccgcccgctgcacaggggtgcgtgccacggcattccgtgattcgatctctattctaccatcaggccggggagagtcctgaacatggggccctcgcccctggtagcaggcgccatccagcaaggagacgacacttgctcaaaggcgggtacattgctggcgcgctgccaggcttgcgagaacctctgatggagcacagagtgctggaagaagaagccgctagagaggagcaagcaaccttgttggccaaggcccccagcttcgagaccgcactgcggctccccgcaagtggaacccacctggccccaggccacagtcattcccttgaacacgactcacctagcactccacgcccatcatcagaggcgtgtggggaagcccagcgcttgccctccgccccctcaggaggggcccccatcagggatatgggccatccgcagggttccaagcagctgccatctactggcggccatcccgggaccgcacagcccgagaggccgtctcctgactctccttggggccagcccgcaccgttttgtcacccaaagcagggcagtgcacctcaggaaggctgctctccacacccggcggtggcaccatgccctccaggatcattcccgcctgggagttgtaaagaagcccctttggtgccgagttccccctttctgggtcagccacaggcccccccagctccggcaaaagcctcccccccactagattcaaaaatgggcccaggagacattagcctccccggccggccaaaacctggaccctgttcttctcctggaagtgctagccaggcttcgtcttcacaagtctcctctttgcgagtggggtccagccaggttgggaccgaacccgggcccagcttggatgcggaaggctggactcaggaggccgaagacttatctgactccacgccaacattgcagaggccccaagaacaggctactatgagaaagttttccctgggcggacgcggggggtatgccggagttgcaggctacggtacgtttgcctttggcggggacgcaggcgggatgctcgggcaaggcccgatgtgggcacggattgcatgggctgtcagccagagcgaagaagaggaacaagaggaggccagagccgagtcacagagcgaggaacaacaagaggcacgagcagaaagccccctgccgcaggtgagcgcccggcctgtgcctgaagttggaagagccccaacaagaagctctccagaaccaacaccttgggaggacattggccaggtgtctctggtgcagatacgagacctgtccggggatgctgaagctgccgataccatttctctggacattagcgaggtggatcccgcgtacttgaatctcagcgacttgtacgacattaaataccttcctttcgaattcatgatttttcgcaaggtgcctaaatccgctcaacctgagcctccttcgcccatggccgaggaagagcttgcagaattccctgaacccacatggccctggcctggtgaactcgggccccatgccggcttggaaatcacggaagagagtgaagatgtggacgccttgctggcggaagcggcagtggggaggaagaggaaatggtccagcccatcccgaagtctctttcactttccaggcaggcacctacctctcgacgaacccgcggagctgggactgcgagaacgagtgaaggcctctgtcgagcatatttctcgtattcttaagggcagacccgagggcctggagaaagagggaccacctagaaagaagcccgggctggcctcattccgactctctggtttgaagtcctgggaccgagctccaaccttcctcagggagctttccgacgaaaccgttgtactaggccagagtgtaacactggcttgccaagttagcgcgcagcctgctgctcaagcaacctggagcaaggacggggcccctttagaatcctctagtagagtgctgatcagtgctacgcttaaaaatttccagcttttgactatcctggtcgtcgtggccgaagacctgggggtttacacctgcagcgtgtcaaatgcgctgggaactgtgaccactaccggggttctgcgcaaagccgaacgacctagctcatccccttgtcccgacataggtgaggtatatgcagatggagtgcttctggtttggaaacccgtggagtcctacggccccgtgacctatattgtgcaatgctccctggaggggggttcgtggaccacccttgcttctgacatctttgactgctgttatttgacttcaaagctctctcgagggggcacatatactttcagaaccgcctgtgtgtccaaagcagggatgggcccatacagttctcccagcgaacaggtgctattggggggaccttcgcatttggcctctgaggaggaaagccagggccgaagtgcgcaaccattaccatctaccaaaaccttcgccttccagacacagatccagcggggaagattcagtgtcgtcagacaatgttgggagaaagctagcgggagggcactggcagcaaaaattatcccctaccaccccaaagacaaaaccgccgttctccgtgaatacgaagctctcaaaggtcttcgccaccctcatcttgcgcaattgcacgccgcgtatttaagcccaaggcatctggtgttgatcctggaactgtgttctggacctgaactcttgccgtgtctcgctgagcgcgcaagctactccgaatccgaggttaaagactacctctggcagatgctgtccgctacacagtacctgcacaatcaacatatccttcacctggaccttcgttcagaaaacatgataattaccgagtataacttactgaaagtggtggatcttggcaatgctcagagcctctcccaggaaaaggtactccccagcgacaagttcaaagactatctggaaacaatggagctgcttgagggccagggcgctgtcccgcagaccgatatttgggccatcggagtcaccgcttttatcatgctctccgccgagtaccccgtgagttctgaaggcgccagagacctacaaaggggactcagaaaaggccttgtcagactgtcccgatgctacgctgggctctccggcggagctgtcgccttcctccgcagtaccttgtgcgcgcagccttggggtcgcccctgcgcatcttcttgcctgcagtgcccttggttgaccgaggaaggcccagcttgttcgcgaccagccccagtgactttccccacagcaaggctgcgcgtgttcgtccgtaacagagaaaaacgccgcgcgctgctatacaaaagacataacttagcccaggtgaggtag

SEQ ID NO: 25896 - DNA, 1749 bp, synthetic construct
  source 1..1749: mol_type = other DNA; note = Synthetic coding sequence
atggagaaggccgtgaacgacggcagccacagcgaggagctgttctgccatctgaaaacaatctccgaaaaagaggacctacctagatgtacctcagaatctcacttaagctgcctcaagcaggacattcttaacgaaaagaccgagctggaggccaccttaaaagaagccgagctggtgacacattctgttgaattgttgctgcctttgtttaaagataccatcgagaaaatcaatttcgagaatgccaaccttagcgctctgaacctgaaaatttctgaacagaaggagattttgatcaaagaacttgatacatttaagtctgttaagcttgccttagagcacctcctgaggaagcgggactacaaacaaacgggagacaacctcagctctatgctcttggagaacctgaccgataacgaaagcgaaaacactaacttgaaaaaaaaagtttttgagaaagaagcgcacattcaggagctgtcttgcttattccagagcgagaaggcgaatacactgaaggccaaccggttcagccagtctgtcaaggttgtccacgagcggctgcaaatccagattcataagcgggaggctgagaatgacaagctcaaggaatacgttaagagcttagagacaaagatagccaaatggaacctgcaatccagaatgaacaagaatgaagccattgtcatgaaggaggccagtaggcagaaaacggtagccttgaagaaagctagtaaggtatacaaacagagactagaccacttcactggagcaattgagaagctaacgtcccagattcgtgatcaggaggcaaagctgtccgagaccatttcagcgtctaatgcctggaagtcccattacgaaaagatagttatagagaagaccgaactggaggtgcagatcgagactatgaagaaacaaatcattaatctcctcgaagatctgaagaaaatggaggaccacggcaagaattcatgtgaagaaatcctccgtaaggtgcactccatagagtacgagaatgagaccctgaatctggagaacaccaaactgaaaacaaccctggccgcactcaaagacgaggtggtctccgtcgagaacgaactgagcgagctccaagaggtggaaaagaaacagaagaccctgattgaaatgtataagacacaggtccagaaactccaggaagccgctgaaatcgtgaaatcaagatgtgaaaacctactgcacaagaataaccagataactaagacaaagaacaagaatgtggagaaaatgcgaggccaaatggagtcccacctgaaggagctggagcgcgtgtgtgacagcctaactgccgctgaacggcgccttcatgagtgtcaggtggacggcaaccataacttactaactaaactgtcactggaagaggagaactgcctcatccagttaaagtgtgagaacttgcagcaaaagctggaacagatggatgctgagaataaggaactggagaaaaagctcgccaatcaggaggaatgtttaaaacatagcaacctgaagttcaaggagaagtccgcagaatacactgccctagcacgccaactcgaggcagccctggaagagggccggcagaaggtagctgaggaaattgagaagatgtctagcagagagtccgctttgcaaatcaaaatcttggacctggagaccgagcttcgcaagaagaatgaagaacagaatcaactcgtgtgcaaaatgaacagcaccaacggatag

SEQ ID NO: 25897 - DNA, 384 bp, synthetic construct
  source 1..384: mol_type = other DNA; note = Synthetic coding sequence
atggtgagcagcggccggcggtggctgcgggagcagcagcaccggcgctggcgactccactgcctaaagctgcaacctctatctcctgttccgtccgatatcgagatttctcgcggacaaactcccaaggcggttgatgttctggcaaaagagattgggttactggccgatgaaatcgagatctatgggaagagtaaagccaaggttaggcttagtgtgctagaacgtctgaaggatcaggcagatggcaaatatgtgctggtggccggtatcacaccaacccctctcggcgagggaaagagcaccgtaacgattgggctggtgcaggccctgaccgcccatcttaatgttaattctttcgcttgcctcaggcagccatcatag

SEQ ID NO: 25898 - DNA, 1929 bp, synthetic construct
  source 1..1929: mol_type = other DNA; note = Synthetic coding sequence
atgaagatcttctgcagccgggccaaccccaccaccggcagcgtggagtggctggaggaggatgagcattacgattaccaccaggagatcgccaggtccagctacgcagatatgcttcatgataaagatcgagtgtttaagccaatggctgacgcagccgtgaagatcgtcgagaaaaatggattctctgacaagatcaaagtgatcaacaagcactctaccgaggtgactgtcggccccgagggcgatatgccatgcagagccaacatcctggttacagagctttttgatacggagttaataggggaaggagccctgccgtcatacgaacacgcgcacaggcacttagttgaggaaaattgcgaagccgtaccacaccgtgccacagtgtacgcccagctggtcgaatcagggcgcatgtggagctggaacaaactgtttcccatccatgtgcagacaagtttgggggaacaggtcatcgtgcctccggtggacgtggagagctgccccggggcaccatccgtttgtgatatacagttaaatcaggtcagcccagctgattttaccgtcctcagcgatgtgctccccatgttttcaatagacttctctaagcaggtgtcttctagtgcagcatgtcactcaagacgtttcgagcctctaacctctggccgggcccaagtcgtcctttcatggtgggacatcgagatggaccccgagggtaagatcaaatgcactatggctcccttttgggcacattccgacccagaagagatgcaatggcgcgatcattggatgcaatgcgtgtactttctgccgcaggaggagcccgtcgtgcaagggagtgccctctacctggtggcgcaccacgatgattattgtgtgtggtacagcctacagcggactagccctgagaaaaacgagagggtgcgccagatgagacctgtttgtgattgtcaggctcacctgttatggaatagaccccgctttggagagatcaacgaccaggatcgcaccgaccgctatgtgcaggctcttagaaccgtgttgaaacccgatagtgtgtgtttatgcgtatctgacggctctctgctctccgtcctggcccaccatctgggtgtcgagcaggtctttactgttgaaagctccgcggcatcccacaaattactccgtaagatcttcaaagctaatcatctagaggataaaattaatattatagagaagcgccccgaactcctaaccaacgaagacctgcagggccgaaaagtatccctcctgctcggggagccatttttcaccacaagtctgctcccctggcataacctgtatttctggtatgtccgcacagctgttgaccagcaccttggtcctggtgctatggtgatgccccaagccgctagtctccatgccgttgtggtggaattccgggatctctggcggatcaggtcaccatgcggcgattgtgaagggttcgatgtgcacatcatggatgacatgatcaagagagccctcgacttcagagaaagccgcgaagcagaaccgcaccctctgtgggaatatccttgccgaagcttatctgagccatggcaaatcctcacttttgatttccaacagccggtgcctctgcagcccctgtgtgctgaaggtaccgtggagttgagaagaccaggccagtcccacgccgcagtactctggatggagtaccacctcactccagagtgcacattgtccaccggactgcttgaacccgctgaccccgagggtggatgttgctggaatccacattgtaagcaggcagtgtactttttttcaccggccccagatccaagagccctgctgggcggtccaaggacagtgtcttatgccgttgaattccatcctgataccggggacataattatggagtttcgtcacgccgatactcccgattag

SEQ ID NO: 25899 - DNA, 300 bp, synthetic construct
  source 1..300: mol_type = other DNA; note = Synthetic coding sequence
atggtggtgaagctgctgagcaacaagcggagccaggccgtgggcattctgatgagttcactgcacctggatatgaaggatattcagcatgctgtggtaaatctagacaattctgtggtcgaccttgagacccttcaagctctatacgagaacagggcccagtctgacgaattggaaaagatcgagaaacatggtcgatccagcaaagataaagagaatgccaaatcattggataagccggagcagtttctgtacgagctcagcttgatccccaatttctctgagcgcgttttctgttag

SEQ ID NO: 25900 - DNA, 390 bp, synthetic construct
  source 1..390: mol_type = other DNA; note = Synthetic coding sequence
atgggcggctgcttcagcaagcccaagcccgtggagctgaagatcgaagtggttttaccggagaaagagcgcggcaaggaggagctgtccgccagcgggaaaggttcaccgcgcgcataccaggggaacggaaccgcgcgccacttccacacggaagaaaggctcagcactccacatccttatcccagtccacaggactgtgtcgaggccgctgtgtgtcatgtgaaagacctggagaatggccagatgcgcgaggttgaactgggctgggggaaggttctcctggttaaagataacggggagttccatgcacttggccataagtgtcctcactatggagcccccctggttaagggcgtgttaagtcgtggaagggtgagatgtccttag

SEQ ID NO: 25901 - DNA, 453 bp, synthetic construct
  source 1..453: mol_type = other DNA; note = Synthetic coding sequence
atgaacctggccgagatctgcgacaacgccaagaagggccgggagtacgccctccttggcaattatgacagctccatggtctactaccagggcgtgatgcaacagattcagagacattgccagtctgtcagagaccccgcaatcaagggaaaatggcagcaggtgaggcaggagttactggaagagtacgaacaggtgaagtccatcgtttccacactggagtcatttaaaatagataagcccccggattttccggtgagttgtcaggacgaaccatttagagaccccgctgtctggccgccccccgtgccagcagaacacagggcgccaccacagatcagacgtcctaaccgagaggtgcggcccctcagaaaggagatggcaggggtgggcgcccggggccctgtgggaagagctcaccccatttcgaagtcagagaaaccgagcacgtag

SEQ ID NO: 25902 - DNA, 498 bp, synthetic construct
  source 1..498: mol_type = other DNA; note = Synthetic coding sequence
atgggcgtgaaccagagcgtgggcttcccccccgtgaccggcccccatctcgtcggctgtggcgatgtaatggagggacaaaatctacaggggtcattctttcgtctgttttacccttgtcagaaagccgaagagactatggagcagccgctttggattccaagatatgaatactgtaccgggctcgcagagtacctccagtttaataaaaggtgcggaggcctgttgttcaatctggcagtcggaagttgtagactgccggtgagctggaacggaccattcaaaactaaggactcaggatatccgctgattatcttctctcacggcctgggcgccttccggaccctgtactcagcgttctgcatggaactggcaagccggggatttgtggttgcagtccctgagcacagggaccggtccgccgccacaacttatttctgtaaacaggcccctgaagagaaccaaccaactaacgaaagtttgcaggaagagtggtag

SEQ ID NO: 25903 - DNA, 270 bp, synthetic construct
  source 1..270: mol_type = other DNA; note = Synthetic coding sequence
atgagcgagcagggcgacctgaaccaggccatcgccgaggagggcggaaccgaacaggagacagcgactcctgagaacgggatcgtaaagagtgaatctctcgacgaggaggaaaagctggaactgcagagaagactggaagcacaaaatcaagaaagaaggaaaagcaagagcggggccgggaaggggaaacttacaagatccctggccgtttgtgaggaatccagcgcgagacctggcggtgaatctctgcaggatcagaccctttag

SEQ ID NO: 25904 - DNA, 6009 bp, synthetic construct
  source 1..6009: mol_type = other DNA; note = Synthetic coding sequence
atggaggagcggaagcacgagaccatgaaccccgcccacgtgctgtttgatcgattcgtgcaggcaacaacttgcaaaggtacgctcaaggcattccaggaactgtgcgatcatcttgaactgaagccaaaggactacaggtccttttatcacaagcttaaatctaagcttaattattggaaggcaaaggctctgtgggccaagctagacaagcggggatctcacaaagattataagaagggcaaggcttgcaccaacacaaaatgcttgattatcggtgcggggccatgcgggcttcggaccgcgatagacctgtctctcttgggtgcaaaagtggttgttattgagaagagggatgcctttagtcgaaataacgtgcttcacctgtggccattcactattcatgacttaaggggcctgggcgccaaaaagttttatggcaaattctgtgcgggtgctattgaccacattagtatccgtcagcttcagctcatactgctgaaggtcgcactcatcctgggtatagagattcacgtgaatgtggaattccagggactaatccaacctcccgaggaccaagaaaacgaacggataggatggcgcgctctcgtccaccccaagacccatcccgtgtccgagtacgaattcgaggtcatcatcggaggagatggccggcgcaacaccctggagggcttcagacgaaaagagttccgcggaaagctagccatcgctataacagccaacttcattaatcggaatacaaccgctgaagctaaggtggaggaaataagcggagtggcatttatatttaaccagaaattcttccaggagcttagagaggcaaccggcatcgacctcgaaaacatagtttattataaagatgatacccactattttgtgatgacagctaagaagcaaagtctgctggataaaggggttatcctgcacgattatgcggatactgagctcctactgagtagagagaatgtggatcaggaagcactgctgtcttatgcacgcgaggctgctgatttcagtactcagcagcagttgccgtcattagatttcgccatcaatcattacggacagcctgacgtcgccatgtttgattttacttgtatgtacgcttccgagaacgccgcactcgtgagagaacaaaatggacaccaactacttgtcgcactcgtgggcgatagcctgctggaacccttctggcccatgggtaccggtattgctcggggatttttggctgccatggattcagcgtggatggtgcgtagttggtccctagggaccagccctctggaagtgcttgccgaaagggaatctatctaccggcttcttcctcagacaacaccggagaatgtgagtaaaaatttttctcaatattctatcgatccagtgacccgatatccaaacatcaacgtgaactttcttcgccctagtcaggtgagacatttgtacgataccggggagactaaggacatccatctcgagatggagtccctggttaactcccggacgactccaaaactcacaagaaatgagtctgttgccagaagtagcaaattactcggctggtgccagaggcaaacggatggttacgctggagtgaatgtgactgatctgactatgtcttggaagtcaggattggccctgtgcgcaatcattcacaggtatcgaccagatctgattgacttcgattctctggacgaacaaaatgttgaaaaaaacaaccagctggcattcgacatcgccgaaaaggaacttggcatatctcccatcatgaccggcaaagaaatggcctcagtaggggagcctgacaagttatcaatggtgatgtacttaacccagttttacgaaatgtttaaggattcactcccatctagtgatactttggacctcaacgctgaagagaaggccgttctaatcgccagcaccaggagccccatctcttttctgtccaaattaggtcaaacaatctcgcggaagaggagccctaaggacaagaaagaaaaagacctggacggcgctggcaagcggagaaaaacctctcagtccgaggaggaagaggccccacgaggccaccgaggggagcggcctacccttgtctctacgcttaccgatcgtcgcatggacgtggccgttggcaaccagaataaagtcaaatacatggctactcagctactggccaaattcgaggagaacgcgcccgctcagtctatcggcattagacgacaaggatcgatgaagaaggaatttccacaaaatttgggcgggtccgatacttgctatttttgccagaaaagggtatatgtgatggaacgcctcagcgccgaagggaagtttttccatagaagctgcttcaagtgcgagtactgtgcgacaacccttaggctgagcgcttacgcgtacgacatcgaagacggtaaattttactgcaaaccccattattgctatcgactgagtggttatgcccagaggaaaagacccgcggttgctcccctgagcggtaaggaagctaagggccccttgcaggacggtgcgaccacagacgctaacggacgggcgaacgcagtggcatcctcgactgagaggacacctggttcgggtgtgaacgggttggaagagccctccatcgccaagagactccgcgggaccccggagcggatcgaactggaaaactaccgtctatcactgaggcaggccgaggcactacaggaagtgccagaggaaacgcaagccgaacataacctctcctccgtgctcgatactggagctgaagaggatgtggcctcttcctccagcgaatcagagatggaggaggagggcgaggaggaagaggaggaaccacggctgcctccatccgatctgggtggtgttccatggaaggaagctgttaggatacacgctctgctgaaaggcaaatcagaggaggagctagaggcctccaagtcatttggtcccgggaacgaggaggaagaagaagaggaggaagaatatgaggaggaggaggaagaggattacgacgaagaggaagaggaatccagcgaagcagggaatcagcgactccaacaggttatgcatgctgcagatcccctcgagatccaagcggacgtgcattggactcacattcgcgaacgggaggaggaagagcgcatggctcctgccagcgaatcttccgctagcggtgctccgctcgacgaaaatgacttagaggaggacgttgacagtgagccggccgagatcgagggagaagccgcagaagacggagaccctggggacacaggcgccgaactggacgatgatcaacattggtccgattcaccaagcgatgctgaccgcgaactgcgcctgccatgtccagccgaaggcgaggcagagctcgagttaagagtctccgaggacgaagagaagcttccggctagccctaagcaccaagagcggggcccaagtcaggctacaagtcccattagaagcccccaggaaagcgcgttgctatttatcccggtacatagtccctcaaccgagggacctcagctcccaccggttccagctgcaacgcaggagaaatcacccgaagagcgcttattcccggaaccgctgctacccaaggagaagccaaaagccgatgcacccagcgacctcaaggccgtgcatagccctattcgctctcagcccgtaaccctcccagaagcacggacccctgtgtcccccggtagccctcagccacagccacccgtagctgcttctactccaccccctagtcccctcccaatttgctcgcaaccccaaccgtcaacggaggctacagtaccttccccaactcaatcaccgatcaggttccagcccgcaccggctaagacaagcactccattggcacctctgcctgtgcaaagtcagagcgatactaaagatagacttggatcacccctggctgtggacgaagctctgaggcgttccgacctggtggaagagttttggatgaagtctgcagaaatcagaagatccctgggcctgactccggtcgaccggtccaaaggccccgagcctagtttcccaacccccgcttttcggccagtgtctctcaaaagctatagtgtggagaaatcgccccaggatgagggtctgcatcttctcaaacctctgtctatccccaaacgcctgggactgccaaagcctgagggcgagccgcttagtctgcccaccccacggtctcctagcgaccgcgagctgcgcagtgctcaggaagaaagaagagagctcagttccagcagtggacttggtctccacggcagttcttctaatatgaaaacactgggatctcagtctttcaacacttcagatagtgcgatgctgactccaccttcctcacctcctcccccaccaccacctggggaagagcctgccactctcagacgaaagttgcgtgaggcggagcccaatgccagtgttgtccctccaccacttccagccacctggatgagacctccacgggaacccgcacagcctccgcgcgaggaggttcgaaaaagctttgtggaatctgtcgaggagatccccttcgccgacgacgtcgaagatacgtatgatgataagaccgaagactcctccttgcaggaaaagttcttcacacccccatcttgttggcccaggcctgagaaacctcgccaccctcctctcgcaaaggagaacggccgattgccggccttggaagggaccctgcagccccagaaacgcggcttgccactagtatcagctgaggccaaggaactggctgaggagcggatgcgggcaagggaaaaatccgtgaagtcccaagcattaagggatgccatggctcgtcagctttctagaatgcagcagatggaattggcctccggggctccacgtccccgaaaggcatcttccgcaccttcacaggggaaggaacggcgccctgattcacccacacgccccacgcttagaggaagcgaggagcccactctcaaacatgaggccacctccgaggaggtgctcagcccccctagtgacagcggcggcccagacggtagctttacatccagtgagggtagttctggaaagagcaagaaaagatcttctctgttttctccccgccgtaataaaaaagagaaaaaatcaaaaggcgaagggcgaccacccgagaagcccagctccaacctgttggaggaggcagccgccaagccgaaaagcctctggaaaagtgtctttagcggttacaaaaaagataagaaaaaaaaagctgacgacaagagctgcccatctacaccttcgtctggagccacagtggattccggaaagcaccgggtgttacccgtagtcagagctgagctgcagctgagacgccaactgagcttctctgaagattcagatctctcctctgatgatgttctggaaaagagcagccagaagtcccggagggagcctagaacatacacggaggaggagctgaatgccaaactcaccaggcgagttcagaaggccgccagacggcaggctaagcaggaagagcttaaacggctccatcgagcgcaaataatccagcgtcagctacaacaagtggaggaacggcagagacgcttggaagaacggggagttgccgtggaaaaggccctgcggggagaagccggcatgggtaagaaggatgaccccaagctgatgcaggagtggtttaaactggttcaggagaaaaatgctatggtccgctacgagagcgaacttatgattttcgcccgtgagctcgaactcgaggacagacagtcaaggcttcagcaggagctgcgagagcgcatggcagtggaggaccacttaaaaacagaggaggaattgtctgaggagaagcagattctgaacgagatgctcgaggttgttgagcagagagacagcctcgtggccttattggaggagcagcgtctcagggagagagaagaagacaaagatctagaagccgcaatgctctctaaggggttctctctcaattggagctag

SEQ ID NO: 25905 - DNA, 540 bp, synthetic construct
  source 1..540: mol_type = other DNA; note = Synthetic coding sequence
atgagcagcaacgagtgcttcaagtgcggccggagcggccactgggctagggagtgtcccaccggcggcggacgggggaggggaatgcgaagcagaggccggggcggcttcacatcagacaggggattccaatttgtgagctcatctctgcccgacatttgttatagatgcggcgaatctggccatctggccaaagattgtgatttacaggaggatgtcgaagcatgctacaattgcggaagagggggccatatcgcaaaggattgtaaagagcccaaacgcgagagggagcagtgctgctataactgcggtaaacctggacatctggctagggattgcgaccacgctgacgagcagaaatgctactcctgtggagaatttggacatatccagaaagactgtaccaaggtgaagtgctaccggtgcggagagacagggcatgtcgctatcaactgttcgaagacaagcgaagtcaattgctacaggtgtggcgagtctgggcatttggcccgtgagtgtaccatcgaagccacagcctag

SEQ ID NO: 25906 - DNA, 1140 bp, synthetic construct
  source 1..1140: mol_type = other DNA; note = Synthetic coding sequence
gcccgggccgtgcccgtgggcagcggcctgcggggcctgcagcggacacttcccctcgtggtaattcttggcgcaactggaactgggaagtcaactctcgctctccagctcggacagaggctggggggtgagatcgtgtccgctgattccatgcagccacaggaaatgggtactgagaaggtcattgaccgaaaggttgaattggagaaggaggacggactggtgctccacaagaggctgagccaggtggatcctgagatggccgccaagctgcatcctcacgacaaaagaaaggtcgccagaagtctccaggtgtttgaagaaaccgggatttctcactcagagtttcttcaccgacagcatactgaagaaggcggggggccattaggtggacccttaaagtttagtaacccttgcatcctttggctacatgctgaccaagcagatgaaaggctcgacaagcgtgttgatgatatgttagccgccgggctcctcgaggagctgcgggactttcaccgaagatacaatcaaaaaaacgttagtgaaaatagccaggattatcagcacggcatctttcagtccataggctttaaagaatttcatgaatacctgataacagagggaaagtgcacactggaaacatctaatcagctcctgaagaaggggattgaggctttgaaacaggtgacgaaacggtacgcccgcaagcagaataggtgggtgaaaaatcggtttctctcgcgaccgggcccaatcgtccctccagtctatgggctggaggtaagcgacgtgtcaaaatgggaggagtcagtcctggagccagccctcgagattgtgcagtcctttatccaagggcacaaaccaaccgcaactcctattaaaatgccttacaacgaagcagagaataagagaagctaccacctatgcgacctgtgtgatagaatcatcattggtgaccgagagtgggcggcacatatcaagagcaagtctcacctcaatcagctgaagaaacgtcggagactggactccgacgctgttaatactattgagagccagagtgtgagtcctgatcacaataaggaaccgaaggagaagggcagtcctggccagaatgaccaggagctgaaatgctcagtgtag

SEQ ID NO: 25907 - DNA, 483 bp, synthetic construct
  source 1..483: mol_type = other DNA; note = Synthetic coding sequence
atggaggccgagcggccccaggaggaggaggacggcgagcagggccctccacaggatgaggaaggttggcctccccctaactcaaccacccgtccatggcggtcagcaccacctagcccccctcccccaggaaccagacacacagccctgggcccaagatctgccagtctgttgtctcttcaaacggagctcttgttagacttggtggcagaagcccaatctcggcgtctggaggagcagcgtgccacattttataccccgcagaatccgtcttctctggccccggcgccgctccgacccttggaggacagagagcagctgtattcaaccatcctgtctcaccagtgccaaaggatggaggctcagcgtagcgaacctccgctgcctcccggcggacaggaactccttgaactgctcctccgggtccaggggggcggacgaatggaagagcaacgcagtcgacctccgactcatacgtgttag

SEQ ID NO: 25908 - DNA, 816 bp, synthetic construct
  source 1..816: mol_type = other DNA; note = Synthetic coding sequence
atgaacctggagaagctgagcaagcccgagctgctgaccctgttctccattctagaaggcgagctggaggcccgtgatctcgtaatagaagccctcaaggcccagcacagggatacattcatcgaagaacggtacggcaaatacaatatctccgacccgcttatggcgctgcagagagatttcgagacgcttaaggagaagaatgacggagagaaacaaccagtatgtaccaatcctcttagcattcttaaggttgtgatgaagcaatgcaagaatatgcaagaaaggatgcttagccagctcgccgctgcagagagccggcaccgaaaagtcatcttagacttagaagaggagcgacagcggcatgctcaggataccgcagagggtgacgatgtcacgtacatgctggagaaggaacgagagaggctcacccaacaactcgagttcgagaaaagccaggtgaaaaaattcgaaaaagaacagaagaaactgtcctcacaactggaggaggagagatctcggcacaagcagctatcatccatgctagtgctggagtgcaaaaaagctaccaataaagctgccgaggaaggccagaaagccggtgaactctctctgaagttggaaaaggaaaagagtcgagtgtccaagctggaggaggagctggcggccgagaggaaacgcggcctgcaaaccgaggcgcaggttgagaaacagttgtccgagtttgacatcgagcgggaacagctgcgggcgaagctgaaccgcgaggaaaaccgaaccaagaccttaaaagaggaaatggagagcttgaagtag

SEQ ID NO: 25909 - DNA, 1482 bp, synthetic construct
  source 1..1482: mol_type = other DNA; note = Synthetic coding sequence
atggaccaggactacgagcggcggctgctgcggcagatcgtgatccagaacgagaacacaatgcctagagtaacagagatgcgccgaaccttgacccccgcatcttcccctgtgtcttctccctccaaacacggagataggtttatccccagtagggctggggctaactggtctgtaaatttccatagaatcaacgaaaacgaaaagtccccaagccagaataggaaagcaaaggatgctacttctgacaatggcaaggatggactggcatactcagctttactcaagaacgaattgttaggggcaggtatcgaaaaagtgcaggatccacagaccgaggatcgacgtttgcaaccttctacccccgagaaaaaaggactgtttacctatagcctgagcactaaaaggtcctcaccagacgacgggaacgatgtctccccttatagcctgtcccccgtgtcaaacaaatcacagaaattgctcagaagccccagaaagccaacccggaaaatatcaaagatcccctttaaggtgctcgatgctccagagctgcaagatgacttttacctcaacctcgtcgattggtcgtcccttaatgtcttaagtgttgggctgggtacttgtgtatacctgtggtctgcatgtacatcccaagtgactcgcctgtgcgatctaagtgtggagggggactccgtgacctctgtagggtggagcgaacgcggcaacctcgtcgcagttggaactcacaagggctttgtacagatctgggatgccgccgcgggtaaaaaactgtctatgctagaggggcataccgcccgggtaggggcgctggcttggaacgccgaacagctttctagcgggagtcgcgatcgtatgatcctgcaacgcgacataaggactcctcctctccagtctgagcgccgtctccagggccacagacaggaagtgtgtgggcttaaatggtccactgatcaccaactgcttgcttcaggaggcaacgataataaattgcttgtgtggaaccactctagcctgtctccagttcagcagtacacggagcatctggccgccgtgaaggctattgcctggagccctcaccaacatggccttctagcttctggcggcggcaccgcggatcggtgtatacgattttggaatacactaactggccagcccctacagtgtattgataccgggtctcaggtttgtaatcttgcatggtccaagcatgctaatgagctcgtgagtactcacggctattcgcagaaccagattctggtctggaagtatccaagtttgacgcaggttgccaagctcaccggtcacagttaccgcgttttgtatctcgccatgtcacctgacggtgaagccattgtaacaggcgccggcgatgaaacattgcggttctggaacgtgttctctaagactcgatcgacaaaggagagcgtgtctgtgctgaacctgttcacgcgcatccggtag

SEQ ID NO: 25910 - DNA, 552 bp, synthetic construct
  source 1..552: mol_type = other DNA; note = Synthetic coding sequence
atgaagaaggagcacgtgctgcactgccagttcagcgcctggtacccctttttcaggggcgtgactattaagtcagtcattctgccacttcctcagaacgttaaagattacctgcttgatgatggaacactcgtggtgagtgggagagacgacccgcccacccattcccagcctgatagcgacgacgaagccgaagaaattcagtggtctgacgacgaaaatacggcgacccttacggatgcttattggattgcaatgaattcatcgctgaagtgcaagacactgtccgacatttttctcctctttaagagctccgattttataaccagggacttcacacagccattcatccactgtaccgacgacagtccagacccgtgcatagagtacgagctggtgctgagaaaatggtgcgaactcatcccaggtgcagaatttagatgctttgtcaaagagaacaagctcattgggatttctcagcgggactatactcagtactatgaccacatcagcaagcaaaaggaggagatccgtcgttgcatccaggactag

SEQ ID NO: 25911 - DNA, 672 bp, synthetic construct
  source 1..672: mol_type = other DNA; note = Synthetic coding sequence
atggaggacgtgaagctggagttccccagcctgccccagtgcaaggaagacgccgaggagtggacgtaccccatgcgtagagagatgcaggagattctgcctggactcttcctggggccttatagttctgccatgaaatccaagctgcctgtgttgcaaaagcatggcattacgcatatcatatgcataagacagaacattgaggcgaacttcataaagcctaacttccagcagttattcaggtatctggtgcttgatatcgcagacaatcccgtggaaaacatcatcaggtttttccctatgactaaggagtttatcgatgggtccctccaaatgggagggaaggtacttgtacacggcaatgctgggatttcacgctctgctgcatttgtgattgcttacattatggagactttcgggatgaagtacagagacgcctttgcgtatgtccaggaacgacgtttctgtataaatccaaatgcagggttcgtccaccaactccaggaatacgaagctatttatctggcgaaactcaccattcagatgatgtctccgctgcagattgagaggagtctgtccgtgcatagtgggaccacagggagcctgaagaggacacacgaagaagaagatgacttcggaaccatgcaagtggctactgcacagaacggatag

SEQ ID NO: 25912 - DNA, 348 bp, synthetic construct
  source 1..348: mol_type = other DNA; note = Synthetic coding sequence
atgcccatcctgctgttcctgatcgacaccagcgccagcatgaaccaacggagccatctgggcaccacttacctggatacggctaagggcgctgtggaaacgtttatgaaactaagagcaagggatcccgccagccggggcgaccggtacatgcttgttacatttgaagaacccccgtatgcaatcaaagcaggatggaaggaaaaccacgccacctttatgaacgagcttaaaaacttgcaggctgaagggctgactaccctgggccaatcactccgaaccgcatttgatctgctcaacctgaaccgtctggtcacaggcatagataactacgggcaagtgggttag

SEQ ID NO: 25913 - DNA, 390 bp, synthetic construct
  source 1..390: mol_type = other DNA; note = Synthetic coding sequence
atggccgagctgatccagaagaagctgcagggcgaggtggagaagtaccagcagctccaaaaggacctaagcaaatccatgagcggtagacagaagttggaggctcagctgacagaaaacaacatcgtgaaggaagaactggcattactggatggttccaatgtagtttttaagctgctcgggccagtgttggtcaagcaggaactcggcgaggctcgcgctactgtggggaaacggctcgattacatcacagccgagattaagaggtatgagtctcagctccgggacctggaaaggcagagcgaacaacagcgtgaaacactcgcccaactccaacaggaatttcagcgcgcccaggcagctaaggcgggagcgccgggcaaggcgtag

SEQ ID NO: 25914 - DNA, 2676 bp, synthetic construct
  source 1..2676: mol_type = other DNA; note = Synthetic coding sequence
atggtggcccccgtgctggagaccagccacgtgttctgctgccccaaccgcgtcagaggcgtgctgaattggtcttccgggcctcgcggtctgcttgccttcggaaccagttgcagcgtggtgctttacgacccactgaagcgcgtggtggttactaatctcaacgggcatacagcgcgcgtgaactgtatccaatggatttgtaaacaggacggctctccatctaccgagctggtgagtgggggttccgacaatcaggtcatccactgggagatcgaggacaaccagttgctgaaggcagtgcacctgcaaggacatgaagggcccgtgtacgccgtgcacgccgtgtatcagcggcgcacttccgatcccgctttgtgtacgctcatcgttagcgctgccgctgattcagcagtccgcctttggagtaagaaagggcccgaggtgatgtgccttcaaacgctcaattttgggaacggttttgcacttgccctgtgcctgtccttcctccccaatactgacgtgacctggaaaacagggcaggttgaacgggggcgggcctggaaacccccggcctctctcgccttgtgtagccggtcctgcgattccatggtgtcttgttacgcttcaattctgtgcaaggcactgtggaaggagaaactacataccttttggcaccacaatagaatttccttcttgccgtcggcatttagacctatccctatcttagcctgcggcaacgatgattgcaggattcatatcttcgcccagcaaaatgaccagtttcaaaaggtcctgagcttgtgtggacatgaggactggattagaggagttgagtgggcagcctttggcagggacttgttcctagccagctgttcccaggactgcctgatcagaatttggaaactgtacatcaaatccacttctcttgagacacaagacgacgataacataagactgaaagaaaatacgttcaccattgaaaatgagtctgtgaagatcgcatttgcagtgactctcgagacagtattggcaggacacgaaaactgggtgaacgctgttcattggcagcccgttttctacaaggacggcgtgctgcaacaaccagtgagactcctatcagcttccatggacaagactatgatcttatgggcgccggacgaagaatccggcgtgtggctcgagcaggtgcgcgttggagaggtaggcggcaacaccctcggtttttacgactgtcagtttaacgaggacggcagtatgattatagcgcacgctttccacggagccctgcacctgtggaaacagaacacagtgaatcctcgcgagtggacccctgagatagtaatatcagggcatttcgacggtgtacaggacctcgtgtgggacccagagggagagtttattatcacagtgggaacggaccagaccacgaggctctttgcgccgtggaagaggaaggaccaaagccaggttacatggcatgagatcgccagaccccaaattcatggatacgatctgaaatgtttggccatgatcaaccgtttccagtttgtgtccggagcagatgaaaaggtcctgcgcgtcttctcagctccgcgaaatttcgtggagaatttttgcgcaataacaggtcagtctctcaaccatgtcctgtgcaaccaggattccgacctgcctgagggcgcgacagtgccagctctggggctttcgaacaaagccgtattccagggcgacatcgcctctcagccatctgacgaagaagagctcttgacaagtaccgggtttgagtaccagcaggtggcgtttcagccgtccatcttgacagaaccgcctacagaagaccacctgcttcagaacactttatggcctgaggtgcagaaactctatggccatggatatgagattttttgtgtgacttgcaatagttcgaaaaccctcttggccagcgcgtgcaaagccgccaagaaggaacacgctgcgattatcttgtggaacacgacctcctggaagcaggtgcagaatttggtatttcactccctcacagtgacccagatggcctttagccccaacgaaaaattcctgcttgccgtgtcccgggaccggacctggagtctttggaaaaaacaggatacaatttcacctgaattcgaacccgtcttttctctttttgcttttacgaacaagataacctcggtacactccagaatcatctggagctgcgattggtcccctgacagtaaatatttttttaccggtagtcgcgataagaaggtggtcgtgtggggcgagtgtgattccactgacgactgtattgaacataacattggaccttgctcctcagtcctggatgtgggtggggcagtcactgccgtgtctgtctgtcccgttcttcaccctagccagcgatatgtcgtggctgtcggcttggaatgtgggaaaatttgtttgtacacctggaaaaagacggatcaagtgcctgaaattaacgactggacacactgcgtcgaaacttctcaatcccaaagccacactcttgccatccgaaaactctgttggaagaactgttccgggaaaaccgagcagaaagaggccgagggcgcggaatggctgcacttcgcgtcctgcggtgaggatcacactgttaagatccaccgggtcaacaagtgcgccttgtag

SEQ ID NO: 25915 - DNA, 573 bp, synthetic construct
  source 1..573: mol_type = other DNA; note = Synthetic coding sequence
atgggccccctgccccggaccgtggagctgttctacgacgtgctgtctccttatagttggctcggcttcgagatcttatgtagatatcagaatatctggaacatcaatctgcagttgcgtcccagtctgatcactggcatcatgaaggattccggcaacaaaccacccgggctgctgcccaggaaaggtctttacatggcgaacgacctgaaacttctgagacaccacttgcagatccccattcactttccaaaggacttcctttcagtgatgcttgagaagggctcactgtcagcaatgaggttcctgactgctgtgaacctagagcaccccgagatgttagagaaagcaagccgcgagttgtggatgagggtctggagtcgtaacgaggatatcacagagccacagtcaatcctggccgcagctgagaaggccggcatgagtgcagaacaggcgcagggcttgctcgagaaaatagctaccccgaaagtgaagaatcagttgaaagaaactaccgaagccgcctgtcgctatggagaacgttccggttgggcactgtaccttcagccatag

SEQ ID NO: 25916 - DNA, 1482 bp, synthetic construct
  source 1..1482: mol_type = other DNA; note = Synthetic coding sequence
atgatgaagcggcagctgcaccggatgcggcagctggcccagaccggtagtctgggtagaacccccgagactgcggaattcttgggggaggatctgctgcaggttgagcagcgcctggaacctgcaaaacgtgctgcgcacaacatacataaaaggctgcaggcttgcttacagggacaaagtggagccgacatggacaagcgggtcaagaagttgcctctgatggccttatcaactacaatggctgagagctttaaagagctggaccccgacagttctatgggcaaggccttggagatgtcctgcgccatccagaatcagctggccagaatcttagcagagtttgaaatgacattggagagagacgtgctacagcctctgtcgcgcctcagcgaagaggagcttcctgcaatcctgaaacacaagaagtcactccagaagctagtgtctgattggaataccctcaagtctcgcctgtcccaagctaccaagaattccggctcaagccagggcttaggcggttcacctggctctcactcacataccaccatggccaacaaggtggagacactaaaagaggaggaggaggaactcaagcggaaggtcgagcagtgtagagatgaatatctggctgacttgtaccattttgtgacaaaggaagattcctacgccaattatttcattcggctcctcgagatccaggccgattaccaccgcaggtcactgtcatctctggacacagctctggctgagttgagggagaaccatgggcaggcagaccacagcccatcaatgaccgccactcatttccctcgagtgtatggcgtctccctggcgacccacctccaagaattgggacgagaaattgccctcccaattgaggcatgtgtgatgatgctgctgagcgagggaatgaaggaggaaggcctgtttagactggctgctggagcttcagttctgaaaaggctgaagcagactatggcctctgacccgcactctctggaggagttttgttcagacccccatgccgtggctggggccctaaagagctacttacgcgagctcccagagccactgatgacctttgacctatatgacgattggatgagggctgcaagtcttaaagagcctggcgcccgacttcaggccctacaggaagtgtgcagcaggctgcctcctgaaaacctgagcaacctcaggtacctcatgaaatttctggcacgtctggctgaggagcaagaagtaaataagatgacaccttcaaacatagcaatagtgctaggccctaacttactgtggcctcctgagaaagaaggcctggaatacagcggggctatctccgcgcactgcaatctgcggctgccgggatcttcagattcctcggccagcgcatgccaggttgccggtacaacagggacacgcccatcctggatgcagcctccatgcctgccttcacggtggtgggcctcatcccgacgctag

SEQ ID NO: 25917 - DNA, 45 bp, synthetic construct; identical to SEQ ID NO: 12369
  source 1..45: mol_type = other DNA; note = Synthetic coding sequence

SEQ ID NO: 25918 - DNA, 828 bp, synthetic construct
  source 1..828: mol_type = other DNA; note = Synthetic coding sequence
atgagcgccgaggtgaaggtgaccggccagaaccaggagcagttcctacttctggcaaagtctgccaagggtgcagctctggctactctgatccatcaggttctcgaggctcccggagtgtatgtcttcggggagctgctggatatgcccaacgtgcgggaactggcagaatcagattttgccagcacatttcgtcttctcactgttttcgcttatggtacttatgctgattacctggcagaggcccggaacttgccgcctctgaccgaggcccagaagaataagctgaggcatttgagtgtcgttacactggccgccaaggtgaaatgcatcccttatgccgtactccttgaagccctagcccttaggaacgtgcgccagttggaagacttggttattgaagcagtgtatgccgacgtgctgcgcggctccctggaccagcggaaccagcgactcgaagtggattattcaattggtagagacatacaacgccaagatctcagtgctattgcacgcacattgcaagagtggtgcgtcggttgcgaggtggtcctgtccggcattgaggagcaggtgagtcgggccaaccagcacaaagagcagcagctcggcctgaagcaacagatcgaaagcgaggttgccaacctcaagaaaaccatcaaagttacaacagcagccgcggcagcagctacttcccaggatcctgagcaacacctcacagagcttcgggaacctgcccccggcaccaatcagagacagccttcaaaaaaggcatcaaagggcaagggtctcagaggaagcgctaagatatggtctaaatccaactag

SEQ ID NO: 25919 - DNA, 1506 bp, synthetic construct
  source 1..1506: mol_type = other DNA; note = Synthetic coding sequence
atggccgcccccgagcccgccccccggcgggcccgggagcgggagcgggagagagaagatgagtcagaggatgagagtgatatactcgaggaaagtccatgcggaagatggcaaaagcgtcgagaacaggttaatcaaggaaacatgccggggctgcagagcactttcctggccatggacactgaagagggggtcgaggtggtttggaacgagcttcatttcggcgatcggaaggcctttgccgcacatgaagaaaagattcagaccgtcttcgaacagctggtgctggtcgaccacccaaatattgtgaagcttcacaagtattggttggatactagcgaagcatgcgcgagggtgatctttatcacggagtatgtctcctcaggaagcctaaaacagtttttgaagaaaaccaagaagaatcacaaggctatgaacgcgcgtgcctggaaaaggtggtgtacccaaatcctatccgccctcagttttctgcatgcctgcagcccccccatcatacacggcaatctcacctccgatactatctttatacagcataatggactgattaaaattggctctgtatggcataggatatttagtaacgccttgcctgatgatctgcgctctcccatccgcgctgagcgagaagagctcaggaatctgcatttcttcccacctgaatacggggaggtggccgatggaaccgcagtagatatcttcagctttggcatgtgtgctctggagatggctgttctcgagatccagactaacggagacactagggtgacggaagaggcgattgccagagcacggcactcattgagcgaccccaatatgagagagttcatcctttgttgtctggctagagatcccgcaaggcgcccttctgcacactccctgttgtttcacagggtactcttcgaggtgcactcattgaagttgctcgccgcccactgctttatccagcaccagtatctgatgccagagaacgtcgttgaggaaaagacaaaggccatggacctccacgccgtcctggccgaactccctcgcccacgacgtcctcctctgcagtggagatactcggaggttagtttcatggaacttgataagtttttggaggacgtcaggaacggtatctaccctttaatgaacttcgccgctacccgtccccttgggctccctcgagtcctggcgcctccgccggaggaggtacaaaaagcaaagacccctacacccgagcccttcgattctgagaccaggaaggttattcagatgcagtgcaacctcgagcggtctgaggacaaggcccgctggcatctgactctgctgctggttctcgaggataggctgcacaggcagcttacttatgacctcctgcccaccgatagcgcccaggatctggcgtccgagctcgtccattacggcttcttgcacgaggatgacaggatgaagcttgccgcgttcttagaatcgaccttcctgaaatataggggcacacaagcatag

SEQ ID NO: 25920 - DNA, 36 bp, synthetic construct; identical to SEQ ID NO: 12372
  source 1..36: mol_type = other DNA; note = Synthetic coding sequence

SEQ ID NO: 25921 - DNA, 534 bp, synthetic construct
  source 1..534: mol_type = other DNA; note = Synthetic coding sequence
atgctgctggacaagaacgtgcccaacccccggatcaagctgatcgacttcgggattgctcacaaaattgaggccggtaatgagttcaagaatatctttgggacccctgaattcgtcgcccctgaaattgttaattacgaacctttgggcttagaagccgacatgtggagcattggagtaattacatacattttgcttagcggcgcatcgccctttctgggcgaaacaaagcaggagacgctgactaacattagcgctgtgaattacgatttcgatgaagagtattttagtaacacatccgagctggctaaggacttcatccgacggctgctggtcaaagaccccaagcggcgaatgactatcgcgcagtctttagagcacagttggataaaagcaatccgccggcgcaacgttcgcggggaggatagcgggagaaaacccgaacggaggcgtttaaaaactacacgcctgaaggaatacacaataaaatctcatagtagcgcttcaccgatcgttgccccggtagacgcgtag

SEQ ID NO: 25922 - DNA, 615 bp, synthetic construct
  source 1..615: mol_type = other DNA; note = Synthetic coding sequence
atgggcgacaagaagagccccacccggcccaagcggcagcccaagccctcctccgacgagggctattgggattgttcagtgtgtacatttagaaacagcgccgaggctttcaagtgtatgatgtgcgacgtgagaaaagggaccagcacgcggtcaacattgtttgaggtaatcgtcagcgcctctagaacaaaggagcccttgaaatttccaatctcaggtcgcaagccgaggcccgtgagccagttagtcgctcagcaggtcacccaacagtttgtgccgccgacccaaagcaaaaaagagaaaaaagataaggtcgagaaagaaaagtcagagaaggaaactacatcaaaaaagaactcacacaaaaagacccggccacggctgaagaacgtcgacaggtcgagtgcccagcatctcgaagtcacagtcggtgacctgacagtgatcatcacagactttaaggaaaagaccaaaagtcccccggcctcctctgccgcatctgctgaccagcattcccagagtggctcctccagtgataacactgaaaggggtatgtcacggtcatcttcaccccgcggagaagcatccagcctgaacggagaatctcactag

SEQ ID NO: 25923 - DNA, 1350 bp, synthetic construct
  source 1..1350: mol_type = other DNA; note = Synthetic coding sequence
atgatgctgggcaccgagggcggcgagggcttcgtggtgaaggtgcgaggccttccatggagttgctcagccgatgaggtgcaacgcttcttttcagattgcaagatccagaacggcgcccagggcattcgattcatttataccagagaaggccgtccatcaggagaggcttttgtcgaattggagagtgaagacgaagtgaagctggctctcaaaaaagaccgtgagacgatggggcataggtatgtggaggtttttaaatccaacaacgtagagatggactgggttctgaagcacaccggaccaaacagcccagacacggcaaacgacggttttgtgcgattgagaggactgccctttgggtgcagcaaagaagagatcgtacagtttttttccggtctggaaatagttccaaacggtatcaccctgccagttgatttccagggaagatcaactggggaggctttcgtccagtttgcctcacaggaaatcgctgagaaagccctgaagaagcacaaggagcgtatagggcacagatatattgaaatctttaaatcatcacgggccgaagtaagaacccattacgacccgcctcggaagctcatggctatgcagcggcctggaccctacgaccgccctggcgctggacgaggttacaactcaataggacgaggagccggatttgaaaggatgcggcggggtgcctacgggggcggttacggcggctatgacgattataacggctacaacgacgggtacggcttcggctcggatcgcttcggacgagatttaaattattgcttctctggcatgtcggaccatcggtacggggatggtggaagtacttttcagagcaccaccggccactgtgtccacatgcgagggctgccttacagagccaccgagaacgatatttacaacttcttctccccactcaaccccgtccgggtgcatattgaaattggacccgacggacgggtgaccggagaagcagacgttgaattcgccactcacgaggatgcagtagctgccatgtccaaagataaggcaaacatgcagcatagatacgtggagctatttcttaatagcactgcaggagcctctggaggggcttatgagcacaggtacgtcgaacttttcctgaactccaccgctggtgcaagtgggggagcctacggctcacagatgatgggtggaatggggttgtcaaaccagagctcctacggtggtcccgcttcacaacagttaagtggcggctacggaggcggctatggcggccagagttccatgtccggctacgaccaggtcctgcaggagaactcaagcgacttccagagcaacatcgcctag

SEQ ID NO: 25924 - DNA, 153 bp, synthetic construct
  source 1..153: mol_type = other DNA; note = Synthetic coding sequence
aagaccggcctgaccggcagccccagcagcctgtgggacctgctgagggagatgttcgtggtatgctctaaggaacagctgcagagcggaggtaagtacagtcatcaggtgtgggccccattttcgcccttagcctctggtgcggcattctag

SEQ ID NO: 25925 - DNA, 4386 bp, synthetic construct
  source 1..4386: mol_type = other DNA; note = Synthetic coding sequence
atgcagcgggagctggtgtacgcccggggcgacggccccggcgccccccggcctgggagcaccgctcaccccccacatgctattcccaacagcccacccagcacccccgtgccgcactcaatgcccccgagcccctctcgaataccttatggtggcacccgaagcatggtggtgcccggaaatgcaaccatccctagagatcggataagctcccttccagttagtcgccccatttctccctctccttctgcaatcctggagcggcgggacgtgaagcccgatgaggacatgtctggcaagaacatagctatgtaccgcaatgaggggttttacgctgatccttacctgtatcacgagggtagaatgtcgattgcctcctctcacggcggacacccgcttgacgtgccggatcacataatcgcatatcacagaactgcgattagaagtgcttctgcctactgtaatccctctatgcaagcggaaatgcatatggaacagtccctataccgacagaaatcccggaagtatccagatagtcatcttccaacactcggaagcaaaactcccccagctagccctcatagggtttcagatttgcggatgatagatatgcacgcccactataacgctcacggtcctccgcataccatgcagcccgatcgcgcctcaccttccaggcaggccttcaaaaaggagcccggcactttggtctatatagagaagccacgctccgcagcgggattgagtagcctagtcgatctggggccaccactgatggagaagcaggtcttcgcttactccaccgcaacaataccaaaggatcgcgagacaagtgagaagatgatgaaaaccacggcaaaccggaaccataccgatagcgctgggacccctcatgtttctgggggcaagatgctgtccgcgctcgaatctaccgtcccgccttctcagccccctccagtggggaccagcgcgatccacatgtccttgctggagatgagacggagcgtagctgagctgcgtctacagttgcagcagatgcggcagctacagctgcagaaccaggaactgctaagggcgatgatgaagaaagcggagcttgagatttccggaaaagtaatggaaacaatgaaacgcttagaagaccctgtgcagcgacagcgagtcttagttgagcaggaacggcagaagtatcttcatgaagaagagaagatagtgaagaagctttgcgagctggaggattttgtggaagacctcaagaaggactcaacagctgcgtcccggttggtgactcttaaggatgtggaagatggagccttcctgctccgccaggtaggagaggcagtggctacgttgaagggagaatttcctacactgcagaacaaaatgcgagccatcctgaggatcgaggtcgaagcggtgcggttccttaaggaggaaccccacaagctagacagtctgttgaagcgggtgcggtctatgaccgacgtgctcaccatgctcaggcgacatgtgaccgatggcttactgaagggtaccgatgctgcccaagccgctcagtatatggccatggaaaaggctacagccgctgaggtcttaaaaagccaggaggaggccgctcatactagtggtcagccttttcactcaactggtgctcccggcgacgctaaaagcgaagttgtgccgttgtctggcatgatggtgcgccacgctcagtcttcccccgtggttatacagccaagccaacatagcgtggccctgcttaatccagcacaaaacctgccacacgtggcaagtagcccagccgttccacaagaggctaccagcacgttgcagatgtcccaggcacctcagtcaccccagatcccgatgaacggctctgctatgcagagcttgttcatcgaagaaattcacagtgtctccgctaaaaatcgggcagtgagtatcgagaaggcagagaaaaaatgggaggagaaaagacagaatctggaccattataatggcaaggagtttgagaagttacttgaggaggcgcaagctaatattatgaagtcaatccctaatttggagatgccaccagctacaggcccattgccacgcggagacgcccctgtggataaggtggagctctccgaagactctcccaattctgaacaggacttggaaaagctggggggcaaatcacccccacccccccccccgccgcctcgacggagctacctgcccgggtccggcctgactacaacacggtcaggggatgtggtgtatacaggcagaaaagagaacatcacagcgaaagcttcttctgaagatgcaggtccgagccctcagaccagagccactaaatatccagctgaggagcccgctagtgcatggactccttcaccgccccccgtcacaacttcctcgtcaaaggacgaggaagaggaagaagaggagggcgacaagataatggctgagctgcaggcttttcagaaatgcagttttatggatgttaatagcaattcccacgccgagccctctagggccgactcgcatgtgaaagacactcggtcaggcgccactgtacctcccaaagagaaaaaaaaccttgaatttttccatgaggatgtgaggaaatccgacgtggagtatgagaacggaccccagatggagtttcaaaaggtgacaacaggggcagtgagaccctcagatccaccgaaatgggaacgaggcatggagaactcaatctccgacgcctccaggacttctgaatacaagaccgaaataatcatgaaggagaactctataagcaatatgtcgctcctcagagatagtcggaattactctcaagagacagtgcctaaagctagcttcggcttctctgggattagtccactggaggatgagattaataaaggatcgaagatttcagggctgcaatacagcatcccggacacagaaaatcagaccctaaactacggaaaaacaaaggaaatggaaaaacagaacacagacaagtgccacgtgagctcccacacgcgtctgacagagagctcagtccacgatttcaaaaccgaagatcaggaagtgattactacagacttcggtcaagtggttctcagaccaaaagaagccaggcacgccaacgtcaacccgaatgaggatggggaaagttcctcgtccagcccgaccgaggaaaatgccgctaccgacaacattgcctttatgatcacagagactaccgtacaggttctctcatcaggggaggtccacgacatcgtgtcccagaaaggggaggatatccaaacggttaatattgatgctaggaaagagatgacccctaggcaagaaggcacagataatgaggatccagttgtgtgcttggacaaaaaaccagtgataatcatttttgacgagcccatggacattaggtctgcctacaagagactgtccacaatctttgaggagtgtgatgaagagctcgaaagaatgatgatggaagaaaaaatcgaagaagaggaagaggaagagaatggggatagtgttgtgcagaacaataatactagtcagatgagtcataaaaaagtggcacccggcaacttacggacaggccagcaggttgaaaccaaatcccagccccattccctggcaacagagacccggaatcctggggggcaagaaatgaacagaacggagcttaataagttctcccacgtcgatagccccaactcagaatgcaaaggagaggacgctactgacgaccagttcgagtcccccaagaagaagttcaaattcaagtttcctaaaaagcagctggccgcactaacacaagccatacgaacagggacgaagactggaaagaagacgctccaggtggttgtatacgaagaagaagaagaggacggcactcttaaacagcataaggaggcgaagaggttcgagattgccaggagccagcccgaagacacccctgaaaacacagtgcggcggcaagagcagcctagcatcgagtctacctcaccaatatcacgcacagacgagatcaggaaaaacacctacaggactctggatagcctcgaacagacgataaagcagctagagaacaccatctctgagatgagcccgaaggcactcgtggacacatcctgttccagcaaccgggacagcgtggcctcttcttctcacattgcccaggaagccagcccaagacccttgctcgtcccggacgagggtccgaccgcgttggaaccaccgaccagcataccctctgccagccggaaaggctcgagcggcgcaccccagacatctaggatgccggtgcccatgagtgccaagaaccgacccggcacattggacaagccaggcaaacagagcaagctacaagaccccagacaatatcgacaatag

SEQ ID NO: 25926 - DNA, 2118 bp, synthetic construct
  source 1..2118: mol_type = other DNA; note = Synthetic coding sequence
atgctgaccctgctggccgaggaccgggccgtgcccagcgcccccactggccctgggccactcctcgagtttgctctgcatgaggatctgctgaccagagtgttaacttggcagctgcaatgggacgagctgggagatggcgttgaagagcgccgggccgagcagctgaagctgttcgaaatgttggtttcagaagcgcgacagcccctgctgcgtcacgggccagtgcgtgaagcattactcaccctgctggacgcgtgtgggcggccagtgccttcgagccccgccttagatgaaggattggtacttctactgagtcaactgtgtgtatgcgtcgcacaggagccttctctcctggaattctttctgcagccgccgcctgaacctggggctgcccctcgactgctgttgttttctagactggtgccatttgtgcatcgagaaggaacacttggccagcaggcccgcgacgcattactgctgctgatggctctgagcgcggggagcccaactgtggggcgatacatcgcagaccattcgtatttttgtcctgtactggcaaccggattatctgccttgtattcaagcctcccaaggaaaatagaggttcccggcgacgattggcactgcctgaggcgcgaagactggctgggcgtacctgcccttgctctgtttatgtcaagcctggagttctgtaacgccgtcattcaggtggcacatccgctggtacaaaagcagttagttgattatatccataacggatttctcgtccctgtcatgggacctgccctccacaaaacctccgtggaggaaatgatagctagtaccgcatacctggagctctttctccggagcatctcagagccagcactcctgagaaccttcctccggttcttgctcctgcatcgccacgacactcacacgatcctggatactcttgtggcgcggattgggagcaacagtaggctctgtatggtgagcctaagtttgtttcggactctgcttaacctgtcatgcgaagacgtgctgctgcagctcgtccttagatatttggtgccgtgtaaccacgtcatgctgtcccagaaacccgctgtccgggatgtcgatctgtacggacgggccgcagacaaattcctttcactgataccacgatgctgccgccatcatgctccgagccctcctcgtcccgaacacgcctcctgggctcgcggtcctggatctcccagtgtggacagctcttccgttacaactgtgcctaggccatcaactccgagcaggctcgccctctttttgcgacaacaaagccttggagggtccgaatcacccggacccgccccttgttcccccgggcttagcgccagccctgcttcctccccaggaagaagacctactcctgcggaggaacccggagagctggaggacaattatctggaatacctgcgcgaagctagacgaggggttgatcggtgcgtccgtgcttgccggacatggagcgccccgtatgatggcgagagacctagtcccgagccctctcctttcgggtctaggacaaagaagcgctcgttgcttcctgaggaagaccgaaacaatgttggcgagggagaggaagaagaactgggaaggaggggaagagctggcggagcaggcgagggtcctgggcatttgcccccgccccagctaaacggcgtgccaggatcctggccagagggggctaaaaaggtacggcttgttcccaaggagggagccggggagctcctggaaggaattagcgagggcatggccggactggaaggatttggccaggagctcagggagctggaggtggcactgtcgaacggcggaaccgggagcgagtctcccctggagcctcctttaccactcgaggaagaagaggcatatgagtccttcacctgtcctcctgagccccccgggccctttctgtcatcccccctgcgaaccctcaaccagctgccgtcacaaccattcactgggccgtttatggcggtactcttcgctaaactggaaaacatgctgcaaaactcagccctttcttgctcaaccccgacctggtcctcctccccagtgtcctcaccttgctgtcggtgttgggcactgtag

SEQ ID NO: 25927 - DNA, 804 bp, synthetic construct
  source 1..804: mol_type = other DNA; note = Synthetic coding sequence
atgatgcggggctacatcaagaaggtgctgaagaacaccagctaccacgtgaaccaatatttgttcatccagcatggctggagcgggtccggcgatcagtccgtgctgtacagctgcaacctgatgcgcatggtgacgaggacaaaaaagatcttcgtaggggggttgtccgccaacacagtcgttgaggacgtgaagcaatactttgaacaatttggcaaagtcgaggatgccatgctcatgttcgataagaccactaacaggcatcgtggttttggcttcgttactttcgaaaatgaagacgtagtcgaaaaagtgtgtgaaatccattttcacgaaatcaacaataaaatggtggagtgcaagaaggcccaaccaaaagaagtgatgttcccccccggtactcgcggccgagctcgcgggcttccatacacgatggatgcttttatgctggggatgggaatgctgggctatcctaatttcgttgccacctacggccgaggctacccgggcttcgccccaagctacgggtatcagttcccagggtttcccgcagctgcgtatggccccgtcgccgccgccgctgttgccgcagcccgaggcagcggaagcaatcctgcccggcccggggggtttccaggggctaattctcccggccctgtggcagacctctacggacccgctagccaggattccggtgtgggaaattacatttctgctgcttccccccagcccgggtctgggtttggacatgggatcgcaggccccctgatcgctacagcttttaccaacggttatcactag

SEQ ID NO: 25928 - DNA, 483 bp, synthetic construct
  source 1..483: mol_type = other DNA; note = Synthetic coding sequence
atgagcagccccctggccagcctgagcaagacccggaaggtgcccttacccagtgaacccatgaacccaggccgcagagggattcgaatctatggcgacgtgccagcaagccacgactctgagttaatggctttcatgacacgcaaactgtgggacctggagcagcaggtgaaagctcaaaccgatgaaattctgtccaaggaccagaagatcgccgcactggaggatctggttcagaccctgcgaccgcatcctgctgaggccacactgcaaaggcaggaggagctggaaaccatgtgtgttcaattacagcgccaggtgcgggagatggaaaggtttctttcagactacgggctccagtgggtgggagagcccatggatcaggaggacagcgagtcgaaaacggtgagtgaacatggagaacgggactggatgaccgccaagaaattctggaagccaggtggcctgataggggccccatag

SEQ ID NO: 25929 - DNA, 462 bp, synthetic construct
  source 1..462: mol_type = other DNA; note = Synthetic coding sequence
tgaagcgtgcagagccccgcccagcagcaggtgcccgcccggcccggggcacccagcgtgcaggtcccaagtccattcttattgcaaaatcagtatgaacctgtgcagccacactggttctattgtaaagaggtggagtacaagcagctttggatgccattcagtgtctttgattccctcaatcttgaagagatatacaactctgtgcagcctgacccagagtcggtcgtccttggaacagatggtgggaggtatgatgtgtacttatacgataggattcgaaaggccgcttactgggaagaagagcctgccgaagtgcgcaggtgtacatggttttacaagggagatacggattctcgattcatcccatacactgaggagtttagtgaaaagctggaggttagagtgctctacttttttatgtcctttttcaagaaatgccgatcttacatccactggtag

SEQ ID NO: 25930 - DNA, 1062 bp, synthetic construct
  source 1..1062: mol_type = other DNA; note = Synthetic coding sequence
atggagcaggagctggagcagctggcccagctgcccagcagcaagaactccctgctgaaagacgcaatggcccctgggacaccaaagtctctcctgctgtccgcgtctatcaagagggaaggggaatccccaaccgcctcgccccactcctctgccaccgacgatctccatcactccgaccggtaccagaccttcctgcgggtgagggctaaccggcagacaaggctgaacgcacggattggcaagatgaaaaggaggaaacaggatgaaggacaagtctgccccttatgcaacaggcccctggctggatctgaacaagagatgtctaggcacgtagagcattgtttgagcaaaagggagggcagttgcatggctgaggatgatgccgttgacatcgaacacgagaacaataaccggttcgaggaatacgagtggtgcggccagaagcgcatcagagccaccacattattggagggaggctttcgaggaagcggctttataatgtgcagtggcaaggagaatccagactccgatgcggatctggacgtggatggcgatgatacccttgaatatgggaaaccccagtacactgaggccgatgtgattccatgtactggcgaggagcctggtgaggctaaggagcgcgaagcactgaggggcgcagtgctcaacggcggacctccatccacacgaatcacccctgagttttctaagtgggcgagtgacgagatgccttctaccagtaacggcgagtcctccaagcaggaggcaatgcagaagacatgtaaaaacagtgacatcgagaagattacagaggacagcgccgtcactacctttgaagcactgaaggcccgagtccgggagctagaaaggcagctgagtaggggagaccgatacaagtgccttatttgtatggacagttacagcatgcctttgacatctatccagtgctggcacgtccactgtgaggaatgctggctgcggactttgggcgcaaagaagctttgtccccaatgcaacaccatcacagctcctggtgacctgagacgcatctacttatag

SEQ ID NO: 25931 - DNA, 1782 bp, synthetic construct
  source 1..1782: mol_type = other DNA; note = Synthetic coding sequence
atggagaagctgagcgccctgcaggagcagaagggcgagctgcggaagcgcctcagttatactacacacaaactggaaaaactcgagactgagtttgatagtacgagacattaccttgaaattgagcttcgacgggcccaggaagagctcgagaaagtcacggaaaagctccggcgtatacagtctaattacatggcactgcagcggatcaatcaggagctggaggacaaactgtacagaatgggccagcattacgaagaggagaagcgcgcccttagtcacgagatagtcgcattgaactcacacctgctggaagctaaggtcaccatcgataagctgagtgaggacaacgagctgtataggaaagattgtaacctagccgcccagttactgcagtgttcgcagacttacggccgagtccataaggtgtccgaattaccgtctgacttccaagagcgggtctccttgcacatggagaaacatggttgctctctgcccagtcccttgtgccaccctgcgtatgccgacagtgttccaacctgtgtgatcgcaaaggtcctagaaaaacccgatcctgctagcctgtcatctaggctcagcgatgcttccgcaagagacttggctttctgcgatggcgttgagaaaccaggacctaggccgccttacaagggcgatatctactgcagcgatactgccttgtattgtcctgaggagcgtcggcgcgacagaagacctagcgtggatgccccagtcacggatgtgggcttcctccgcgcgcagaattctaccgattctgcagctgaggaagaagaggaggctgaggcagctgccttccccgcggggtttcagcacgaggcttttccttcttatgctggaagcctccctacctcgtcttcctactccagcttttccgctacctctgaggaaaaagagcatgcccaggcaagcacactgacggcctcacagcaagccatctatcttaactcaagggatgaacttttcgatcggaagccaccagcaacgacgtacgagggttcaccccgatttgcaaaggctactgcagctgtggctgctcccctagaagcggaagtagcgcctgggtttggccggaccatgagtccttatccagccgaaacctttcggttccctgcgtctcctgggcctcaacaggcactcatgcctcctaatctttggtccctccgggctaaacctggaacggctcggcttcccggggaggacatgagaggccagtggcgacccctgtctgttgaagacatcggcgcgtactcttaccctgtgtccgccgccggtcgagcatctccatgcagtttcagcgagagatactatggaggagccgggggatctcctggtaagaaggccgacggccgggccagtccgctgtatgcgtcctataaagctgacagtttttcggaaggtgatgacctcagtcaggggcacctcgccgagccttgttttctgagagccggtggggatttgtctctatctcccggcagaagtgccgaccccttgcctggatacgccccatccgaaggaggcgacggtgatcggctcggcgtgcaattgtgtggcactgctagttcgcccgaacccgagcaaggcagccgagactccctggaacctagctctatggaggcctcaccagaaatgcatcccgctgccagactttccccccagcaagccttcccccgaaccggcggttctgggctcagccggaaagactccctgactaaagctcagctgtatggcactcttttaaactag

SEQ ID NO: 25932 - DNA, 363 bp, synthetic construct
  source 1..363: mol_type = other DNA; note = Synthetic coding sequence
ctggccctgcagatcagcgagaacctgttcagcaacaaggtgctgaatgccctgaagcctgaaaaggatgttgatggtgttactgacatcaacctgggcaaacttgtccgcggtgacgctcacgagtgtttcgtgtcccccgtggccaaggccgtgatcgaactgctagagaagtcgggagtaaatctagacggtaagaagatactcgtcgtgggagcacacgggtccctcgaggcagccctacagtgcctctttcagcgcaagggcagtatgaccatgtccatccaatggaaaacccggcaactgcagtccaagaccgagagccggtccgtgacacggttggaatgccgaagagttatttag

SEQ ID NO: 25933 - DNA, 1167 bp, synthetic construct
  source 1..1167: mol_type = other DNA; note = Synthetic coding sequence
atgagcggcaccttcctgatccggaagccccagctgctgcagggcgtttacgccatggggttcaaccgccccagcaagatacaagagaatgcattgccaatgatgttggcagagccacctcagaacttaatcgcccagagccaatcggggacagggaagaccgccgcattcgtgctggcaatgctgagtcgggtcgagcctagcgaccggtatcctcaatgtctgtgcctgtctcccacttatgaattggccctgcagaccggcaaggtaattgagcagatgggcaagttttatcccgagctcaaactggcatacgctgtgcggggtaataaactcgagcgcggacagaagatcagcgagcagatagtgatcggaaccccaggcacagtcctcgactggtgctcaaagctcaagtttatagaccccaagaaaattaaagtgttcgtgctggatgaggcggacgtcatgattgccacccaaggccatcaggatcagagcattcgaatccaaagaatgctcccgcggaactgccagatgttgttatttagcgcaacttttgaggatagtgtgtggaagttcgcccagaaggtggtgccagatccaaacgtcatcaagttgaaaagggaggaggagactctcgataccattaagcagtattacgtgctgtgttctagcagggacgagaagtttcaggctctgtgcaacctgtatggagccattactatcgcacaggctatgattttctgtcatactcgcaagacagcttcctggctggccgccgaactctcaaaagaaggtcatcaggtcgcactcctttccggagaaatgatggtggaacagagagccgccgtgattgaaaggtttcgggaagggaaagagaaggttttggtgacaaccaacgtgtgcgctaggggaatagacgtggaacaggtgagtgttgtgatcaactttgacttgcctgtcgataaggatggcaatcctgacaatgaaacttacctccataggataggccgcactggtcgctttggcaagagagggttggctgtgaacatggtggacagtaagcacagtatgaacattctcaatcgaatccaagaacactttaacaagaagatcgagcgactagatacggacgacttggacgaaattgagaagatcgcgaactag

SEQ ID NO: 25934 - DNA, 1821 bp, synthetic construct
  source 1..1821: mol_type = other DNA; note = Synthetic coding sequence
ctgcggcagtgctacaactacaactgccccagcttcctggccgccgccctggctagggcaactagcgatgaagtcttacaaagcgacttgtccgcacattacatccctaaagagaccgatggcactgagggcactgtcgagattgagacggtcaagctagcacggtccgtcttcagcaagctccatgaaatttgctgctcttgggtcaaagacttcccactgcggcggagaccccaactctactacgagacatctatccacgctataaagaatatgcgcaagctgttctataaacatatctctaagaaaaagaaaaagaggaaaaagcgtgactgggaccaagaagaacaggcctattttgcagtgttcgatggccacggaggagtcgatgccgccatctatgctagtatacaccttcacgtgaacttggtgcgccaggaaatgttcccacatgatcctgccgaggctctgtgtcgggctttccgagtgaccgatgaacggttcgtgcagaaagccgcaagggaatcattaaggtgtggcacaacgggtgttgtaacttttattcgtggaaacatgctccatgtggcatgggtgggtgacagccaggtaatgctcgtgagaaagggccaagccgtggaactcatgaaaccccacaagccggatagggaagatgagaagcagagaatagaggcactcggtgggtgtgttgtgtggttcggcgcatggagagttaatgggtcactctcggtatctcgcgcaattggagacgcagagcacaagccctacatctgtggcgatgcagactcggcctccacggtcctcgatggaacggaagattacctcattctggcgtgcgacgggttttacgacacggtaaacccggacgaggctgtgaaggtcgtgtctgaccatcttaaagagaacaacggggattctagcatggttgctcataagctagtcgcctcagccagggacgcgggttcctctgataatatcacggtgatcgtcgttttcttaagggacatgaacaaagcggtgaacgtgagtgaggaatccgactggacagagaacagcttccagggtggccaggaggatggaggggacgacaaggagaatcatggtgaatgcaaacgaccttggccgcaacaccagtgttcggcacccgcggacttgggatatgacggtcgcgtagacagctttaccgatcgcacctctctgtcccctggttcacaaataaatgttctcgaggaccccggctacctcgatcttacccagatcgaagcaagcaagccgcattctgctcagttcttgctgccagtggaaatgttcggccctggagcacccaagaaggccaacctgatcaatgagcttatgatggaaaagaagtctgttcaaagttctctgcctgaatggtctggagcaggagaattcccaaccgcattcaacctcgggtctaccggagagcaaatctaccggatgcagtccctatcacccgtctgttcaggcttggaaaatgagcagtttaagtctcctggtaatcgcgtgtctcgtttaagccacttacggcaccattacagtaagaagtggcacaggtttagatttaatccaaaattttattcattcctcagtgctcaggagcctagccacaagattggaacctctctgtcttctttgacaggatcagggaaacggaaccggatccgctcatccctaccttggagacagaactcctggaagggttattcggagaacatgcgcaagctccggaaaactcacgatattccttgccctgacttgccatggtcctataaaatcgaatag

SEQ ID NO: 25935 - DNA, 678 bp, synthetic construct
  source 1..678: mol_type = other DNA; note = Synthetic coding sequence
atggagaacctgctgcaggccaccaagagccacgtggacaaggtgatcatgaagttggggaaaacaaacgcaaaggctgtgtccgagatgcgacagaagatatggaacaacatgccgaaagaccacccagatcatgagcttatagacccattccctgtcccactggtgattattggaagcaaatacgatgtgttccaggattttgaatccgagaagaggaaagttatttgtaaaaccctgcgttttgtagcccattattatggcgccagcctcatgtttactagcaagtctgaagctctgctcctcaagattcgtggtgtgattaatcagttggcctttggtatagataaatctaagagcatatgtgtcgatcagaataaacctctgtttataaccgccggcttagactcgtttggacagatcggtagcccacccgtgccagagaacgacataggcaaactacacgcacacagcccaatggaactctggaagaaagtgtatgagaagctgtttccacctaaatctattaacactttaaaggatatcaaagatcccgctcgggaccctcagtatgccgagaatgaggtggatgaaatgagaatccagaaagatctcgagctggaacagtataaacgcagctccagtaaaagctggaaacagattgaactcgattcatag

SEQ ID NO: 25936 - DNA, 621 bp, synthetic construct
  source 1..621: mol_type = other DNA; note = Synthetic coding sequence
atgggcttcagcaacatggaggacgacggccccgaggaggaggagcgcgtggccgaaccacaggccaatttcaacaccccgcaggccctgcgctttgaggaactacttgctaacctcctgaacgagcagcaccagatagccaaggagctctttgaacaactcaaaatgaaaaaacccagtgcaaagcagcagaaggaggtggaaaaagtgaagccccagtgtaaagaagttcaccaaaccctgatactggacccggcgcaacgcaaacggctccagcagcagatgcagcaacacgttcagttacttactcagattcacctgctcgccacctgtaatcctaacctgaacccagaggctagttcaactaggatatgtcttaaagaactcgggacctttgcccaaagctccattgcacttcatcatcagtacaatcctaagttccagaccctgttccagccgtgcaaccttatgggagccatgcaattgattgaggatttctctacacacgtcagtatagactgctcgccacacaaaacagtgaaaaagaccgcaaatgaattcccgtgcctgccaaagcaggtggcctggatccttgctacatcgaaggtctttatgtactag

SEQ ID NO: 25937 - DNA, 468 bp, synthetic construct
  source 1..468: mol_type = other DNA; note = Synthetic coding sequence
atgggcaaggactactacaagatcctgggcatccccagcggcgccaacgaagatgagattaagaaggcatacaggaagatggcactcaagtaccaccccgataagaataaagagccaaacgcagaggagaaatttaaggaaatcgccgaggcctacgatgttctctccgatccgaaaaaacgaggtctgtacgatcaatatggggaagaaggacttaaaacgggcggggggacctctggcggctctagtgggtctttccattacacctttcacggcgacccacacgcaacgttcgcctcttttttcggagggagcaatcccttcgacattttctttgcttcaagccggagcactagaccattttcgggttttgatccagacgatatggatgtcgatgaggacgaagatccatttggggccttcggcagatttggttttaacggactttctcgcggaccacggagatag

SEQ ID NO: 25938 - DNA, 246 bp, synthetic construct
  source 1..246: mol_type = other DNA; note = Synthetic coding sequence
atgagcatcagcagcgacgaggtgaacttcctggtgtaccggtaccttcaagaatctggcttcagccacagcgcttttaccttcgggattgaaagccacatcagccagtcaaatattaatggcgctctggtgcccccagcagccctgatatccatcattcaaaagggcctgcaatacgttgaggccgaagtaagcattaatgaagacggaaccctgttcgacgggcgccctatcgaatcactgtag

SEQ ID NO: 25939 - DNA, 1248 bp, synthetic construct
  source 1..1248: mol_type = other DNA; note = Synthetic coding sequence
atggcccccgtgggcgtggagaagaagctgctgctgggccccaacggccctgccgtggctgcagctggggatctgacatcagaggaagaggaaggccagtcactctggagctcgattctgtctgaggtatcaacacgcgcccggagtaaactgccctcaggaaagaatatactggtctttggggaagacggatctggaaagacgacactgatgacgaagctgcagggggctgagcacggcaaaaagggaagagggttggaatatctatatttgtcggtgcatgatgaagaccgtgacgtcgtcaaagacttccaagactatatggagcctgaggaaggttgtcagggctctcctcaacgacggggtcctttaaccagtggctccgatgaggagaacgtcgctctccccttaggagacaatgttctcacccataatctcggaatcccagtgctggttgtttgtaccaaatgcgatgcagtctccgtgcttgagaaggagcacgattaccgcgatgagcatctggacttcatacagtcccacctccggaggttttgcctgcagtatggcgccgcccttatctatacaagtgtgaaagaggaaaagaacttggacctgctatataaatatatcgtccacaagacctacggattccatttcaccaccccggccctcgtagtcgagaaggatgctgtttttatcccggcaggctgggataacgagaaaaaaatcgccatcctgcatgagaactttacaactgttaaacctgaggacgcatatgaagactttatcgtgaaacctcctgtacgcaaactagtgcacgataaagagcttgctgctgaagacgagcaggttttcttgatgaagcagcaatcccttttggcaaagcagcccgctacccctacgagggctagcgagagtccagcgagaggccctagtggctcccctcgcacacaaggtcgggggggcccagcttccgtcccttcttctagccctgggacatcggtgaagaagcctgatcctaatataaagaataatgctgcctcagagggtgtgttagcaagcttcttcaattccctgctgagcaaaaagacaggctcaccaggcagtccaggagcaggcggagtgcaatccaccgccaagaaatccggacagaaaaccgtgctgtccaatgtgcaggaggagctcgaccgtatgaccaggaagccggatagtatggtcacaaattctagcaccgagaacgaagcatag

SEQ ID NO: 25940 - DNA, 1929 bp, synthetic construct
  source 1..1929: mol_type = other DNA; note = Synthetic coding sequence
atgcggagcatcacccagggcgcctgccggttcatctgggaggacaagggatatatctctggggatcacatcaacctcgtaagtagctcattgagctccttccctattctgcagcggtcgagcgaagaaaagatcctgtactcggatcgcctgtctctggagcggcagaagctcaccgtttgtccaatcatcaacggagaagaccacctccgtttattgaatttccagcataacttcatcactcggatccaaaatattagtaacctgcagaagctaattagcctggatctctacgataaccaaattgaggaaatatctggcctgagtactctgaggtgcttgcgggttttgctgctcggcaaaaatcggattaagaaaattagcaacctggagaacctcaagtcccttgacgtgcttgatctgcacggcaatcaaataacgaagatcgagaacattaatcatctttgtgaactgcgggtgttaaaccttgcacggaatttcctttctcatgttgataaccttaacggtttggactccctgacagagctgaacctgaggcataatcagattacattcgttagggacgtggacaatctcccatgcctccaacatttatttctatctttcaacaacatttcatccttcgattcagtgagttgcctagccgacagctcatctctgtccgatattacattcgatggaaaccccatcgcccaggaaagttggtacaaacacacagttttgcagaacatgatgcagctgagacagctggacatgaagcgtatcaccgaggaggagcgccggatggcgtccgtgctagcgaaaaaggaggaggagaagaaacgagagagtcacaagcagagcctgttaaaagaaaagaagagattgactataaataatgtggcgcgtcaatgggacctgcagcagcagcgcgtggctaatatcgctactaacgaagaccgtaaagattctgactcccctcaggatccatgtcagatcgatggcagcacactgtcagccttccctgaggagaccgggccgctggacagtggattgaacaacgccctccagggcctttcagtaatcgatacttacttagtggaagttgacggagacaccctgagcttatacggcagcggcgccttggaatccttggataggaactggtcagtccagacagcagggatgattaccacggtctcctttacttttatcgaattcgatgagatcgttcaagtgctgcctaagctgaagatcaaatttcctaatagcttgcatctgaagtttaaagagactaacctggtcatgcttcaacagttcaacgcgttagcccagctgcgacggatcgaccagttaaccatagatccacagggcaaccccgtggtgaatttcacattgtggaagtactacgtactgtttagattatcacactttagcatgcagaagatcaacggtacagaggtgacacagaatgacatgatcatggctgaacgcctcttcggaattctggcgcacgtcgccagcagcgagctgcctcagtacaggcttatctccatcctcggtgatgcccgtaaaaaacagttccggtatctgctagagagcaagggaaaaaaacctggaatcattaatgaagaaaacaatgatagtaaacgactggtaggcgaaaataccaatagagctactttgaactatactactagggacttttataacgaaaagctggaggaaattaaagagaagaagaaattttgcaagacatatatcgaagatctggtaaaggaagctaccgaaatcaacatgaaaaacgaggccctgcaaaagctatggccccaaatgttcatcgaactagtacgggatgctgtaatcgagatacgaaacaagaatagttatatgaagctttgcttgcagcagataacagaccagaagtag

SEQ ID NO: 25941 - DNA, 432 bp, synthetic construct
  source 1..432: mol_type = other DNA; note = Synthetic coding sequence
cggctgggccggtacgaggtggagaagcggtgcgccgtggagaaggaggactatgacttggccaaagagaaaaagcagcagatggagcagtacagggccgaggtctacgaacagctagagctccactctctgctggacgccgaactgcattctgcggtggaccccttactgcccgctaccgatcctcacccgaagatcaacgcggagagccttccgtacgatgaaaggcctctgccagccattcggaagcattatggagaagccgttgtggagcccgaaatgagcaatgccgacatcagtgacgcgcggcggggaggtatgctgggcgagcccgagccattaactgagaaagcactgcgtgaggcctcttccgccatagatgtgctcggggagacactggtcgcagaggcctactgcaagacttggagctag

SEQ ID NO: 25942 - DNA, 1842 bp, synthetic construct
  source 1..1842: mol_type = other DNA; note = Synthetic coding sequence
atggccaccatccccgactggaagctgcagctgctggcccggcggcgtcaagaagaggccagcgtgagaggccgcgagaaggcagagagagaacggctgtcccagatgcccgcctggaagcgggggctgctggagcgcaggcgggccaagctgggattgtcacctggggaacctagcccagttttaggaacagtcgaagccggcccgcccgaccccgacgaatcagccgttctgctagaggcgatcgggccagtgcatcagaatcggttcatccgccaggaacgccagcaacagcaacagcagcagcaacgatcagaggagctgctggctgaacgtaaaccgggacctcttgaagctcgtgagagaaggcctagcccaggggagatgcgcgaccagtcgccaaaaggaagagaaagcagggaagagaggttatctccccgagagaccagggagagacggctgggtattggtggagcccaggagctaagcctgaggcccttagaggcaagagactggcgccagagtccaggggaggtaggggatagatcaagccggttgagcgaagcttggaagtggcggctctcccctggcgaaactccagaacgttcactgcgcctagccgaaagtcgcgaacagtctccaagaagaaaagaggtggagagcagactgtccccaggcgagagtgcttaccagaaacttggcctgaccgaagcccacaagtggagacccgattccagggaatcacaggagcagtccctggtccagctggaagctaccgagtggcggctgagaagcggagaagagcggcaagattacagcgaagaatgtggccgcaaggaagagtggccggtgcccggagtcgcgcccaaagaaactgctgagctgtctgagacactgaccagggaggcccagggaaattcttctgcaggagtcgaagccgccgagcagaggccagtagaggacggcgagcgtggcatgaagcctactgagggctggaagtggaccctaaattctgggaaggctagagaatggacccctagagacattgaggctcagactcaaaaaccagaaccccccgagagcgccgagaaattgttggagagccccggagtggaggcaggcgagggcgaggctgagaaggaggaggcgggggcccagggaaggccgcttcgcgcattacaaaactgctgttcggtgcctagtcccctgccccctgaggacgctgggaccggaggacttcggcagcaggaggaggaagccgtggaactccagccaccgccgcccgcgcccctctctccaccccctccagctcccaccgctcctcagccaccgggcgatccactcatgagcagactgttctacggcgtgaaagccgggccaggtgttggggcgccgagaaggagtggacacaccttcacagtgaacccccgaaggtcagtgcctcccgccactccggcgaccccaaccagtcccgctaccgtcgacgctgctgtgcccggtgcaggcaagaagcgttaccccacggccgaggagatcctcgtgctcggtgggtatctgcggctttcccgcagctgcctggctaagggcagcccagaaaggcaccataagcaactgaaaatctccttctccgagacagcccttgagaccacctaccaatatccctccgagtctagtgttttggaggagctgggccctgagcccgaagtgccgagtgcccccaacccacctgccgctcagccggacgacgaagaagacgaagaagaactgctgctgctacagccagaactgcagggcgggctgaggacaaaagcgctgatcgtggatgagagttgcaggcggtag

SEQ ID NO: 25943 - DNA, 552 bp, synthetic construct
  source 1..552: mol_type = other DNA; note = Synthetic coding sequence
atgggccccctgccccggaccgtggagctgttctacgacgtgctgagcccatattcatggcttgggtttgaaattttgtgcagataccagaacatttggaacatcaatctgcagttgcggccttctcttattaccgggatcatgaaggatagtgggtcgctgtcagctatgaggtttctgactgccgtcaatctcgagcacccagagatgctggagaaggctagcagggagctctggatgcgggtatggtctaggaatgaggacatcactgaaccccagagtatccttgctgccgcagaaaaagccggaatgagcgcagagcaggcccagggtctgctggagaagatcgctacccccaaagtgaagaaccagcttaaggagaccacagaggcagcctgtcgatatggcgcatttggccttcccattacagtggcccacgtggatggacagacacacatgttgtttgggtcagatagaatggaactactggctcacttgctaggagaaaagtggatgggaccaatcccacccgctgttaacgcaaggttgtag

SEQ ID NO: 25944 - DNA, 306 bp, synthetic construct
  source 1..306: mol_type = other DNA; note = Synthetic coding sequence
gagggcaccagcggcaagaccgccctgcacctggccgtggagacccaggagcggggccttgtgcagtttcttctgcaagccggcgctcaggttgatgcaaggatgctgaacgggtgtacaccactgcatctcgctgctggccggggtctcatggggattagttctacactctgcaaggcaggagctgacagcctgttacgaaacgtcgaggacgaaacgccacaggaccttactgaggagtccctagtgctgcttcccttcgatgatcttaagatatcgggaaaactgttgttatgcacggactag

SEQ ID NO: 25945 - DNA, 14586 bp, synthetic construct
  source 1..14586: mol_type = other DNA; note = Synthetic coding sequence
atggccaccatgatcccccccgtgaagctgaagtggctggagcaccttaattccagctggattaccgaggactcagagagtatcgccactagagagggagtggccgtcctgtattcaaagctggtgtccaataaggaagtggtaccccttcctcagcaggtgctgtgcctcaaaggcccccagctcccagactttgagcgggagtccctgagctcagacgagcaggatcactatctggacgcactgctaagttcccagctggccctggctaaaatggtgtgttctgacagccccttcgctggggccctgagaaagcgtctgctcgtgcttcagagggtgttctatgctctcagcaataagtaccatgacaaaggaaaggttaagcagcagcagcatagcccagagtcctcatcagggagtgccgatgtgcattctgtctccgaacgaccgaggtccagcacggacgccctcattgagatgggcgttcgaaccgggttgtcactgctgttcgcactgctgaggcagtcctggatgatgcccgtctctggaccaggcttaagtctctgcaatgatgttatccacaccgccatcgaagttgtgtccagtctcccacccctgagccttgctaacgagtcaaaaatacccccgatgggtctcgactgcctctctcaggtgaccactttcctgaagggcgtcacaatccctaattctggagcagacactctcggtcggcgactagcgagtgaattgttgctgggccttgctgctcagcgcgggtcactgagatacctgctcgaatggattgagatggctctcggtgcctcggcagtagtgcatacaatggagaaggggaagcttctgtctagccaggaaggaatgatttccttcgactgcttcatgacaattctgatgcaaatgagacgctctctgggatcgtccgccgatcggtcacagtggagggagcccacgcgcacttctgacggcctgtgttcactttatgaagccgcactgtgcctgtttgaggaagtatgtaggatggcgtccgattattctagaacctgtgcatctcccgattccattcaaaccggggacgcgccgatcgttagcgaaacatgtgaggtctacgtgtggggctccaactcctcccatcagctggttgaaggcacacaggagaaaattctgcagcctaaactcgctccatcgtttagtgatgcccaaacaatagaggccggtcaatactgcaccttcgtaatctcaacagacggaagcgtacgggcctgcggaaaagggtcgtacgggcggctcgggctcggggatagtaataatcaatctaccctcaagaagttaacctttgagccacaccgtagcattaagaaggtgagttcctcaaaagggtccgacgggcacaccttagcttttaccacagagggcgaagttttcagctggggcgatggcgattatgggaaactggggcatggcaactctagcacccagaagtatcctaaactgatacaagggcctctgcagggaaaagtcgttgtctgcgttagcgccggctaccgccattcagctgccgtaactgaagacggcgagctgtacacatggggagagggggactttggcaggctgggccacggtgacagtaactcgcgaaacatccccactctggttaaggatatctccaacgtgggagaagtttcctgcgggtccagccacaccatcgccctgtcaaaggatgggcgtacagtgtggtccttcggtggcggggataatggcaagctcggccacggcgatactaacagggtatataagcctaaggtgatcgaagccctccagggcatgttcattcggaaggtgtgcgctggttcccagagttccctggccctcacatctacgggacaagtgtatgcatggggctgcggcgcatgtctggggtgtgggtcctcagaggctactgccctcagacccaagctgattgaagaactggcggcgacccgaattgtggatgtgtccatcggcgattcacattgcctggctttgtcccacgataatgaagtctacgcctggggaaataacagcatggggcagtgcggccagggcaattctacaggccctattacgaagcctaagaaggtgtccggcctcgacggcattgctatccagcagatctcagccggcacctcacattctctggcgtggacagccctcccccgcgaccggcaggtggtggcatggcaccgaccctactgtgtcgatctcgaagagtcgaccttctctcatcttagaagcttcctcgagaggtattgcgataagattaatagcgaaattccaccactgcctttcccttcttcacgagaacaccatagctttctcaagctatgcctaaagctactatctaaccacctagctctggcgttagccggaggcgtggctacctctattctgggtcgccaggctggtccactgcgcaatctgctgtttcggctgatggactctactgtacccgatgagatccaggaggtcgtgatagaaacattatccgttggggctacaatgctcttaccccctctgcgtgagcgaatggagcttcttcattccctcctgccgcagggacctgaccggtgggaatctctaagcaagggccaacgtatgcagctggacatcattctaaccagcttacaagaccatacacacgtggcctcacttctcgggtacagttctcctagcgacgctgctgatctctcgtcagtttgtaccgggtatggaaacctatcggaccagccgtatggcacccagtcatgccatccagacacacatctagcagaaattctgatgaaaactctgcttagaaatctcggattctacacggaccaagcgtttggcgagttagagaaaaacagcgataaatttctcctgggcacgtccagctctgaaaattcccagcctgctcatcttcacgagctcctgtgctctctgcaaaaacagttgttggcattttgccatatcaataacatttcagagaactcttcgtcggtggccctgctacacaaacacctccagttgcttctgccacacgccaccgacatctattccagatccgccaacttgctcaaagaatctccttggaacggcagtgtgggagagaaattacgtgacgtgatctacgtttccgccgctggatctatgctgtgccaaatagtaaattctctgctgctgctaccagtgtctgtcgcacggcctctgttgtcttacctactcgatttattgcccccattggactgcctgaaccggcttctgccggccgctgatctgctcgaggaccaggaactacagtggcccttgcatggaggcccagagctgattgaccctgcaggtctgccgttgcctcagcccgcgcaatcttgggtatggctggtcgatctggaacgtacaattgcattgcttatcgggcgatgtctgggaggtatgctgcaaggctctcccgtgtccccagaagagcaagatacagcctattggatgaaaacacctctgttttccgacggtgtggagatggacacaccgcagcttgacaaatgcatgtcctgtctgctcgaggttgcactgtccgggaacgaggaacagaaaccctttgactataagctgaggcctgaaatcgccgtgtacgtggacctggcactgggttgcagcaaggagcccgccagatcactatggatcagcatgcaggactacgccgtgagcaaagactgggactcagcaaccctgtccaatgaatccctacttgatacagtgtccaggttcgtgcttgcggcgctgctgaagcacacgaatctcctgtcgcaggcatgtggggaatcccggtaccaaccaggaaagcatctttccgaggtttacaggtgtgtgtacaaggtgagatcaaggcttttggcctgtaaaaatttagagctaatccagacaagatcctcctcccgggaccgctggataagcgagaaccaggactccgcagatgtggaccctcaggaacatagctttacacggacgatagatgaagaggctgaaatggaggagcaggctgagagggacagggaggaaggccatcccgaacccgaggatgaagaggaggaaagagagcacgaggtgatgactgcaggaaaaatctttcaatgcttcttgtctgcccgggaggtcgccaggagccgagaccgcgataggatgaactcgggagctggaagcggtgcaagggcagacgatcctccccctcagtctcagcaggagcggagggtgagtaccgatctgccagaggggcaagacgtctacacagcagcttgtaattccgtaatccacagatgtgcccttctaattctgggggtcagtccagtaatcgacgagctgcagaagcgccgcgaggaaggccagctacaacagcccagcaccagcgcctccgagggagggggactcatgacccggtccgagagcctgaccgctgagtcaaggttagttcacactagtcccaattaccgactcattaagagtcgctcagagtcagatcttagtcaacccgaatctgacgaggagggctacgctctttccggtcgccggaacgttgatctggacctggcagcatctcaccgcaagcggggtcctatgcattcacagctggagagcctttctgatagttgggctcggctgaagcacagcagggattggctctgtaactcctcctattcatttgagagcgactttgacctcacaaaatcgcttggggtgcacacccttattgaaaacgtagtatccttcgtttccggggatgtcgggaacgcaccaggatttaaggaaccagaagaatcaatgagcacttcaccgcaagcatcaattattgccatggaacagcaacagctgagggcagagctgcggctagaagccctgcatcagattctggtgttgctcagcggcatggaagagaagggctccataagtttagccggcagcaggctgagctctggttttcagagtagtacacttctcacgtcggttaggttgcagttcctggcaggatgctttggactaggaactgtgggccacactggcgggaaaggagaatcaggtagattacatcattaccaggatggaattagagcggccaagaggaacattcagatcgaaatccaagtagctgtgcacaagatctaccagcagctgtcagccaccctcgagagagcacttcaggccaacaagcatcacattgaagcacaacagaggctcctactcgtgacagtgtttgccttatccgttcactatcagcctgtcgacgtgagtctcgccatttctactggacttttgaacgttctatctcagctttgcggaaccgataccatgctcggccagccgttgcaattgctgcctaaaactggtgtcagccagctgtccacggcgctgaaagtggcttcaacaagactgttacagattctcgcaatcacaaccggaacatatgcagacaagctgtcccctaaggtagtgcagtctctcctggacctcttatgttctcaactgaagaatttgctatcgcaaaccggggtcctgcacatggcctcctttggagagggcgagcaggaggatggagaagaggaggagaagaaggttgactccagcggggagacagagaagaaggacttcagggcagccctcagaaagcagcacgcggctgaactacacctgggcgactttttggtctttcttaggagagtggtctcatcaaaggccattcagtctaaaatggccagtcctaagtggacagaagtgctgcttaacatcgcatcccagaagtgctcatctgggatcccactggttggtaatctcagaacaagattactcgcactgcacgtacttgaggccgtgctccctgcatgcgagtctggggtggaagacgatcagatggcccagatagttgaaaggctgttttcactgttgtccgactgcatgtgggagacacccattgctcaggccaaacatgctattcagatcaaggaaaaagaacaggagattaaactccaaaagcagggcgaactggaagaagaggatgagaatctgcccatccaggaggtgtcttttgatccagagaaggcacagtgctgcctggtggaaaatggacagatcttgacacacggctccgggggcaagggctatggactggcctctaccggagtgacaagcggctgttatcagtggaaattttatattgtgaaagaaaaccgcgggaatgaaggcacctgcgtcggggtatctcgttggccagtccacgattttaaccatcgcaccacctctgatatgtggctgtatagggcttattccgggaatctctatcacaacggagagcagacactgaccctctcttcgttcactcagggagatttcattacatgtgtgctggacatggaagccagaacaatcagttttggcaaaaatggggaagaaccaaaactggcatttgaagatgtggatgcggccgagctctacccttgtgtgatgttttacagctctaatcctggtgagaaagtgaagatatgtgatatgcagatgcgaggcacaccacgagacctgctgcccggagaccccatttgctccccagtcgccgctgtgctggccgaagccaccatccagctgattagaattctccaccgcaccgaccgctggacttactgtattaataaaaagatgatggaaaggttacataaaatcaagatctgcattaaagaatctggacaaaagctgaagaagagtagaagcgtacagtccagagaggagaacgaaatgagggaagagaaagaaagtaaggaggaggagaaaggtaaacatacacggcatggtctcgcggacttgtccgagctgcagctgcgcactctatgcatcgaggtatggccagtgcttgctgtaatcggaggtgtcgacgctggcctgcgcgtcggtggtagatgcgtgcacaaacagacaggacggcacgctaccctcctgggagttgtcaaagaggggtctacaagcgccaaagtccagtgggatgaagcagagatcactattagctttcctacattttggtcaccctccgataccccgttgtataacctggaaccctgcgagccattgccattcgatgttgcacgcttcagaggtttgactgcttccgtcctgcttgacctgacataccttaccggcgtgcacgaggacatgggaaaacaatccaccaagcggcacgagaagaaacatcggcacgaatccgaagaaaagggggacgttgagcagaagccggaatccgagagcgcgcttgacatgcgcactggcctgaccagtgatgacgtcaagtcccaatccaccacatcaagcaaatctgaaaatgaaatcgcaagtttctcactagatccgactctgccaagtgtggaatcccagcaccagattactgaagggaagcgaaagaaccacgagcacatgtctaaaaatcacgacgtggctcaatctgaaatccgcgcagtgcaattaagctatctctatctaggcgcgatgaaaagcctgagcgcactgctgggctgctccaaatacgccgaactcctccttatcccaaaggttctcgctgaaaatgggcacaacagcgactgtgcctcttctccagtggtgcacgaagacgtcgagatgcgtgctgcactgcagtttttaatgcgtcacatggtgaagagagcagtgatgaggtcaccaatcaagagggctctcgggctggcagacttggagagggcccaagccatgatctataagctggtggtccacggtctcctcgaggaccagtttggtgggaaaatcaaacaggaaatcgaccagcaggcggaagaatcagaccccgcccagcaagcccagacacccgttactacttccccatcagcttcttccaccaccagcttcatgtcttccagcctggaggataccaccactgctacgaccccagtaacggatacggagacggtgcccgcgtccgagtcccctggggtgatgccgctctccttactccgccagatgttcagctcctaccccaccaccaccgtcctcccgaccagacgggcccagaccccaccaatcagctcccttccgacatccccctctgatgaggtgggacggcggcaatctcttaccagtcccgatagccagtctgccaggccggcaaacaggaccgccctttctgatccctcttccagactgtctacctccccaccccccccagccatcgcggtgcccctgttagaaatgggttttagtttgagacaaatcgcgaaagccatggaggccactggtgccaggggcgaagcggacgcccaaaacatcacagtcctggccatgtggatgatagaacatccggggcacgaagatgaggaggaaccacagtctggatccacagccgattcacgacctggcgcagcagtgctaggtagtggcggaaagtccaatgatccctgctacctgcaaagccctggcgatatccctagcgcagatgcggctgagatggaagaaggattctcagaaagccccgataacttggaccacaccgaaaacgccgcttccggttcaggcccctctgcacgcggtagaagcgctgtcacacggaggcacaagttcgacttggcggcccgcactctcctggctagggccgccgggttatacaggtctgttcaggctcatcggaaccagtcaaggcgcgaggggatttcattacagcaggacccaggagccctgtatgatttcaacctggatgaagagcttgagattgatcttgatgacgaagccatggaggctatgttcgggcaggacttaactagcgacaatgatattttgggaatgtggattcctgaagtccttgactggcctacctggcacgtctgcgagagtgaggacagggaggaagttgtggtatgcgaactgtgcgaatgtagcgtggtcagctttaaccagcacatgaaacgcaaccatcctggatgtggacgttctgccaatagacagggttaccgcagtaatgggtcatatgtggacggatggtttggcggagaatgtgggtcagggaacccctactacctgctgtgcggcacatgtagggaaaagtacctagccatgaagacgaaatccaagagcacatcctccgagcgttataaaggccaggccccagatctgattggcaaacaggacagcgtttatgaggaggattgggatatgctggatgtcgatgaagacgaaaagttaaccggtgaggaggagttcgagctgctggcagggccactcggcctcaatgacagaagaatagtaccagagccagttcagttcccagactctgatcccttaggcgcgagcgtcgccatggtgaccgcaacaaactctatggaagaaacgctcatgcagatcggctgccatggaagtgtcgagaagagcagcagcggcaggattactctgggagaacaggccgccgccctggctaatcctcacgatcgggtcgtagcactcagaagagtgaccgctgctgcccaagtgctcctagctcgcactatggtcatgcgggccctgtccctgctatctgtgtcagggagctcatgctccttagctgcaggactcgaaagcttaggacttactgatatcaggacccttgtacgactgatgtgccttgccgccgccggccgtgccggcttaagtactagcccaagtgcaatggccagtacctcagaacggtcccggggcggccacagcaaggccaataagccaatctcctgcctggcctacttgagtaccgcggtgggctgtctggcgtctaatgcacctagtgccgcaaagctgcttgtgcagctatgcactcagaatttgattagtgccgccacaggggtgaatctgactactgtggatgattccatccagaggaaattcctcccaagcttccttagaggcattgccgaagagaataagttggtgacttcccccaattttgttgtgacacaggctctggtcgcactgctggccgataaaggcgctaagttgcggcccaactatgataagtctgaggtcgaaaaaaagggcccactagaacttgcaaatgcactcgcagcgtgttgcctgtctagccggctgtcttctcaacatcggcagtgggccgctcagcagttggtgcggaccctcgccgcacacgatcgcgataatcagacgaccctccagaccctagccgacatgggcggtgacctgcgaaagtgctctttcatcaagctggaagcgcaccagaaccgagtgatgacatgtgtgtggtgtaataagaagggtctgctagccaccagcggcaacgacggcacgattcgggtttggaacgttactaaaaagcaatacagcctgcagcagacatgtgtcttcaaccgcctcgaaggcgatgctgaagaatccctggggtcgccctccgacccgtcatttagccctgtttcgtggagcatcagcgggaaatacctggcaggagccttggagaagatggtaaacatttggcaagtgaacggaggcaaaggcttggttgacatccagccccactgggtgtccgcattggcatggcctgaagagggtcctgccacagcgtggtccggtgaaagccccgaactccttctcgtgggccgtatggatgggtccttgggactgattgaagtggtggatgtgagcaccatgcaccgcagagagttggaacactgttatcgaaaggatgtgagtgttacttgcattgcctggttctcagaagatcggcccttcgcggtcggctatttcgacggcaaacttctgttgggcaccaaggaaccacttgaaaaaggcggcatagtactcatcgacgcccacaaggacaccttgatctcgatgaagtgggacccaaccggccacatccttatgacttgcgcaaaggaagactccgtgaaactttggggatccatctccggctgctggtgctgcctgcacagcctgtgtcatccctcgattgtaaatggcatagcctggtgccgactacctggtaagggaagtaaactgcagttactgatggccaccggatgccagtccggcctggtatgtgtttggcgaataccacaggacaccacacagacgaatgtgaccagtgcagagggatggtgggagcaggaaagtaattgtcaagatggctaccggaaatccagtggagcaaaatgtgtgtaccaattacgcggccatattactcccgtaagaactgtggctttttcaagtgacggacttgccctcgtctccggcgggttgggaggtctgatgaacatttggtcgttgagagatggatcggtgttacagaccgtggtgattggcagcggcgctatccaaacaaccgtctggattccagaggtgggagtggcagcatgctctaatcggtccaaggatgtgctggtggttaattgcaccgccgagtgggccgcagcaaatcacgtgctggcgacatgccggaccgccttgaaacaacaaggagtgctgggtctaaatatggcgccttgcatgcgggcttttcttgaacggctgcctatgatgcttcaggagcagtacgcctatgagaagccacatgtggtctgtggcgaccaattggtgcactccccttatatgcagtgtctggctagcctcgccgtaggccttcacctcgaccagctcttatgcaatccacctgtgccacctcaccatcagaattgcctcccagaccctgccagctggaaccccaatgagtgggcatggttggaatgtttttcaacaacaatcaaggccgctgaagcactaactaatggagctcagtttccagagtcatttacagtacccgaccttgagcccgttcctgaagacgaactggtgttccttatggataactccaaatggatcaatgggatggacgaacaaatcatgagctgggcaactagccggccagaggactggcacttgggcggaaagtgcgacgtgtatctctggggtgccggccggcatgggcaattggcagaagccggacgcaatgttatggtccctgcagccgctccatcgtttagccaagcccagcaggtgatctgcgggcagaattgcacgttcgtgatccaggcaaatgggaccgtgttagcttgtggcgaggggtcctatggacgtctcgggcagggtaacagcgacgacctgcacgttctgaccgttatcagcgctttacagggttttgttgtcactcagctggtgacctcttgtggatctgatggacattccatggccttaaccgagagcggtgaagtgttttcttggggcgatggtgactatggcaaacttggccacggaaacagcgaccgacaacgcaggccacggcagatcgaagcgttgcagggcgaagaagtcgtccaaatgagctgtgggttcaaacattcggcggtggtcacgagtgacggtaagctgttcaccttcgggaatggggattacggccggctggggctcgggaatactagcaataagaaactacccgagagggtgaccgcactcgaaggataccagataggccaggtggcctgcggacttaaccatactctggcagtgtcagccgacggtagcatggtgtgggccttcggcgacggcgattacggcaaactcggcttggggaactcgacagccaagagcagtccacagaagattgacgttctctgcggtataggaataaagaaagtagcctgcggcacccaattttccgtcgcactcactaaagacggccatgtctatacattcggtcaggaccgactgattggcctgcctgaaggccgcgccagaaatcacaacagaccacagcaaatcccagtgttggcgggcgtgatcattgaagacgtcgctgttggggcagagcacactttagctctagcctccaatggcgatgtgtatgcctgggggagcaactcagagggacagttggggctcggtcacactaatcatgtgcgcgagcctaccttggtgaccggcttgcaaggcaagaatgtccgacagattagcgccggacggtgtcattcggcggcatggacagcccctccagttccccctcgtgcccctggagtcagtgtgcctttacagctgggcctgccagatacagtgcctccccagtacggcgccctaagagaagtaagcatccatacagtgagggcgcgccttcgactgctgtaccacttctctgatcttatgtattcatcttggagattactcaatctttccccaaacaatcagaacagcacatcgcactataatgccggtacctggggaattgtgcagggacagctcaggcccctgcttgccccccgagtgtacaccttgccaatggtgagatccatagggaagacaatggttcagggcaagaactatggcccacagattactgtgaagagaatcagtacaagagggagaaagtgcaagccaatttttgtccagattgccagacaggtagtcaagcttaacgctagtgacctgagacttccgtccagagcttggaaagtcaagctcgtcggggagggcgctgatgacgcgggaggcgtgtttgacgatactattactgaaatgtgtcaggagctggagacagggattgtggaccttcttatcccctccccgaatgcgacagctgaagtgggttataatagggaccgttttttattcaatccaagcgcatgcctggacgagcatctgatgcagtttaaattcttggggatcttgatgggagtggcgatccgcaccaagaagccactggacctccacctggcccctctggtgtggaagcagctctgctgcgtccctctgacccttgaggaccttgaagaggtggatttactgtacgtgcagacattgaactcaatccttcatatcgaggattctgggattacggaagaaagctttcatgaaatgattccgctggattctttcgtcggccaaagtgcagatgggaagatggtgcccattatccctggtggcaatagtatccccctgaccttctcaaaccgtaaggaatatgttgagcgcgccattgaatataggctgcacgagatggatcggcaagtggctgccgtgcgagaaggaatgagctggattgtgccagtgcccctgctcagcctgcttaccgccaagcagttggagcagatggtctgcgggatgccagagatttccgtggaggtcctgaagaaggtggtcaggtaccgggaggtggatgaacagcatcaactggtgcaatggttctggcatacactagaggagttcagcaatgaggagagggtcctgtttatgaggttcgtaagtgggcgaagcagactgccagcgaacaccgccgatatctcccagagatttcagatcatgaaagtggatcggccttacgattcccttcccactagtcagacctgtttctttcagctgaggctgcctccatactcttcgcaacttgtcatggctgaacgcctcagatacgccatcaacaactgtcgcagtatcgacatggataactacatgctgtctcgcaatgtagacaacgccgagggaagtgacaccgactattag

SEQ ID NO: 25946 - DNA, 3633 bp, synthetic construct
  source 1..3633: mol_type = other DNA; note = Synthetic coding sequence
atggccagccagctgcaggtgttcagcccccccagcgtgagcagcagtgcattttgctccgccaagaaactgaagattgaaccctcaggctgggacgtgtccgggcagtcgtccaacgataaatactatacccactcaaagaccctgcccgctacacagggccaggcaaactccagccatcaggtggcaaacttcaatatcccagcctacgaccaaggactgctgctcccggccccagccgtggagcatatcgtagtgactgctgctgatagcagcggcagcgcggcaaccagcacttttcaatcctctcagacattaacgcatcggtccaacgtttctctcctcgagccatatcagaagtgtggcctgaagcggaagtctgaagaagttgatagcaatggtagtgttcaaattattgaggaacacccccctttgatgctccagaatcggactgtggtgggtgcagccgccactacaaccacagttacaacaaaatcctcctcctcctcaggcgaaggggattaccagctcgttcaacatgagatcctgtgctccatgacgaactcttacgaagtgctcgaatttctaggcaggggcacattcggacaagtagcaaaatgttggaagagatcaacgaaagaaatcgttgcaattaagatcctgaaaaaccatccctcttatgcaagacagggacagattgaagtcagcatcttgtctcgcttatcctccgagaatgccgatgagtacaactttgttaggtcatatgaatgcttccagcacaagaatcatacctgcttagtgtttgagatgctagagcagaatttatatgactttttgaagcaaaataagtttagccctctaccactgaagtacatccgccccatcctgcaacaggtggccacagcactgatgaagttgaagagtctgggacttatccatgctgacttaaaacctgagaacatcatgctggtggatcccgtcagacagccctatcgcgtgaaggttatcgactttggtagcgcgagccacgtgtcaaaagccgtctgttctacctacctacagtcccggtactacagggctccggagatcatcctggggctgccgttctgtgaagcaatcgacatgtggagcctgggttgtgtcatagccgagctctttctgggttggcctctatacccaggagctagtgaatacgaccagatccgctacattagccaaacccagggacttccagctgaatacctcctgtccgccggaaccaaaactaccaggtttttcaacagggatcctaaccttggataccccttgtggcggctgaaaacccccgaggagcacgagctagagactggtataaaaagtaaagaggccagaaagtatattttcaactgccttgacgatatggcacaggttaatatgagtaccgatttggaaggaacagatatgctggctgaaaaggccgatcgtcgcgagtacattgatctgctgaaaaagatgttgacgatagatgccgataaaagaatcactcccctcaaaacgctcaaccaccaattcgtcacgatgacccatcttttggacttcccgcactctaatcatgtgaagagttgcttccaaaatatggagatttgcaagcggcgggtgcacatgtacgacacagtgagccagatcaaaagccctttcactactcatgtagcccccaatactagcacaaacctgacgatgtcattttctaatcagttaaataccgtgcataatcaggcctcagttctggcttcctcaagcacagctgccgccgccacccttagccttgcgaatagtgatgtatcgcttctaaattaccagtccgcgctctatccgtcttctgctgcccccgtcccaggcgtggcccagcaaggggtctccttacagccgggcacaactcagatctgcactcaaactgaccctttccagcagactttcattgtctgcccgcccgcttttcagacaggtctgcaggcaaccacgaagcactcaggctttccagtgcgcatggacaacgctgtcccaatcgtgccacaagcccccgctgcccagccgctccaaatacagagcggagtgttaacacagggtagttgcacaccattaatggtggcaaccctccacccgcaggtggccaccattactccacaatatgctgtgccattcacactgagttgcgcagcaggtcgcccagccttggttgagcagactgcggctgtgctgcaagcgtggccaggcggaacacagcagattttattgcccagcacctggcagcagctgccaggtgttgccctgcataacagtgtgcagccaacagccatgatccctgaggcgatgggctcgggtcagcagctggcagactggcggaatgcgcacagccacggaaatcagtattccaccatcatgcagcagcccagtctgctcaccaaccacgtgactctggctacagcccagcccctgaatgttggcgtcgcacacgtggtgcgtcagcagcagagctccagcttaccttctaaaaagaacaagcagagcgcgcccgtctcctcaaaaagcagtctggacgtgcttccttcccaggtctactcactcgtcggttcctctccactgaggaccaccagcagttacaattctcttgtacctgtacaagaccagcaccagcccatcattattcctgacactccttcaccgcccgtgagtgtgatcacaatcagatccgataccgatgaggaggaggacaacaagtataaacctagctcatcggggttgaagcccaggagcaacgtcatcagttacgtgactgtgaatgactcgcccgatagcgacagctccctgtcaagtccatattctacagatactctgagcgcgttacgcggcaatagtgggtccgtgctggagggccctgggcgtgtggttgccgacgggactggcacccggactattattgtgccccctctgaaaactcagctgggggactgtacagtggcaacacaggcttctggattactgtcaaataagaccaaacctgttgcctccgtgtccggtcagagttccggctgttgtatcacaccaaccggttatagagcacaacgtgggggcacatctgctgcccaaccactgaacctgtcacaaaatcagcaatcttccgccgctccaacgagtcaggagagaagtagcaaccctgctccccggcggcagcaagccttcgtggcccccctgagccaggcaccctatacctttcagcacggttctccacttcattccacggggcacccccacttagctcctgcccccgctcacttgccaagtcaggctcacctgtatacatatgctgcaccaacctccgccgcagccctggggtcgacctcttcaattgctcatctgtttagcccacagggctcaagtcgccatgctgccgcatacacaacacacccctccactctcgtgcaccaagtaccggttagcgtgggaccctccttactcacttcagccagtgtcgcgcctgcccagtatcagcatcaatttgccacgcagtcctacatcggatccagtagggggtccacgatttacactgggtaccccctgtcgccaacgaagatctcccagtattcatacctgtag

SEQ ID NO: 25947 - DNA, 579 bp, synthetic construct
  source 1..579: mol_type = other DNA; note = Synthetic coding sequence
atgggcaagggctgcaaggtggtggtgtgcggcctgctgagcgtgggaaaaactgccatcctggagcagctgctctacggaaaccatacaatcggcatggaggattgcgagacgatggaagacgtatacatggcttccgtcgaaaccgaccgcggagttaaggagcaactccatctgtacgatactagagggttgcaggaaggagtagagctcccaaagcattacttttcctttgccgatggattcgttctggtttactcggtgaataatttagagagttttcagagagtagagctcctgaaaaaggaaattgacaaatttaaggataagaaagaagtggctatcgtcgttctcgggaataagattgacctcagcgagcagcggcaggtggacgcggaagtggcgcagcagtgggccaagtcagagaaagtgagactgtgggaggtcactgttacagacagaaagactctcatagagccgtttacactgctcgccagcaaactgagccagcctcagagtaaatcatccttcccactgccaggacggaaaaataagggaaactcgaattccgagaactag

SEQ ID NO: 25948 - DNA, 1803 bp, synthetic construct
  source 1..1803: mol_type = other DNA; note = Synthetic coding sequence
atggccagcaaccacaagagcagcgccgcccggcccgtgagccgggggggcgtcggcctgacagggagacccccaagtggtatccggccgttgtccggcaatatacgagtagcaaccgctatgcccccaggaaccgccaggcctgggagcagaggctgcccaatcggtacgggcggggtcctgagctcccaaattaaagtagcccatcggcctgtgacacagcagggactgaccgggatgaagacagggaccaagggacctcagaggcagatcttggacaaaagttactatctcggactgttaaggagcaaaatctcagagctaacgactgaggtcaacaagctgcagaaagggatcgagatgtataaccaggagaatagcgtgtacctgagctatgaaaaacgcgcagagaccctggcagttgagattaaggagctccaggggcaactagctgactacaacatgttggtggacaaactgaatacaaacactgaaatggaagaggtcatgaacgattacaatatgctgaaagcccaaaacgacagagaaacacagtctctggacgtgatctttaccgaacggcaagcaaaggaaaagcagatccgcagcgtggaggaagaaatcgagcaggaaaagcaggccactgacgatattatcaagaacatgagcttcgaaaatcaagtcaagtatcttgaaatgaagacgacgaacgagaaactactgcaggaattggacacactgcagcaacagctggactcacagaacatgaagaaagagtctttggaagccgaaatcgcccatagccaggtgaagcaggaggcagtgctgttacacgaaaagctctacgaactcgagtcacacagagaccagatgatagctgaggacaaatccattggcagccccatggaggagcgggagaagctgctgaaacagatcaaggacgacaaccaggaaatcgccagcatggaaagacagctgaccgacaccaaagaaaagattaatcagttcattgaggaaatccgacagttggacatggatctggaggaacatcaaggagagatgaaccagaaatacaaggagcttaagaagcgagaggagcacatggatacgttcattgaaacattcgaggagacaaagaaccaggaactgaagcgtaaggcacagattgaggcgaatatcgtggctctgctagaacattgctcccgtaatattaatcggatcgaacaaataagctccattacaaaccaggagttaaaaatgatgcaagatgatctgaattttaaatccactgaggtccagaaatcacagagcactgcccagaatttaacaagtgacatccagcgtctgcagctggatcttcaaaagatggagctgttggagtcaaaaatgacagaggagcagcacagtctgaaatctaagattaaacaaatgacaactgacttagagatttacaatgatctgcctgctctcaagagtagtggggaagaaaagatcaagaagttacaccaggagcgcatgattctatctacccacaggaacgctttcaaaaaaatcatggaaaaacagaacatcgagtacgaggctctgaagacacagctgcaggagaacgagacgcacagccaattgaccaatctggaaaggaagtggcagcacctggagcagaataattttgcgatgaaagaattcattgctactaaaagccaggagtccgactaccagcctatcaagaaaaacgtaaccaaacagatcgctgagtacaacaagactatagtcgacgctttacactccacaagcggcaactag

SEQ ID NO: 25949 - DNA, 1197 bp, synthetic construct
  source 1..1197: mol_type = other DNA; note = Synthetic coding sequence
atgctgcggcggaagcccagcaacgccagcgagaaggagttcaacctggacgacaacattcctgaggacgacagcggggtccccacaccagaggatgctgggaaaagcggaaagaagctgggcaagaagtggcgtgccgttatctcacggacgatgaatcggaaaatgggtaaaatgatggtgaaagccctgtccgaggagatggctgataccctggaggaggggagtgcgtcaccaacctcaccggattactccctcgactctccaggcccagaaaagatggcattggctttttcagagcaggaggagcatgaactgcctgttctcagccgccaagcttcaacaggcagcgaattatgctctccctcaccgggctccggtagctttggagaagagcctccagccccacagtacacgggcccgttctgtggaagggcccgagtccacaccgacttcactccatctccatatgaccatgacagcctgaaactgcaggttcggagcgcgtctggcctcttatggagcctggctggctgtgcccagaaaggaagttggacagaacccggttacgactctgtgtctggaggccagggtccaccctacccactgagcctagcaccgtttagcagccctctcccacagcaaaaaggtgatgtgatccagatcattgaaaaacctccggtcggcacctggctgggcctgctgaacggaaaggttggatcttttaaatttatctatgtggacgtgctgcctgaggaggccgtaggccacgccagaccgtcgcggagacagtccaagggcaaacggcctaagcctaagactctccacgagctgctggagagaattggcctggaggagcatactagcactctgcttctaaacgggtaccaaaccttggaggacttcaaggagctgcgggagacgcatcttaacgagctgaacattatggatccgcagcatcgtgccaagctgctgaccgccgcagagttgctgttggattacgatacagggtccgaagaggccgaagaaggtgcagagagtagccaggaacctgttgcccacacagtaagtgagcccaaggtggatatccccagagactcagggtgctttgaggggtccgaatcaggcagagatgacgcagaactcgccggcaccgaggaacagctgcaaggcctctcactagcaggggccccgtag

SEQ ID NO: 25950 - DNA, 1002 bp, synthetic construct
  source 1..1002: mol_type = other DNA; note = Synthetic coding sequence
atgggcacccggaagaaggtgcacgccttcgtgcgggtgaagcccactgatgatttcgcacacgaaatgattaggtatggggacgacaagcggagtatcgatatccacctaaagaaggatatccgtagaggagtcgtcaacaatcagcagacggactggtcctttaaactggacggagtccttcacgacgcctcacaggacttagtgtacgaaactgtggctaaggacgtagtgtcccaggcactcgatggatataacggaacgatcatgtgctatggtcagaccggggccggaaagacctacactatgatgggggccacagagaattacaaacatcggggaatcttacctagggcgctgcagcaggtctttagaatgattgaggaaaggcccacccacgccatcactgtgcgagtcagctatcttgaaatatacaacgagtcacttttcgacctgcttagcaccctcccatacgtcggcccgtccgtaacacctatgacaatagtagaaaaccctcagggggtcttcataaaggggctgtctgtgcatctcacaagtcaagaggaggatgctttcagtctgctattcgagggcgaaaccaacaggattattgcgtctcataccatgaacaagaatagtagcagaagccattgtatcttcaccatatacttagaagcccacagtaggacactcagcgaggaaaaatacataacatctaaaattaaccttgttgatctcgctgggtccgagcggcttggcaagtcaggctccgagggacaagtcctgaaggaggccacgtatataaacaagtctctctccttcctggaacaagccatcatcgccttaggcgatcagaagcgagatcacattcctttccgacaatgcaagttgacacacgcccttaaggacagtctgggtggaaactgtaatatggtactggtcaccaacatttatggggaggctgcccaactcgaagagactgggtcacgcctctggctttag

SEQ ID NO: 25951 - DNA, 1248 bp, synthetic construct
  source 1..1248: mol_type = other DNA; note = Synthetic coding sequence
atgatgctgggccccgagggcggcgagggcttcgtggtgaagctgcggggactgccctggagttgtagcgtggaagacgtgcagaattttctgagcgattgtaccatacacgacggagctgctggagtgcattttatttacacgagggaagggagacagtccggagaagctttcgtcgagctcggctctgaagatgatgtgaaaatggccctaaaaaaagacagagagtctatgggacatcggtatattgaggtgttcaagtctcaccgaacagaaatggattgggtgctaaagcacagcggtcctaattccgccgactcagctaatgacggcttcgtaaggctaagaggtctgcccttcgggtgtacaaaagaggagatagttcagtttttttccggcctcgagattgtgcccaatgggataaccttacccgtcgaccctgagggcaaaatcaccggggaagcttttgtgcagttcgcatcacaggagttggccgagaaagctctgggaaaacacaaggaaagaattgggcatcgctacatcgaagttttcaagtcgtctcaggaggaggtgcggtcatatagcgaccccccgctgaaatttatgtctgtgcagcgcccgggcccgtacgatcgccccggaacggctagacggtatatcggcatcgtgaagcaggctggcctagagcggatgagacctggcgcctactcaactggatacggggggtatgaagaatactccggcctgtccgacgggtatggcttcactactgacctgttcggaagggatctgtcatattgtctgagtggtatgtacgaccacaggtatggcgactcagagtttactgtgcagtcaacaactggacactgcgttcacatgcgagggctgccctataaggccaccgaaaacgacatttacaacttcttttccccactcaaccccgtccgcgtgcacattgagattggccccgacggtagagttaccggggaggctgatgtggagttcgctacccatgaggaggcagtggctgccatgtctaaagatcgtgctaacatgcaacaccggtacattgagttgtttctgaattccacaaccggcgccagcaacggagcctactcttctcaggtcatgcaagggatgggcgtctccgctgctcaggctacttatagcggcctggaatcccaatcggtttcagggtgttatggagcgggctatagcggccagaattcgatggggggatatgattag

SEQ ID NO: 25952 - DNA, 3108 bp, synthetic construct
  source 1..3108: mol_type = other DNA; note = Synthetic coding sequence
atgagcgagcaggagcggatccaggagtgcctgcggaaggagatccgttccctgctaatttccacgaaggacgggttgagcccccaggagcttgaaaaagagtaccttctaatggtgggtaaccatctacctctacggattcttgggtacagatccaccatggaactggtattagatatgccggatgttgtgcgcgtgtgtccgggggcaggtgggaccgtgatccttaaggccattccagatgaatccactaagggcatcgcatctttggtggcaaagcagagatcctctcacaagctgagaaattccatgcacaaaggccggcctagcatatatagcggaccacggtcacacagacgggttccctacagaggaagagttgccccaatcctgccggccgtggtaaaaagtgagttgaaggatctgttagctctaagccccgtgctcctgagtgattttgaaaaggccttcgcaaagcgatttgggcgatccttccagtatatgcagtacgggttcctgagcatgttcgaagtgctgaacgctgcctctgacgttatcagcgtcgaacagacgcgcgccggttctctactgatgctgaagaagtccgttaccgaagagaagcctcgcgggtgccctgctgggaagatatttacgcaacccttcagaatgaaacaaggatcttacagcacaggcttcccagttgctaagccttgcttctcccagcctacttcgaacatggagcctcctaaacagattatgtcaatggagaagaccagcaaactcaacgtcgtggaaactagtagacttaaccataccgaaaagctgaaccaactagagaacactttcaagtctgtgatcgcccagatcggtccaggcggcaccattagttccgagctgaagcacaaaattaaatttgtagtctcgaaattcccagagggcctttttatcagtaaacttctcggcgaatatgaggtaatcttcaaggagcagctaagccccaaaaaactgggcttccttaatgtgacagaactggtgggcgccctaagcgacatcttgcatgtcgaatttagaaaaggccaccaggatctgcttgtgttcgatgccgataaaaaaccacttccccctgtgcagtccgacaagaagatcgaagcaaaggcctgcgtaagctcccccccacggaattctctgagtacagccgccgtgaaggagaccgtttggaattgtcctagcaaaaagcagaaggagccccagcagaagatttgcaaaaaacccaatttggtagtcaaacccttacaactccaggtcgaaacaaataaaagtgaactaaacctggccatggctaatcacgacataccccccgacgcagtgcctaataagaagctttgccgactgccgccattggacacctcatccctgattggagtatttgttgagtatattataagtccatctcagttctacatacgaatctactcaagggactccagcgagctgttagaggacatgatgattgaaatgcgccgatgctatagcaaccagctggtgtccgaccggtacgtcatgccagaatgcttcatccaacctggacacctgtgttgcgtgcgcatttcagaagacaagtggtggtatcgggtcattatacaccgcgttttggagaagcaagaggtcgaggtcttctatcctgactttggaaacatcgggatcgtgcagaagagctcacttcgctttttaaaatgctgctacaccaaacttcccgctcaggcaattccgtgcagcttggcatgggtccgccccgtggaagaacattggactagtaaagccattctgcagttccagaagctgtgtggccttaaaccattggtcggcgtagtcgacgagtacgtggatggtattcttaatatctttctctgtgacacctcctcgaacgaagatgtatattttcaccacgtgctgcgaaccgaaggacacgctattgtgtgtcgagagaatattagctccaaaggtttcagcgagctgaacccgcttgccttatacactacctcctcgggcggacccgaggacatagtgctcacggaactgggttacccatctcagcaacactatttcaatgaggatagaaaaatcagtcctcagagcaaggagagcgagctgaggattctgcaggatattaacgacgaaaaatccttatcccatctaaagtcagaatccaaagagcctttaaaggactctgagtttgagtccctcaagacctgcaataagagcttcgaggaggatcctaaatggtccaaccctgagcccaacgatctgaaggaggaaaacgaagacgaaatcccaaccgggatgccttgcctggagtccgttacgattggcgatgatatttgggatgagaattggctgccgttgcaggccaagatgggcaaaggaggcgatgctgcctctcacctgtttactgccagtctcgggggcaagaaccagtactctagctgcaaagagatgccacagaaggactggtgcttctccacccccaaagacacatgggacgatagctggcagcccagcggcttggtgaacggaaccaaagttgaagtacacaagcccgaagtgctgggcgcccaggagaaaaatactggaaccaaccgcacgcagaagcagctcgatattaacggatcatcagactccagtacactgccgaagctcgaggagttttgcacttcactcactcagtcagagcaatccgccgacggcagccagagcgagcctaacaacagccaaacacagcccaagcagatccagctatccactgctgctccttgctccaccacagcggtcgatgacagcgccgagaagccatccgggtcagtggagagctcacctgaaattcttaaaaatgaagacttctcatccagccgagccatcaccctctataaggataaacgccaggagtccgtggaccaacttagtctgattttatcttacgaatgccaaatttctcagaagctctacatccccagatcaacagctactgcggccctcggcgcggctgcccgtctagccaccagtagatccttactgcactggtacccgtctgttaagagaatggaagcctag

SEQ ID NO: 25953 - DNA, 660 bp, synthetic construct
  source 1..660: mol_type = other DNA; note = Synthetic coding sequence
atgggcggcgcccagctggagctgcccagcggcgcccggcccggcgtctgcgtccggaggtcattccgcgcccatgccggagatcagccacggagacctccagggcctattccggtgccgggaacaatgaaacaggaatctgcggcgcccaacactccgcctaccagtcaaagtcctaccccctcagctcagttcccccgtaatgatggcgatcctcaagccctttggatattcgggtatggctccctggtgtggcggccggacttcgcctattccgacagtagggtgggctttgttcgaggctactctagaagattctggcagggcgatactttccacaggggctcagacaaaatgcctggacgagtcgtaacacttctcgaggatcatgaaggatgcacgtggggcgtagcctaccaggtccagggtgagcaaaatccaggctatcttggaccggctcccgaagaggccatcgcaacacagatactagcgtgtagggggttttctggacataatctcgagtatctgctcagacttgccgactttatgcagctgtgtgggccccaagcacaagatgaacacctggccgcaattgtggatgctgtgggcaccatgttgccttgtttttgccctactgaacaggctcttgccctggtctag

SEQ ID NO: 25954 - DNA, 2382 bp, synthetic construct
  source 1..2382: mol_type = other DNA; note = Synthetic coding sequence
atgagcgagcagggcgacctgaaccaggccatcgccgaggagggcggtacagaacaagagactgccacccccgaaaatggtattgtgaaaagcgaatctctggatgaggaagagaagctggagttgcagcggcgcttggaggctcaaaaccaggaaaggcgaaagtccaaaagcggagctggcaaagggaaactgacacgctcactggcagtctgtgaagagagcagcgcgaggcccggcggagagtccctgcaggatcaggagtccatccatctgcaactcagttccttcagctccttacaggaggaagataaaagccggaaggatgactcagagagggaaaaggaaaaagataagaataaggacaaaaccagtgaaaagcccaagattcggatgctgtcaaaggactgctctcaggaatacaccgattcaaccggcatcgacctgcacgagtttcttatcaacactctgaaaaataattctcgggataggatgattctactgaagatggaacaggagattattgatttcatcgcggataacaataatcactataagaagttcccccagatgtcctcttatcagcggatgcttgttcacagagtggccgcctattttggtttggatcacaatgtcgatcagactgggaaaagcgtgataatcaacaagacttcttcaactaggatccctgagcagaggttctgcgagcacctaaaggacgaaaagggagaggaatctcaaaaacgcttcatcctaaagcgagataacagcagcatagacaaggaagataaccagtccgtgtgttcacaagaaagtctgttcgttgagaacagaggcaatcgagacggtagcggacgcacttcagggagccgacagtcttcatcagagaatgagcttaaatggtccgaccaccaacgtgcatggagctccactgactcggactcatcaaatagaaacttgaagccagctatgactaaaacggctagtttcgggggaatcacagtcttgactcggggcgacagcacaagtagtacgcggagcacaggcaagctaagcaaggccggcagcgagtcctccagttcggcaggatcatcagggtctctttccaggacacacccacctcttcaatccacccccttggtgtctggtgtggccgcggggtctcccggttgcgtaccataccctgagaacgggattggcggccaggtggccccatctagtacgtcctacatccttctccctttggaggctgctactggaatcccccctggatccatactgttaaacccccatacgggccagccctttgtgaatccagacggaactcccgccatatacaatcccccaacctcgcagcagccactgagatccgccatggtggggcaaagtcagcagcaaccccctcaacagcagcctagcccacaaccccagcaacaggtgcagcccccacagcctcagatggcaggccccttggtcacccaaagcgtgcaaggcctgcaagcatcatctcagtcagtccaatacccagccgtgtcattcccccctcagcatctactccccgtgagccctactcagcacttccccatgcgggatgacgtggctacccaattcggccagatgacactgtctcgccagagctccggcgagacccctgagccgccctcaggaccagtgtatccaagtagcctgatgcctcagcctgcacaacagccttcttacgtcatcgctagcactggccaacagcttccaaccggcggattttcaggtagcggccctcctatcagccagcaggttttacagcccccaccgagtcctcagggtttcgttcagcaacctcctccagcccaaatgcccgtctactattacccctctggacaataccctacttctacaacccagcagtaccggcccatggcccccgtgcaatacaacgctcagcgttcgcagcagatgccccaagcggcacagcaggctgggtatcagcccgtgctgtctggccaacaggggtttcagggactgatcggcgtgcaacagccaccacaaagccagaacgtgattaataatcagcagggcaccccagtacagtcggtgatggtgagttatcctaccatgagctcctaccaggttcctatgacacaagggtcacagggcctacctcaacagtcatatcagcagccaatcatgcttccaaaccaagctggacaggggtctcttcctgctacgggtatgccagtgtactgtaatgtcacacccccaactccacaaaataatctcaggctgattggcccacattgtcctagtagtaccgtcccagtcatgtcagcttcctgtcgcactaattgcgcttctatgagcaatgcgggatggcaagttaagttctag

SEQ ID NO: 25955 - DNA, 1842 bp, synthetic construct
  source 1..1842: mol_type = other DNA; note = Synthetic coding sequence
atggccaccatccccgactggaagctgcagctgctggcccggcggcgtcaagaggaggcttccgtgcgcggacgggaaaaggctgagcgcgagagactgtcccagatgcctgcatggaaaaggggcttactggagcgacgccgagccaagttgggactctctcccggagaaccatcccctgtcctaggcaccgttgaggctggccctcctgaccctgacgagagcgcagtactgctcgaagccatcgggcccgtgcatcagaatcgatttatcaggcaggaacgacagcagcagcagcagcaacagcagcggtcagaggagttattggctgagcgcaagcctggtcccctcgaagcccgtgagagaagaccttcacctggcgagatgcgggaccaatctccaaagggccgcgaatcacgcgaggaacgactatctcctcgggagacaagagaaaggcgtctgggaattgggggcgctcaggagctgtcactcagaccactggaggctcgggattggcggcaaagccctggcgaagtgggggacaggagctcccgtctgagtgaggcctggaaatggaggctgtctcctggagagaccccggaacgctcactgcggctcgcagagtctagggagcagagtcctagacggaaagaggtcgagagtcggttgtcacctggtgagagcgcttatcagaaactggggttaactgaagcccacaagtggcgaccagactcccgggagagccaggaacaatctctggtgcagctcgaggctacggagtggaggctccgctctggtgaagagagacaggattacagcgaagagtgtggacggaaggaagagtggcccgttccaggggtggctcctaaggagactgccgaactgtcagaaacccttactagggaagcccaagggaactcatctgcaggggtcgaggcagcagaacagagacccgtagaggacggggaaagaggcatgaagcccacagagggatggaagtggacccttaactccggtaaagcccgcgaatggactccacgtgacatcgaggcacaaactcagaagccagaacctccagaatctgctgagaagttactggagtcccccggtgtggaggccggagagggtgaggctgagaaggaggaagcaggtgcacagggtcgtcccctaagagcattgcaaaactgctgcagtgtcccctctcccttgccacctgaggatgctggcacaggtggactgaggcagcaggaggaggaagctgtagaactccagcccccgccaccagctcctctgtctcctcccccacccgccccaacagctccgcaaccacccggagacccgctgatgagccgtctgttctatggagtcaaggcaggacctggcgtcggcgcgcctcggagatccggtcacacattcacagtgaaccctaggcggtctgttccaccagcgactcctgcaacacctacttcacccgcaacagtggatgctgccgtgccaggcgctgggaagaaaagataccctactgcagaggagattctcgtactcgggggttatctgaggttgtctcggagttgcctcgccaaagggagtccagagagacatcataaacaattgaagatcagctttagcgaaaccgctcttgaaacaacctaccagtatcccagtgagagctcagtgctcgaagagctcggacctgaaccagaagtaccaagcgcccctaacccacctgcggcacagccagatgacgaagaggatgaggaagaattactgctgttacaaccagagctccagggtgggttgcgcacgaaagccctcatcgttgatgagagctgcagacgctag

SEQ ID NO: 25956 - DNA, 582 bp, synthetic construct
  source 1..582: mol_type = other DNA; note = Synthetic coding sequence
atggcccgggccggcccccggctggtgctgagcgaggaggccgtgcgggccaaatccgggttgggcccacatcgcgacctcgctgaactgcagagtttgagcattccaggtacgtaccaggaaaagattactcatctgggccacagtctcatgagcctgaccggactcaaatcattggatctgagccgcaacagcctggtatctttggaagggattcaatacctcacggctctggagtccctgaatctctattacaattgtatatccagtcttgccgaggttttccgcctgcacgcactgacagaactcgttgatgtagatttcaggttgaaccccgtggtgaaggtggaacctgactacagactgtttgtggtgcaccttctccccaaactgcagcagctggatgaccgccctgtcagggcgagcgagcgaaaagcttcacggctacactttgcatcggaagactctctggatagcaaggaaagtgtccctgcgtctctgaaagaagggcgcatccagaccagtgtggagcctgctgttggtactgtgccagtgtggggtctttgggaggccggcccttag

SEQ ID NO: 25957 - DNA, 177 bp, synthetic construct
  source 1..177: mol_type = other DNA; note = Synthetic coding sequence
atgtacttcaactacaagagcgtgtgcggcagctgcggcttcggctcttgctatggctgtggatacgggtgtatccattcaacccattgcggatgtaatggctactacgggtgctacgagaataagtactcagtcattgacgacctcattttcttcgccagcaagaagtgccattag

SEQ ID NO: 25958 - DNA, 585 bp, synthetic construct
  source 1..585: mol_type = other DNA; note = Synthetic coding sequence
atgaacggccgggccgacttccgggagcccaacgccgaggtgccccggcccataccccatatcggcccggattacattcccacggaggaagagagacgagtcttcgcagagtgtaacgacgagtctttctggttccggtcagtacctctggccgctactagcatgctgatcactcaaggcctaatctctaaaggaatcctatcgtctcaccctaaatatggtagtatacccaaactcattctggcttgtattatgggatacttcgccggtaagctgtcttatgtgaagacgtgtcaggagaagttcaaaaaactcgagaattcaccgctgggcgaagctttgaggagcgggcaggcacggcggtcttctcctccgggccactactaccagaagagtaagtacgattcatcagtcagcggtcagagcagttttgtcacaagtcctgccgctgataacatcgagatgctcccacattacgagccaattcctttctcctcgagcatgaacgaatctgcaccaacaggcatcaccgaccatattgttcaggtcaaggtaaataagtacggcgacacttgggacgagtag

SEQ ID NO: 25959 - DNA, 2421 bp, synthetic construct
  source 1..2421: mol_type = other DNA; note = Synthetic coding sequence
atgagcagcagccccgtgaacgtgaagaagctgaaggtgagcgagctgaaagaggaattgaagaaaagacggcttagcgacaagggactgaaggccgagctcatggagcgtctgcaggcagcactcgatgacgaggaggccgggggacgacccgctatggaacccgggaatggctcattggatcttgggggagactcggccgggagatcgggtgctggactcgagcaagaggccgctgctgggggcgatgaggaggaggaggaagaggaagaggaggaagaaggcatctccgccctggacggcgatcagatggagttaggcgaggagaacggcgccgcaggagccgctgactcaggccccatggaggaagaggaggcagcatctgaggacgaaaacggagatgatcagggattccaggagggcgaagacgagttgggcgatgaagaagagggtgccggagacgaaaacggccacggagaacagcagcctcaaccacccgcaacccagcaacagcagccccagcaacaaagaggagcagcgaaggaagcagctggtaagagttccggtccaacttcgctctttgcagtgaccgttgccccccctggggctcgccaaggccaacagcaagctggcggtgatggaaagacagaacagaagggcggtgataagaagagaggagtgaaaagaccacgggaggatcatggacgaggatactttgaatacatcgaagaaaacaaatattcacgcgctaagtccccccagccgcctgtcgaagaggaagatgaacatttcgatgacactgtcgtatgcctggacacctataattgcgatctccactttaagatatcacgtgatcggctgagcgccagctcattgacgatggaaagtttcgcttttctctgggccgggggcagggccagttacggagtctctaaaggtaaagtgtgctttgaaatgaaggtcaccgagaaaattcccgtgagacatttgtacacaaaagacatcgacattcatgaggtgaggattggttggtccctcacaaccagcggcatgctgctgggcgaagaggagttcagctatggctactccctgaagggcattaagacctgcaactgcgaaaccgaagattacggcgagaagttcgatgagaacgacgtgatcacatgctttgccaattttgagtctgatgaggttgaactatcctacgcgaaaaatgggcaggacctaggtgtcgcctttaaaataagcaaggaagtcctggctggtcgacccctgttccctcatgtgctgtgtcacaactgtgccgttgagtttaactttggccagaaggaaaaaccatacttccccatccctgaagaatatactttcatccaaaatgtcccactagaagaccgcgtcagaggacctaaagggccggaggagaaaaaggactgcgaagtcgtgatgatgattggactgccaggagctggaaagacgacctgggtcacaaaacacgccgccgaaaaccccggcaaatacaatattctgggcaccaacacgatcatggacaagatgatggttgccggctttaaaaagcagatggctgacaccgggaagctcaatacactgctgcaaagggcgcctcagtgcctgggcaagtttattgagatcgcagctagaaagaagcggaacttcatcctggaccagaccaacgtgtcggccgcggctcagaggcgcaagatgtgtttgtttgctggctttcaacgaaaggctgtcgtggtgtgccccaaagacgaggattacaaacagcgcacccagaagaaggcagaagtcgaaggtaaagatctgcctgagcacgctgtgctgaagatgaaaggtaacttcacactgcccgaggtcgctgagtgcttcgatgaaattacttacgtggagctccaaaaggaggaagcccagaagctgttagagcagtataaagaagaatctaagaaagccctgcctcctgagaagaagcaaaataccggttcaaagaagagcaacaagaataaatctggcaagaaccagttcaaccgaggcgggggccatagagggagaggcgggtttaacatgcgcggcggtaacttccgagggggagcaccaggcaacagaggcggctataatcgcagagggaacatgccacagaggggtgggggcggtggggggagtggagggatagggtatccctaccctcgggctccggtctttcccggacgcggctcatatagtaaccgagggaactataatcgtgggggaatgcctaatcgcggaaattataaccagaacttcaggggaagagggaacaaccggggttataagaaccaatcacagggctataatcagtggcagcagggccagttctggggtcagaagccttggagccaacactaccatcagggatattactag

SEQ ID NO: 25960 - DNA, 651 bp, synthetic construct
  source 1..651: mol_type = other DNA; note = Synthetic coding sequence
atgagcaccgtggacctggcccgggtgggcgcctgcatcctgaagcacgctgtgacaggcgaggctgtagaactgagaagcttgtggcgggagcatgcctgcgtggtggctggacttcggagattcggatgtgtggtgtgtaggtggattgcccaagacctcagttctctggctggtttgctggaccaacatggcgtgagacttgttggcgtgggccctgaggctctgggccttcaagagttcctagatggcgattacttcgccggagaactatacctggacgagtcaaagcaactttacaaggaacttggcttcaagcgcctctggacccaggcttcccctgagtttggacaagctacctggtgtctgcggagatacaacagccttagcatactccctgccgccctcggtaagcccgttcgcgatgtcgcagcaaaggctaaggccgtgggcatacaggggaacttgtctggtgatctgctgcaatctggaggcctgctcgtggtcagtaagggaggcgataaagtgctcctgcacttcgttcagaaaagtcctggtgattacgttccaaaagagcacattctccaagtactcggaatatctgccgaggtgtgtgcctcggaccctccccagtgtgatcgtgaggtatag

SEQ ID NO: 25961 - DNA, 1191 bp, synthetic construct
  source 1..1191: mol_type = other DNA; note = Synthetic coding sequence
atgttctggaagttcgacctgcacaccagcagccacctggacaccctcctggagcgggaggacctgtcattgcctgagctactcgatgaggaggatgtcctgcaagagtgcaaggtggtcaacaggaaactgctcgactttcttttgcaaccaccacacttacaagccatggtggcctgggtgacccaagaaccccctgactccggcgaagagcggctccggtacaaatacccctccgtcgcatgtgaaatccttacgagcgacgtcccgcagattaatgatgccctgggggcagacgaaagcctcttgaatcgtctttatgggtttctgcagagtactggctctctgaaccctctgcttgctagttttttctccaaggttatggggatccttatcaacaggaagaccgatcaactggtatcgttccttcggaagaaggatgactttgtcgatctgctgctgcaacacatagggacttctgcaattatggacctgcttctgagattactgacctgcgtagagagaccccagctgcgtcaggacgtggtgaattggctcaacgaagaaaaaattgtacagcggctaatcgagcagatacaccctagcaaagatgagaatcaacacagcaacgcttctcaaagtctgtgcgatattatcagactttcccgcgaacagatgatccaggtacaggactccccagtgcccacagacgcacccacatccccaagagtgagcggtgaggaagagctgcacacagggcccccggcgccccagggcccactcagtgttccccagggccttcccactcagtcccttgcatccccacccgccagagatgccctgcaacttcgaagccaggacccgacacccccgagtgcgccccaggaggcgaccgaggggagtaaggtgaccgaaccttcagcaccctgccaggcacttgtgagcatcggagacctccaggcaaccttccatggcattcgctctgctcccagttcctccgatagcgcaacacgagacccttctacaagtgtcccggcatcaggtgcacaccagccgcctcagaccacagagggagagaagagccctgaacccctgggtctgcctcaatctcagtccgctcaggccctgacccccccccctattcctaatggcagtgctccagagggtcctgcctcacccggtagtcagtag

SEQ ID NO: 25962 - DNA, 2178 bp, synthetic construct
  source 1..2178: mol_type = other DNA; note = Synthetic coding sequence
atgggcacccggaagaaggtgcacgccttcgtgcgggtgaagcccactgacgactttgcccacgaaatgattaggtacggggacgacaagcggagtatcgatatacacctaaagaaagatattagacggggggttgtgaataatcagcagacggattggagcttcaaactggatggggtcctgcatgacgcaagccaagatctggtatacgaaactgtggcaaaggacgtggtttctcaggctttggatggatataacggaaccatcatgtgctacggccagacaggcgccgggaaaacctatacgatgatgggcgcaacagagaactataaacatagaggaatcctcccgagggcccttcagcaggtcttccggatgatcgaggagcgaccaactcatgccattaccgtgagggtgagctatttagagatatataatgaaagccttttcgacctgctttccaccctgccctatgtcggtccatcagtgacccctatgactatagtcgaaaatccacagggtgtgtttatcaagggattatccgtgcacttgactagtcaggaagaggacgccttttctctgctttttgaaggcgagaccaaccgtattatcgcaagccataccatgaataagaattcctctcgctctcactgtatctttacgatctacctcgaagcccactcaaggacactgagcgaggaaaagtatattacctccaagatcaatctcgtcgatctggccggatctgagcggctgggcaagagcggctctgaagggcaagtacttaaggaggccacttacataaacaaaagcctctccttcctggaacaagcgatcatcgccctgggcgaccagaagagggaccacatcccatttcggcagtgcaaactcactcatgccctgaaggactctctcggaggcaactgcaacatggtcctggttaccaatatttatggagaggccgctcagctcgaagagaccctctcctccctgcggttcgcgtctcgcatgaagctggtgaccacggaaccggctatcaacgaaaagtacgacgccgaacggatggtgaaaaatctggaaaaagagctagccttacttaaacaggagctggccatccacgattcactgacgaacaggacatttgtaacatatgacccaatggacgagattcaaatcgccgaaattaattctcaggtcagaaggtacctcgaaggtaccttggatgagattgatattatcagcttgcgacaaatcaaagaagtgttcaaccaattccgggtggtgcttagtcaacaagagcaggaggtcgaaagcactctgcggcgaaagtatacattgatagatagaaatgacttcgctgcgatctccgccatccagaaagctggcctcgtcgacgtcgatggccaccttgttggggagccagagggacagaattttgggttaggcgtggcccctttcagtaccaagccagggaaaaaagctaaatccaaaaaaactttcaaggagcccttgaggcccgatacgccaccatctaaaccagtcgccttcgaggagttcaagaacgagcaggggtcagaaataaaccggatttttaaggaaaacaaatctatcctgaatgagagacgcaagagggctagtgaaaccacccagcatatcaatgctatcaaacgggaaatcgatgtaacaaaggaggcccttaacttccagaaaagcctgcgcgaaaagcagggcaaatacgagaacaagggcctgatgatcatcgatgaggaggagttcctgctcatcctgaagctgaaggacctaaaaaagcaataccggtccgaataccaagatttgagggacttaagggctgaaatccagtattgtcagcacctggtggaccaatgcaggcacaggctcttgatggagttcgatatatggtataatgagtcatttgttattcccgaggacatgcaaatggcgctgaaaccgggcgggagcattaggcctggtatggtgcccgtgaataggatcgttagcttgggagaagacgatcaggacaaattttcccaactgcagcaacgcgtcctgcccgagggccctgacagcatatccttctacaatgcaaaggttaagattgaacaaaagcacaattatctgaagacgatgatgggcttacagcaggcgcacagaaaatag

SEQ ID NO: 25963 - DNA, 282 bp, synthetic construct
  source 1..282: mol_type = other DNA; note = Synthetic coding sequence
atggccgccgccaccggcgaccccggcctgagcaagctgcagttcgccccattctcatctgccttggatgtgggcttttggcacgagctcacgcagaagaaactcaatgagtatcgactggacgaggcacctaaagatattaaaggatactactacaacggcgattcggccggcctgcccgccagactaactttggagttctccgcgttcgacatgagcgcaccgacccccgcacggtgctgccctgcaattgggaccctgtacaataccaatacactctag

SEQ ID NO: 25964 - DNA, 333 bp, synthetic construct
  source 1..333: mol_type = other DNA; note = Synthetic coding sequence
atgggcaagaagcagaacaagaagaaggtggaggaggtgctggaggaggaggaagaagaatacgtcgtggagaaagtcctcgacagaagggtcgtgaaaggaaaagtggaatacctcctcaagtggaagggcttcagcgacgaggataatacgtgggagcccgaggaaaacctcgactgtcccgacctgatcgccgagtttctgcagtcccagaaaaccgcccatgagacagataagtccgagggcgggaaacgcaaggcagacagcgatagtgaggacaaaggagaagaatctaagccaaaaaaaaaaaaagaggagagcgagaagccatag

SEQ ID NO: 25965 - DNA, 270 bp, synthetic construct
  source 1..270: mol_type = other DNA; note = Synthetic coding sequence
atgagctactaccagcggcccttcagccccagcgcctacagcctgcccgcctcgttgaacagttcaatagtgatgcagcacggcacaagcttagattctacggacacatacccccagcatgcccagtcattagatggtacaacctcctctagtattcccctctatcgttccagcgaagaggaaaagagagtgacagtaattaaagccccccactacccaggcatcggccccgtggacgagtcaggcataccaacggccattcggacatag

SEQ ID NO: 25966 - DNA, 1269 bp, synthetic construct
  source 1..1269: mol_type = other DNA; note = Synthetic coding sequence
atggagcggaaggacttcgagacctggctggacaacatcagcgtgactttcctgtccctcaccgatttacagaaaaatgaaacactggaccacctgatcagcctgtctggcgccgtacagttgcgccacctcagcaataacttagagacactcttgaaacgcgatttcctgaagcttctgcccctggagctgagcttttaccttcttaagtggctggaccctcagaccctcctgacctgttgcttggtatccaagcagtggaacaaagtaatctctgcatgtactgaagtgtggcagaccgcctgtaagaatctcggttggcagattgatgactccgtgcaggacgccctgcactggaagaaggtgtatctgaaagccatcctgagaatgaagcaactggaggatcatgaagcctttgaaacctcctccctgataggacatagtgcccgcgtatacgccctgtattacaaggacggactgctctgcaccggctccgatgacctctccgccaagctgtgggatgtcagcacaggccaatgcgtgtatggtatccagacccacacctgcgccgccgttaaattcgacgagcagaagttagtcaccggatcgttcgacaatactgtagcttgttgggagtggtctagcggtgctcgtacccagcacttccgcggacacacaggcgccgtcttctcagtggattataatgacgaactggatattctggttagtggctccgccgatttcactgtgaaagtttgggcactcagcgcaggaacatgtctcaacaccctcaccgggcacaccgagtgggtaacgaaggtagttcttcagaagtgcaaggtcaaatctctcctgcactctccaggcgactatatcctgttgtccgccgacaagtacgaaatcaagatctggcctattggacgagaaattaattgcaagtgccttaagactctctccgtctccgaagataggtctatatgcctgcagccgcgactccactttgatgggaagtatatcgtgtgttccagcgctttgggactatatcagtgggatttcgctagctacgatatactacgggttatcaagacccctgagatagccaacctcgccctgctgggctttggcgatatttttgcgctcctatttgacaacagatatttatacattatggatctcaggaccgaatcgcttatctccaggtggccccttcccgaatacaggaagtcaaagcggggcagtagtttccttgccggtgagcatccaggttag

SEQ ID NO: 25967 - DNA, 1179 bp, synthetic construct
  source 1..1179: mol_type = other DNA; note = Synthetic coding sequence
atgagcgccctggccggcgaggacgtgtggcggtgccccggctgcggggaccatatcgcacctagccagatttggtacaggactgtgaacgagacttggcacggatcctgctttcgccgttctaactcaatcagtaaatcaccaggcccatcctcaccgaaagaacctctgttgtttagccgagatatcagtcgcagcgagtccttgcgttgttcatctagctactctcagcagatattccggccttgtgacctcattcacggcgaggtgctgggtaaaggtttcttcggccaggcgatcaaggtgacccataaggctactgggaaagtgatggtaatgaaggagctgatccggtgcgatgaggaaacccaaaagacgttcctgactgaagtaaaagtgatgcgcagcctggaccaccccaatgtcctaaagtttattggcgtcctctacaaggataagaagctcaatctgctgaccgaatacattgaagggggcactctgaaggattttctacgttcaatggaccctttcccatggcagcagaaagtgagatttgctaaaggtattgcaagtggcatggcatacctgcacagcatgtgtattatacatcgcgacctgaattcacacaactgtctcataaagctcgacaagacggtcgtagttgcagattttgggctgtccaggctgatcgtcgaggagagaaagagagcccctatggagaaagcgacgactaaaaagcgcacgcttagaaagaacgataggaaaaagcggtataccgtggttgggaacccctactggatggctcccgagatgctaaacggaaaaagctacgatgagaccgtagatatcttctccttcgggattgtactgtgcgaaatcataggtcaggtgtacgcagacccggactgcctaccacggacattagacttcgggttgaatgtcaaactgttctgggaaaaattcgtcccaacagattgtccacccgccttcttcccacttgctgccatttgctgccggctcgagcccgagtctcggcctgctttctcaaagcttgaggactcttttgaagcactgtcactctatcttggggagcttgggattcccctacccgccgagttggaggagctagaccataccgtgagtatgcagtacggcttgacacgagatagccccccctag

SEQ ID NO: 25968 - DNA, 480 bp, synthetic construct
  source 1..480: mol_type = other DNA; note = Synthetic coding sequence
atggccaccagcgcccccctgcggagcctggaggaggaggtgacctgttcgatttgcctggactacctgcgggatcccgtgacaatagactgtgggcacgtattttgtcgatcttgcaccactgacgtgcgtcctataagcggatcacgccctgtgtgtcccctgtgcaagaagccattcaaaaaggagaatatccgcccagtgtggcagcttgagaaaatactcaatcacctgagtacactgagacgggacagagacaaaattcagggctttcaggcaaagggtgaggcggacatcctggccgctctgaagaaactgcaagaccagagacagtacattgtcgctgaattcgaacagggccaccagttcctgagagagcgtgaggaacatctcttagagcagctggcaaagttggaacaggaactcacagagggccgcgagaaatttaaaagccgcggcgtcggggaactcgctcggtag

SEQ ID NO: 25969 - DNA, 3585 bp, synthetic construct
  source 1..3585: mol_type = other DNA; note = Synthetic coding sequence
atgttcagcctggacagcttccggaaggaccgggcccagcaccggcagaggcagtgcaagctcccccctcctcgtctccctcccatgtgcgtgaatccgacccctggcggtaccatttctagggcctctcgagatctgctcaaggagtttcctcaaccaaagaatttgcttaacagcgtgattggtagggccctgggcatttctcacgctaaggataagttagtgtacgtgcatacgaatggacctaaaaaaaaaaaggttaccctgcatatcaagtggccaaaatccgtggaggtggaaggctatggatccaaaaagatagacgccgagaggcaggcggctgccgccgcttgtcaacttttcaaggggtggggactgctgggcccaagaaacgagctgtttgacgccgccaagtatcgcgtcctggccgacaggttcggttcacctgccgacagctggtggcgccccgagccgacaatgccacctactagctggagacaattaaatcctgagtccattcggccaggcggccctggcggactgagccgctcccttggaagagaagaggaagaggacgaagaggaggagttggaggaaggcacgattgatgtaacagactttctctcgatgactcaacaagattcccacgctccgctccgcgattccagggggtcttcatttgaaatgaccgacgatgactcggccattagagccttgacccagtttccgctgccgaagaacctgctggctaaagtcatccagattgcaaccagctcgagcactgccaaaaacctgatgcagtttcacactgtggggacgaaaactaagctttcgaccctaactctgttgtggccttgcccgatgacatttgtggccaagggtcggcgcaaagccgaggccgagaataaagctgccgcactggcatgtaaaaaactgaagtctctcggactggtggacaggaacaacgagccgcttacacacgccatgtataacctcgccagtctgcgcgaactgggggagactcagaggaggccgtgcaccatacaagtccccgaacccatcctacgaaaaattgagacattcctgaaccactacccggttgaaagctcatggatcgcacctgagctgcgtctgcagtctgatgacatcttacccctaggcaaagactcagggcctctctctgacccgattaccggcaaaccctacgtgcccctgcttgaagcagaggaggttaggctttcacagagtctcctggaactctggaggcgacggggccctgtatggcaggaggcgccgcagttgcccgttgacccccaccgtgataccatcctcaacgcgatcgaacagcatccagtcgtagtgatctctggagatactggctgcgggaagactactaggatcccacagctactcttagaaaggtatgtgacagaagggcgcggtgcacggtgtaacgtgattataacacagccacgacggatctctgcagtgtctgtcgcccaacgagtctcacatgagctcgggccttctctccggaggaacgttggatttcaggtccggctagagtccaagccaccctctaggggtggggctctgctgttttgtaccgttggtatactgttgcggaaactacagagtaaccctagcctcgaaggagtttctcatgtcattgtcgatgaagtacacgagagggatgtgaacactgactttttgctgatcttgcttaaaggcttacagcgtttaaaccctgctctaaggctggtcttgatgagtgcgaccggcgacaacgaacggttttcaagatacttcggtggatgcccggtgattaaagtgcccggttttatgtatccggtgaaagagcattacctagaggatatactcgccaaactgggtaaacaccagtacctgcatcggcatcgtcaccacgaatcagaagacgagtgcgccctcgacctggacctggttacggacctggtgctgcacattgatgctcgcggggagcctgggggcatcctatgctttctgcccgggtggcaggaaattaaaggggtgcagcagcgtttacaggaggccctaggcatgcacgagagcaagtacctgatcttgcctgttcattctaatattccgatgatggaccagaaggctatattccagcagcctcctgtgggggtgagaaagattgtgcttgctacaaacatcgcagagacctctattaccatcaacgatatagtgcacgtggtggactctggactgcataaggaggagaggtatgacctgaagacaaaggtttcatgccttgaaacagtctgggtgtccagagctaacgtcatccagcggagagggagagccggacggtgtcagtctggcttcgcttaccacctttttccccgaagtcgtctcgaaaagatggttccgttccaagtcccagagatcttgaggaccccactcgagaacctcgtcttgcaagctaagatacatatgcccgagaagacggctgttgagttccttagcaaggcagtggactcacctaacatcaaagccgtcgacgaggcagtcatcctcctgcaggaaatcggggtcctcgaccagcgagagtacctgactaccttggggcaaaggcttgcccacattagcaccgaccctcgtctggcgaaggcgattgtcctggcagccatctttaggtgtctgcaccctctcttggtggttgtgagctgcttgactcgtgatccttttagctcatctctgcagaacagggcagaggttgacaaggtgaaggccctcctgagccacgacagtgggagcgaccatttggcgttcgtcagggctgtcgccggctgggaggaagtccttaggtggcaggacaggtcctcacgggagaattacctggaggagaacctgctctatgccccaagcctgagatttattcacggactgatcaagcagttttcggagaacatatacgaggcattcctggttggaaagccctcggattgtaccttggcttccgctcagtgcaacgagtacagtgaagaagaggaactggtgaagggagtgctcatggccggtttgtacccgaacctcattcaagtacgccaggggaaggtcaccagacagggtaaatttaaaccgaacagcgttacctaccggacgaaatcaggaaatattctgttacataagagtaccatcaacagggaggcgaccagactgcgatctcgttggctcacctattttatggcggttaaaagtaacggtagcgtcttcgtgagagattccagtcaggtgcaccccctggccgttttactgctcaccgatggggatgttcatatacgagatgacggcagacgcgctaccatctcactatctgattccgatctactgaggctcgaaggcgactccaggaccgtgcgtctgctcaaagaactgcggagggcgctgggtcgaatggtcgagagatccctgaggtcagagctagcagctctgccaccttccgtgcaagaggagcacggacaacttctggccctactagcagagctgctccgagggccctgtggttcattcgatgtccgcaaaacagccgatgactag

SEQ ID NO: 25970 - DNA, 207 bp, synthetic construct
  source 1..207: mol_type = other DNA; note = Synthetic coding sequence
atgagctactaccagcggcccttcagccccagcgcctacagcctgcccgcctccctcaattcaagcatagtcatgcagcacggcaccagcctcgattctaccgacacttatccccaacacgcccagtctctggatggtactactagctccagcattccgctatatagaagctcagaagaagagaagagagttactgtaattaaatag

SEQ ID NO: 25971 - DNA, 1419 bp, synthetic construct
  source 1..1419: mol_type = other DNA; note = Synthetic coding sequence
atgagccggcgggtggtgcggcagagcaagttccggcacgtgttcgggcaggccgctaaagcagaccaggcatacgaggacatccgcgttagcaaagttacctgggacagctccttttgcgctgtgaatcccaagttccttgcaatcatagttgaggccggcggcggcggcgcctttatcgttttgcctctcgccaaaaccggacgagtggacaaaaattaccctttggttaccggccacaccgcccccgtcttggacattgattggtgcccccataacgataacgtgatcgccagcgcttccgacgacacaaccatcatggtgtggcagatccccgactatacgcccatgcggaatatcactgagccaatcatcactctggaggggcacagcaagagagtcgggattcttagctggcaccccacagcacgtaatgtcttacttagcgccggaggggacaacgtgataattatatggaatgtgggcaccggcgaggtgctcttatcccttgatgatatgcatccagacgtcattcactcagtttgttggaatagcaacgggtctcttcttgccaccacctgtaaggacaaaactctgcgcatcattgatcccagaaagggccaagtggtcgctgaacaggctaggccacatgagggcgccaggccccttcgagctgtgtttactgccgacggtaaacttcttagtactggctttagcaggatgagcgaacggcagcttgcactctgggaccctaacaacttcgaggagccagttgctctacaagagatggacacatcaaatggcgtactcttgcccttttatgatcccgacagtagtattgtgtacctgtgcggtaaaggggatagtagcatcagatatttcgaaataaccgatgaacccccatttgtgcactatctgaacacattcagtagtaaggagccgcagagaggaatgggttttatgccaaagagaggcttggacgtgtcaaaatgtgagattgctaggttttacaaacttcacgagagaaagtgtgagcctattataatgaccgtaccacggaagagcgatctctttcaagatgatctgtaccccgataccccagggcccgagcccgctctggaagccgatgagtggctcagcgggcaggacgccgaaccagtcctaatctccctgcgggacggatatgttccccccaagcatagggagctaagggttacgaaaaggaacattctggatgtccggcccccgtctgggccccggagatctcaatcggcaagcgatgcccccctcagccagcagcatacactggagaccttactggaggagatcaaggccctcagggagagagtgcaggcccaggagcagaggataacagctctggaaaacatgctttgcgagcttgtcgacgggacagattag

SEQ ID NO: 25972 - DNA, 390 bp, synthetic construct
  source 1..390: mol_type = other DNA; note = Synthetic coding sequence
atcctgcacagcctggtgcagaccggcatctgcgtgatcaccctggctgagtcccaccccgtgctgcagagtggaaagacaattaaatctatcagctaccagatatccaccaactgttcaagactgcaaaataaagtctccggcaaattcaaacgcggcgcccagtttcttaccgaattggctcccctctgcaaaatttattgcagtgatggcgaggaatataccgtgagtagctgcgtccgcggccgcctgatggaagttaatgagaatatacttcataagcccagcatcttgcaggaaaaaccctccacagagggttacattgccgtggtgcttccaaaattcgaggaatccaagagtattaccgaaggacttttgacacagaaatag

SEQ ID NO: 25973 - DNA, 735 bp, synthetic construct
  source 1..735: mol_type = other DNA; note = Synthetic coding sequence
atggtgcaccaggacaactgcagctaccaggcccagaagaacgagcgagagtcaatccgtcagaagctggctctgggctctttcttcgatgatggccctggaatttacacaagctgctccaaaagtggaaagccaagcctctcgtcccgcctgcagtcgggaatgaacctgcagatctgctttgtgaatgattccggttcagacaaagacagtgacgcagacgactctaagactgagacatccctcgataccccactgtcacccatgagtaaacagagctcttcttactccgaccgcgacactaccgaagaggagagcgagtcgcttgatgatatggatttcctgacacgccaaaaaaagctccaggccgaagcgaagatggcactggcaatggcaaaacctatggctaagatgcaggtggaggtggaaaaacagaataggaagaagtcacctgttgcagatttactcccccacatgccacatattagcgaatgtctgatgaagcgatctctcaaaccgacggacctgagagacatgacaataggacaattacaggtaatcgtgaatgatcttcactctcagatcgagtcattgaatgaggagctcgttcagctgctgctgattagggatgaactgcacaccgaacaggacgcaatgttggtggatatcgaggatttgacccggcatgccgaatctcagcagaagcacatggctgagaagatgcctgctaagtag

SEQ ID NO: 25974 - DNA, 1620 bp, synthetic construct
  source 1..1620: mol_type = other DNA; note = Synthetic coding sequence
atggccaccagcgcccccctgcggagcctggaggaggaggtgacctgtagtatttgcctggattatttacgggatccagtcacgatcgactgtggacacgttttttgccgatcatgcactacggacgtccgacccatctcaggttcaaggcccgtatgccctttgtgcaagaaaccatttaagaaggagaacatcagacccgtttggcagctggcctcccttgtagagaacatcgaaagattaaaggtcgacaagggcagacagcctggcgaagtgacaagagaacagcaggacgctaagctttgtgagagacatcgagaaaaactccattattattgtgaggacgacggtaagctcctgtgtgtcatgtgtcgggaatcacgggaacaccgcccacacacagccgtcttaatggaaaaggcggcacagccacaccgggaaaagatcctcaaccatctctcgacacttcgtcgggaccgtgataaaatacaaggttttcaggccaaaggagaggcagatatccttgccgccctcaaaaaactccaggaccaaaggcagtacatcgtggcagaattcgagcaggggcaccagttcctgcgggagagagaagagcacctgctagaacaactcgccaagcttgagcaggaactcacggagggcagagaaaaattcaaaagccgaggcgttggagagctcgcacgtttagctctcgttatttccgagctggagggtaaggctcaacagcctgccgccgagctcatgcaagacaccagagactttctgaatcggtacccacggaaaaagttttgggtgggaaagcctatagcccgcgtggtaaagaaaaagacgggcgagttctccgataagttgctgagtctgcaaaggggtctgcgggagtttcaaggaaagctgctgcgggacctggagtacaaaactgtttctgttactcttgatccccagtccgccagcgggtacctccagttgagcgaggattggaagtgcgtaacatacacatccctgtacaaatctgcatatctccatccgcagcagttcgattgtgagccaggcgtcctcggcagtaagggcttcacctggggcaaggtttattgggaagtcgaggttgaacgggaagggtggtctgaggatgaagaagaaggcgacgaggaggaagaaggggaagaggaagaggaagaagaggaggccggctatggagacggctacgatgattgggaaaccgatgaggacgaggagtcgctcggagacgaagaggaggaagaggaggaggaagaggaagaggtcctcgaatcatgcatggtcggggtggcgcgcgattccgtgaaacgcaaaggagacctgtcactgagacctgaggacggtgtgtgggcactgcggctatcctcctctggcatttgggctaatacatcacctgaggccgaattgtttcctgctctccggccaaggcgggtagggatcgccctggactacgagggcggaaccgtgacttttaccaacgccgaatcacaggagttgatctacacattcacagcaacattcaccaggagactggtgcctttcctgtggctgaagtggccgggcacacgacttctcctgaggccctag

SEQ ID NO: 25975 - DNA, 441 bp, synthetic construct
  source 1..441: mol_type = other DNA; note = Synthetic coding sequence
atgttcgagatcctgaccagcgagttcagctaccagcacagcctgtcgatacttgtagaagaattcctccaatccaaggagctccgagccactgtgacacagatggaacatcaccacctcttttcgaacatcttagacgtattaggagccagccagcggttttttgaggaccttgagcagcggcacaaggcccaggtgctggtggaggacatctcagacatccttgaagagcatgcggaaaagcacttccacccctacatcgcctactgttctaacgaggtctaccaacagagaaccctgcaaaaactgattagctccaacgccgcgtttcgagaagccctgcgagagattgagagacgtcccgcctgcgggggcctgcctatgctttcttttctgatactaccaatgcaaagagtgacacggctgcccctcctgatgtag

SEQ ID NO: 25976 - DNA, 483 bp, synthetic construct
  source 1..483: mol_type = other DNA; note = Synthetic coding sequence
atggaggccgagcggccccaggaggaggaggacggcgagcagggccccccacaagacgaggaggggtggccccccccgaactctaccactagaccctggaggtccgctcccccgtcgcctcctccacccggcacccgccacactgccctgggccccaggagcgctagtttactcagcttgcagacggagctgctcttggatctcgtcgccgaggcccagtcccgtagacttgaggaacagcgggcaactttctatacgccccagaaccccagctccctggcgccagccccgctgcgtccgcttgaggaccgtgaacagctgtattcgaccattttgagtcaccagtgccagaggatggaagcccagcgcagcgaaccccccctccccccgggtggtcaggaattgctagagctgttactgagagtgcaaggggggggacgtatggaagaacagagatctagacctcctacacacacgtgctag

SEQ ID NO: 25977 - DNA, 303 bp, synthetic construct
  source 1..303: mol_type = other DNA; note = Synthetic coding sequence
atgagctactaccagcggcccttcagccccagcgcctacagcctgcctgcgagtctgaattcaagtatagtcatgcagcatgggactagcctggactccaccgacacctaccctcagcacgctcagagcctggacgggaccacaagctcatctatccccctgtacagatcctcagaagaagagaaacgcgtcaccgtgattaaggcccctcactacccagggattggacccgtcgacgaatcagggatcccaactgccattcgcacgaccgtcgatcggccgaaagactggtataagacctag

SEQ ID NO: 25978 - DNA, 369 bp, synthetic construct
  source 1..369: mol_type = other DNA; note = Synthetic coding sequence
atggccaccagcgcccccctgcggagcctggaggaggaggtgacctgtagtatttgcttggactacctgagggatcctgtaacgattgattgcgggcatgttttttgcaggtcctgcaccaccgatgttagacctattagcgggtcccgtcctgtgtgccccctatgtaaaaagccttttaagaaagagaacatcaggccagtatggcagttagcctccttagtggagaacattgagagacttaaggtcgataaagggaggcagccaggtgaggtaacaagggaacaacaggatgctaaactgtgcgagcgccatcgagaaaaactccattattattgtgaggatgatgggaagttactgtgcgtctag

SEQ ID NO: 25979 - DNA, 633 bp, synthetic construct
  source 1..633: mol_type = other DNA; note = Synthetic coding sequence
atggtgagcatgagcgtgcccgactgcctgagcatcatgacctacgtgtctcagtattacaatcacttctgttccccagggcaagcaggcgtgtccccgcctcgaaagggtttggccccttgcagccccccatcagtggctccaaccccagtggagccagaggatgtagcccagggcgaagagttaagtagcggatcactatctgaacaaggaaccggacagaccccaagctccacatgcgcagcctgtcagcagcacgtgcacctggtacagagatacctggcagacggccgcctgtaccacagacattgcttccgctgccgccgctgctcgagtaccttgctacctggcgcatacgaaaatggaccggaggagggtacatttgtttgtgccgagcactgcgctaggctcggccccggcacccggagtggcacgcggccaggccccttcagtcaacctaagcagcagcatcagcagcagctggcagaagatgcgaaagatgtgcctgggggaggaccttcctcctcggccccagcgggagctgaagctgacgggcctaaagccagtcccgaggcaaggccacaaattccaactaagccaagggtacccggaaagctccaggagttggcctag

SEQ ID NO: 25980 - DNA, 390 bp, synthetic construct
  source 1..390: mol_type = other DNA; note = Synthetic coding sequence
atggccgagctgatccagaagaagctgcagggcgaggtggagaagtatcaacaacttcagaaggatctgtcaaaatctatgagcggcaggcagaaactggaagcccagctgaccgaaaacaatattgtgaaggaggagttagccctcctggatggttccaatgtcgtctttaaactgctgggcccagtactcgtcaagcaagagttgggtgaagcacgggctaccgtcggcaagcgcctggattacataacagccgagatcaaacgctatgaatctcaattacgcgatctcgaacgacagtccgagcaacagagagagactttggcccaacttcaacaagagtttcagcgggcccaggctgcaaaggctggcgcccccgggaaagcctag

SEQ ID NO: 25981 - DNA, 621 bp, synthetic construct
  source 1..621: mol_type = other DNA; note = Synthetic coding sequence
atggccctgaacgtggcccccgtgcgggacaccaagtggctgaccctggaagtgtgccgccagttccaacgaggcacatgctctcgatctgacgaggagtgcaagtttgcccatccccccaagtcatgtcaagtcgagaatggtcgtgtgatagcttgttttgactctctgaagggtcggtgttcacgagagaattgcaaatacctgcatcccccgacccacctgaaaacccagctggagatcaacggcagaaataatctgatacagcagaagaccgcagccgcaatgctcgcacagcaaatgcagttcatgttccccgggacccccctccaccctgtcgctttcccgcctggagcccttcacccactgcctaagcgacaggccctagagaagtccaatggaacatctgctgtgttcaatccaagtgtgttgcattatcagcaggcgttgacaagcgcacaactccagcagcacgccgcttttatccctacagataactcggaaatcattagcaggaatggaatggaatgccaggaatcagccctccgcattaccaaacactgttactgcacatattatccggtgtcctccagcattgagctcccgcagaccgcctgctag

SEQ ID NO: 25982 - DNA, 978 bp, synthetic construct
  source 1..978: mol_type = other DNA; note = Synthetic coding sequence
atgcagcagcccgtgcgggccggcgacatcggcgtgagccgggtgcaaactcatcacaacgccagcccattcagtgtacctaagaaacaggacgagtcgcctatgatcggcgacggcgaggactactttctgtcactgtttggggactccaagaagttgacggcccattcgaactatacacagaaaacgctgaagtacttttcaatgatactagaagaggtgggacaatttacttccagctcattgggggatgtggagattgccgaggtgaacgtgaaggggttgttcgtgaagttgattaactcctccctggacaaagaaatggccatcggagaccacatactacagcaaaatgtcaacggtcagacaatttctctgtatcgatttcttcctaacatcgttatgcaggccaactccaccgttaccgtgtgggcagccgccagtgaagccaagcatcaaccgccctctgactttctctggaaggaacaagataagtttagagccagtcccgattgcatcacaatcctctgcaagccaaacggccaagctatagcctggtacacccctattcactggaaacaagcctgggaaaagttggacgcggatgttgaattcaacaggtgttcagtagtgagccccaccttcaggaagagggtgttccagtggacggcctctaccgccacgattactaaggagaaacaggatcagcccaagaaagatattagtaactaccaagtagagcaagctcaggtcttgttgaaacgagaaaaggagatcccaccaactgtgtttccaaatagatccccatggtgccagaacccctatgtttcggctcatccatactgcccactcatcgagccccataatacaagtaccgccggcggacggttggatcgccagcctaggacaaggagcacacggcccaatagggcatccgggagtaaaaagaagaagacctctgaatcacaaaaacagtag

SEQ ID NO: 25983 - DNA, 1257 bp, synthetic construct
  source 1..1257: mol_type = other DNA; note = Synthetic coding sequence
atgcgggagatcgtgcacatccaggccggccagtgcggcaaccagattggaaccaagttttgggaagttatcagcgacgaacacggaatcgacccagctggcgggtatgttggtgatagcgccttgcaactcgaacgtattaatgtgtattacaacgaatcatctagccagaagtatgttccgcgggcggccctggtggatctggagccagggaccatggattctgtccgatctggaccttttggccagttgtttcgaccagataattttatcttcgggcagactggcgccgggaacaattgtttacaggggtttcagctaacccactctttgggaggtgggactgggtcaggcatgggcacgctccttatttcaaaaattcgagaggagtttcccgacaggatcatgaatacattctcagtaatgccgagtccaaaagtgtctgacacagtggtggaaccctataacgctactctcagcgtgcatcaattagtggagaataccgacgaaacatattgtattgataacgaggctttatatgacatctgtttccggacattaaaactaacaactccaacttatggcgacctcaaccatctggtgtccgccacaatgtctggcgttactacttctctcaggttccccggacagctgaatgctgatcttcggaaactagccgttaacatggttccatttccacgtttacacttcttcatgcccggcttcgctcctttaacgagccgcgggtctcagcagtatcgagcactcaccgtgcctgaactgacccaacagatgtttgacgccagaaatatgatggctgcttgcgacccacgtcacgggagatatcttactgtggctaccgtcttccgtgggcccatgtccatgaaagaggttgacgagcagatgctggccatccaaagtaagaattcaagctactttgtggaatggatccctaacaatgttaaggtggcagtgtgtgacataccaccccggggattaaaaatggcatcaacttttattggaaattcaacagccattcaggaactgtttaaacgcatcagtgaacagttcagtgcaatgtttcgccgcaaagctttcctgcactggttcactggagaaggcatggatgaaatggaattcactgaagcagaaagtaacatgaacgacctcgtttcagagtatcaacaataccaggacgctaccgcaaacgacggcgaagaggcttttgaagatgaagaggaggagattgacgggtag

SEQ ID NO: 25984 - DNA, 270 bp, synthetic construct
  source 1..270: mol_type = other DNA; note = Synthetic coding sequence
atggacgtgctgagccccctgagcttcatcaaggtgagccacgtgagaatgcaaggtattctcctgctcgtcttcgctaaataccagcatctgccctacatccaaatattgtcaacaaaatcaactcctaccgggttatttggctactggggaaataagggaggagtgaacatctgtctcaaactgtatgggtactatgtatcaataatcaattgccacctgcctccccacatcagcaacaactatcagagactcgaacatttcgattag

SEQ ID NO: 25985 - DNA, 180 bp, synthetic construct
  source 1..180: mol_type = other DNA; note = Synthetic coding sequence
atgacccggggcaaccagcgggagctggcccggcagaagaacatgaagaagcagtctgactccgtaaagggaaagcggagagacgatggtctgtctgccgctgctaggaagcagagagatagtgagattatgcagcaaaaacagaaaaaagctaatgagaagaaggaagagccgaagtag

SEQ ID NO: 25986 - DNA, 864 bp, synthetic construct
  source 1..864: mol_type = other DNA; note = Synthetic coding sequence
atggacgagaccgagatcggcagctgcttcggccggtacggcagcgtgaaggaggtcaaaatcattaccaatcgcaccggtgtaagtaaaggctacgggtttgttagtttcgttaacgacgttgatgtacagaagattgtggggtctcagatacattttcatggtaaaaagttgaagctcggacccgccattcgcaaacaaaagctttgcgcccgtcacgttcagccaaggccgttggttgtgaaccctcctcctccccctcagttccagaacgtgtggcggaatcccaacactgaaacatacctacaacctcagattacccccaacccagttacccagcacgtgcaggcttactctgcttatccccatagccccggtcaggtaatcaccggctgccaactgttagtgtataactaccaggagtatcccacgtaccccgacagcgctttccaggtgacaaccgggtatcagttgcccgtttataactaccagccatttcccgcataccctcgctcaccatttcaggtcaccgctggttaccagcttccagtctacaactatcaggctttccctgcctatccaaattcaccctttcaggtcgcaacaggatatcagttcccagtgtacaactaccagccttttccagcatatccatcatccccgtttcaagtgactgccggctaccagctccctgtgtataattaccaggcttttcctgcataccctaacagccccttccaggtggcgaccggctatcagttccccgtgtacaactatcaagctttcccagcctacccaaacagcccagtgcaggtcacaacaggctatcagctccctgtctacaactatcagaaattcccatag

SEQ ID NO: 25987 - DNA, 1344 bp, synthetic construct
  source 1..1344: mol_type = other DNA; note = Synthetic coding sequence
atggacatgggcaaccagcaccccagcatcagccggctgcaggagattcaaaaagaagtcaaatctgtcgaacaacaggttatcgggttcagtggcctgagtgacgataagaactataagaagctggaacgcattttgacaaaacagctgttcgagatagactcagtggacactgaaggcaaaggggatatccagcaggctcgcaagcgagctgcgcaagaaacagagcgtttgctgaaggaacttgaacaaaatgcgaaccaccctcaccgcattgagatacagaatattttcgaggaggcacagtctctcgtcagggagaaaatcgtgcctttttataacggtggcaactgcgtgaccgacgagttcgaggaggggatccaggatatcatcctgcgactgactcatgtaaagactggcggcaaaatctctctgcggaaagcaagataccacacgctgacaaagatctgcgcggtccaggagataatcgaagactgcatgaagaagcaaccatctctcccgctgtccgaagacgcccacccatccgtcgcgaagattaattttgttatgtgtgaagtgaacaaagcgagaggcgtgttaattgcactgttaatgggggtcaataataatgagacatgtagacatttgtcttgtgtcctgtctgggctcatcgccgacttggacgcattagatgtgtgtggccggactgagataaggaattatcgccgtgaggtggtagaagatattaataaactcctcaaatatctggaccttgaggaggaggcagacacaactaaagcgtttgatctccgacagaaccactccattcttaaaatcgagaaggttctcaagcgaatgagggagatcaagaacgaactgctgcaggcccagaatcctagtgagttgtacctatcctccaagactgaactgcagggccttatcggccagttagacgaggtctcattggagaagaacccctgcatacgcgaagcccgccgcagagctgtgattgaggtccagacactgatcacttatatcgatctcaaggaagctctagagaaacggaagctgttcgcatgtgaggagcatcccagtcacaaggccgtgtggaacgtgctcgggaacctctcagagatccagggcgaggtgctttcttttgatggaaatcggaccgacaaaaactatatcaggttagaagagttgttgacaaaacagttactcgctctggacgcagttgacccccaaggagaagagaaatgtaaagctgcccgaaaacaggctgtgcggcttgcgcaaaacatactgtcctatctcgacctaaagagcgatgaatgggaatactag

SEQ ID NO: 25988 - DNA, 474 bp, synthetic construct
  source 1..474: mol_type = other DNA; note = Synthetic coding sequence
atggccaacatcgccgtgcagcggatcaagcgggagttcaaggaggtattaaagtcagaggaaacctccaaaaaccagattaaagtcgatttggtggatgagaacttcacagagttgcgcggtgagattgccggaccacctgataccccttatgaggggggccggtaccaactggaaattaagatccccgagacttaccctttcaacccgcctaaggtgcgatttataacaaagatttggcatcccaatatttctagcgtgacaggtgccatatgtttggacatactgaaagaccaatgggcagccgccatgacattacgaacagtgctgctgtcgttacaggctctgttagcagcagccgagccagatgacccacaggacgctgtcgtggctaatcaaaatgctgtcattgtcgcactctcaagcaagagctgggatgtggaaacggccactgagctccttctttcgaattag

SEQ ID NO: 25989 - DNA, 582 bp, synthetic construct
  source 1..582: mol_type = other DNA; note = Synthetic coding sequence
atgcccaccaccagccggcccgccctggacgtgaagggcggcaccagccctgccaaagaggacgcaaaccaggagatgagttcagttgcatactcaaacctcgccgtcaaagatagaaaagccgtggccatactccactaccccggcgttgcctcgaatggcaccaaggcatccggggcacctacatccagcagcggctcacctatcggatcccctaccaccacccctcctaccaagccacccagctttaacttgcaccctgcgccacacctgttggctagcatgcacttgcagaagctgaattcacaatatcaggggatggctgctgcaaccccagggcaaccaggggaggctggtcccctgcagaattgggatttcggtgctcaggcaggtggagcggaaagcctgagcccaagcgccggcgcccaaagtccagccatcatcgattccgaccccgtggatgaagaagtactgatgagcctcgttgtggagttgggtctagaccgagctaatgaactgcctgagctctggctgggacagaacgaatttgacttcaccgccgactttcctagttcatgctag

SEQ ID NO: 25990 - DNA, 1188 bp, synthetic construct
  source 1..1188: mol_type = other DNA; note = Synthetic coding sequence
atggccagcgccgccagcgtgaccagcctggccgacgaggtgaactgccccatctgccaagggaccctccgagagcccgtgactattgattgtggacacaacttctgtagagcctgcttgactaggtattgcgaaatccccggcccagacctcgaagaaagtcccacttgcccgctgtgtaaagagcccttccgtcctggcagttttcgacccaattggcaacttgccaatgtggtcgagaatatcgaacgccttcaattggtttcgaccttaggactcggagaggaggatgtgtgtcaggaacacggggagaaaatctacttcttctgcgaagacgacgaaatgcagctgtgcgtggtgtgtagggaggctggggaacatgctacacacacgatgcggtttctggaagatgccgctgccccatatcgggaacaaatacacaaatgtctgaaatgtctaaggaaagagcgggaggaaatacaagagatacagagtcgtgagaacaaacggatgcaggtcctcctgacacaggtaagcacaaaacgccagcaagtgatttctgagttcgcgcacctgcgcaagttcctggaagaacaacagagtatcctgttggctcagttagaatctcaggacggcgatatcttgcgccagcgagatgaattcgatctgctcgttgccggcgaaatatgtagatttagtgcattgatcgaagagctcgaggaaaaaaatgagcgcccagctcgggagctcctgacagatatacgcagcactttgatccggtgcgaaacgcggaagtgtagaaagcccgttgcagtcagtccagaactcggacaaagaatccgtgatttcccacagcaggcgctgccacttcaacgggaaatgaagatgttcctcgagaaactctgtttcgaactagattacgagccagctcacatctcattggacccacagacaagccatcctaagttgctactcagtgaggaccaccagcgggcccagttctcctataaatggcagaactctccagataatccgcagagattcgatcgggccacttgtgtgctggcccatactgggattaccggaggcaggcacacgtgggtttggatggctcgcgtgccaggagactctggttgttgtcagttctgctcgcctccttctgtcttgggcacagaagttgccgcctag

SEQ ID NO: 25991 - DNA, 624 bp, synthetic construct
  source 1..624: mol_type = other DNA; note = Synthetic coding sequence
atgaccgaggacagccagcggaacttccggagcgtgtactacgagaaggtcgggttccgcggcgtggaggagaagaagtcccttgaaattctgttgaaggacgaccggttgggaattctgcctccgcatcatgagtctcacgcaaaggttatgatgtatagaaaggagcaatacttggatgtattgcacgcgctgaaggttgtgaggtttgtgtccgatgctacacctcaggccgaagtgtatctgcggatgtatcaactggaatccggaaaactgcctcgaagtccaagtttccctctagaacctgatgacgaggtatttctcgctatcgccaaagcaatggaagagatggtcgaggattctgtggactgctactggataaccaggaggttcgttaaccagttaaacacaaagtaccgtgactccttgccccagctgccgaaagcctttgagcagtatctgaatttggaggacggcagacttctcacacacttaagaatgtgctcggcagcaccaaagctgccctatgacctatggttcaagaggtgctttgcaggctgcctgccggagagctctcttcagcgagtgtgggacaaggtggtgtctggctcatgcaagatctag

SEQ ID NO: 25992 - DNA, 1404 bp, synthetic construct
  source 1..1404: mol_type = other DNA; note = Synthetic coding sequence
atggccagcctgctgcagagcgaccgggtgctgtacctggtgcagggtgaaaagaaagttagggcccctctgtcccagctctacttttgcagatattgctcagagctgcggtctctggagtgtgtgagccatgaagtggactcccactactgtccatcatgcctggagaacatgccttctgccgaagcaaagctgaagaagaaccggtgtgccaattgtttcgattgcccggggtgtatgcacaccctatctacaagagcaacatccatatcaacccagctgcccgacgacccggccaagaccaccatgaaaaaagcctattatctggcttgcgggttttgtaggtggacgtcacgagacgtcggcatggccgataagagtgtggcgagtgggggctggcaagagccagagaatccccacactcaaagaatgaataagctcatcgagtattatcagcagctcgcccaaaaagagaaggtggagagggacaggaagaagctggctcgcaggcgtaattatatgccgctggctttttctcagcacaccattcatgtggttgacaagtatgggctcgggactagactgcagagacctagggctggcgcctctatcagcactctcgctggtctgtctctcaaggagggcgaggaccagaaagagatcaagattgaacccgcacaggctgtcgatgaggtggagccattaccggaggattactatacccgtcccgtgaacttgaccgaagtcactacattgcagcaaagactattgcagcccgatttccaacctgtttgtgcgagtcagctctatccccgccacaaacacctactgattaagcgtagcctgagatgcaggaagtgcgagcataatctatcgaaacccgagttcaacccaacttccatcaaattcaagatacagctggtggccgttaactatataccagaggtgcggattatgagtatccctaatttacggtatatgaaggaaagtcaggtgttgctgacgctcaccaaccccgtggaaaacttgacccatgtgaccctgttcgagtgtgaggagggggatcccgacgatatcaacagtactgcgaaagtagtcgtcccgccaaaggagctggttctcgccgggaaggatgccgctgccgagtacgatgagttagcagagccacaagactttcaagacgatcctgatatcattgctttccggaaggccaataaggtgggcatttttataaaggttactccacaaagagaagaaggtgaagtgacagtgtgctttaaaatgaagcatgattttaaaaacctggccgccccaattcgcccaatcgaggaatcggaccagggcacggaggtcatctggttaacacagcacgtcgaactgtctctgggtccactgctgccttag

SEQ ID NO: 25993 - DNA, 435 bp, synthetic construct
  source 1..435: mol_type = other DNA; note = Synthetic coding sequence
gtgcgggagctggaggccgagctggacgccgagcagaagaagcacgctgaagccctgaaaggagtacgcaaacacgaaagaagagtgaaggagctcgcttaccaggccgaggaagataggaagaatctggccaggatgcaggacctggtagataaactccagtccaaagttaaatcctataagcgccagttcgaggaagcagtatcggcgctcggaccaggacaccttgacagagcaccccaactgtgtcccagagtctgcggccaggaacaacaggcaaatacaaatctggcaaagtaccggaaggcacagcatgagctcgatgacgcggaggagcgcgccgacatggccgagacccaggccaataagctccgcgcacggacccgggacgctctgggacccaagctgtcgttaagcccccagcacaaggaatag

SEQ ID NO: 25994 - DNA, 747 bp, synthetic construct
  source 1..747: mol_type = other DNA; note = Synthetic coding sequence
atggccaccagcgcccccctgcggagcctggaggaggaggtgacctgtagcatctgtttagattacctgagggatccggtgactatagattgcgggcacgtcttctgccggagctgtaccactgacgtgcggccaattagcggatcccgtccagtgtgtcctttgtgcaagaagcctttcaagaaagagaatataagaccagtctggcagctcgcctccctagtggagaacattgaacgcctgaaggtagacaaagggagacagcccggagaagttacgagggagcaacaggacgcgaaattgtgtgagaggcaccgcgaaaagctgcactactattgcgaggacgatggaaagttgctctgtgtgatgtgtcgggagtcccgcgagcatcgtccacacacagcggtcttaatggagaaagccgctcaaccccatagggaaaaaatcttaaaccacctgtcaacactcagaagggacagggacaagatccaagggttccaagccaagggagaggcagatatactcgctgccttaaagaagcttcaagaccaaaggcagtatattgtcgcggagttcgagcaaggccatcagtttctacgtgaacgggaggagcatctgctggaacagctggccaagctggagcaggagttaaccgagggacgcgagaagtttaaaagccgcggagtgggcgaactcgcaagacttgccctggtgatcagcgaactcgagggtaaggctcagcagtag

SEQ ID NO: 25995 - DNA, 3468 bp, synthetic construct
  source 1..3468: mol_type = other DNA; note = Synthetic coding sequence
atggccgccagccgggacctgctgaaggagttcccccagcccaagaatctgctcaactcagtgatcggccgagctctgggcattagccacgctaaggacaagctggtctatgtacacactaatggacctaaaaagaagaaagtgactttgcacattaagtggcccaagagcgtggaagtcgagggttacggatcaaagaaaatcgacgcagaacgccaggccgctgccgctgcttgccagctgtttaaaggatggggtttgttgggtccaaggaatgagctgttcgatgccgctaagtatagggtgttagccgaccggtttggtagtccagccgattcttggtggcggcccgagcccacaatgcctcctacatcttggcgtcagctcaatccagaaagcattcgccccggaggccctggcggcctttcacgcagtctggggcgggaggaagaggaagatgaggaagaggagcttgaggaaggtactatagacgtcaccgatttcttgtcaatgacacagcaggattcccacgccccactgcgggactcaaggggtagctccttcgaaatgactgacgacgactcggccatcagagccctgacacagtttcccctgcccaagaatctgctggctaaggtgatacagatcgccaccagtagtagcaccgctaaaaatctgatgcagtttcacactgtcggaactaaaaccaaactttccacactcaccctgctctggccatgtccaatgaccttcgttgcgaaagggagacgtaaggcggaggctgaaaataaagcagctgccctcgcctgtaagaaactcaagagccttggccttgttgataggaataatgagccactgactcatgccatgtacaacttagcctcattgcgggagctaggggagacacagcgcaggccatgtactatccaggtaccagaacctattctgagaaagattgaaaccttcttgaaccattatccagtcgagagtagttggattgcacctgaattgagactgcagagtgacgatatcctgcccctggggaaggattccggacccctctctgacccaatcaccggcaaaccatacgtgcctttactggaagcggaggaggtacggctgagccagtcgctgctcgagctctggaggcggcgtggcccagtctggcaggaggccccccagcttcctgtggaccctcacagagacacaattttgaatgctatcgagcagcatcccgttgtagttatatccggcgataccgggtgcggaaagaccacccgcatcccacagttgcttctcgaacggtacgtcacagagggccgcggagcgagatgtaacgtgatcatcacacagccaaggcggatctcagctgtgtcagttgcccagcgagtgtcacatgaactggggcccagtctaaggcgaaacgtgggtttccaggtgcggcttgagtcaaagccaccgagcagggggggggctctgttgttttgtacagtgggtatcctactgaggaaactacagtccaatccctcactcgaaggagtttctcacgtgatcgtagacgaggtgcatgagcgcgacgtgaacacggattttttgctgattctgctgaaaggtctgcaacggttaaatcccgccctgcggctcgtgctaatgagcgctacaggagacaacgagcgattttcgagatatttcggagggtgtcccgtgatcaaggtccccgggtttatgtatcctgttaaagagcactatcttgaggatattctcgccaagttagggaagcaccagtatcttcacaggcatcgccatcatgagagtgaagacgaatgcgccctggatctagacctggtgaccgacctcgtgttacatattgacgctcgaggcgagcctggtggaattctttgcttcctgcctggatggcaggagataaaaggagtccagcagaggctgcaagaggccctcgggatgcacgaatcgaagtacctgatcttgcccgtgcactcgaatatccccatgatggaccaaaaggccatttttcagcaacctcccgtcggggtcaggaagatcgtgctggctaccaacatcgctgagacgagcatcactattaatgacattgtgcatgtggtggactctggactgcacaaagaggaaagatatgacctcaaaactaaggtctcttgcctggagacagtgtgggtgtcccgggctaacgtaatccagagacgcggtcgagctggtcggtgccagtccggatttgcttaccatctgtttccgcgctctcggttggagaagatggtgccattccaagtcccagagatcctcagaactcccctcgaaaacttggtgctgcaggctaaaattcacatgcccgaaaaaacagccgtggaatttctctcgaaagccgtagactccccgaatatcaaagcagttgacgaagccgtcattctgctgcaggaaattggagtgctagatcaaagggaatacttgaccacgctggggcagcggcttgcccatatcagcaccgacccgcggctcgccaaagccatcgtgcttgctgctatttttagatgtctccaccccctgctcgtcgtggtgagctgtttaaccagagacccttttagctcctctttacagaatagagcagaggttgataaggtcaaggcccttcttagtcacgattccggaagcgaccacctggcttttgtgagagccgtagcaggctgggaagaagtcctgcgctggcaggaccggagctcccgggagaactacctggaggagaatctgctgtatgctcctagcctgcgctttatccacggtctgattaaacaattcagcgagaacatttacgaagctttcctcgtcggaaagccaagcgactgcaccctggctagcgctcaatgcaacgaatattctgaggaggaggagttagtcaaaggggtgctcatggctgggctgtacccaaatctcatccaggtcaggcaggggaaggttactcgacaaggcaaatttaagcctaattcagtgacttacagaaccaaatcaggcaatatattactacataaatcgactattaatcgggaggcaacacgccttcgctccagatggctgacatacttcatggccgttaaatcaaatggcagtgtttttgttcgtgactcaagtcaagttcaccctctggcggtcctcctactcaccgacggggatgtccacattcgggatgatggacgacgagctacaattagcctgtcagactctgacctcttgcgcctggagggtgactccagaaccgttagattgctgaaagaattaagacgcgccctgggccggatggtggagaggagcctgcgatcggagctggccgcactgcccccttccgtgcaggaggagcacggccagctgctcgcacttctcgcagaactcctgaggggcccttgcgggtcttttgatgtgcgcaagacggcagacgattag

SEQ ID NO: 25996 - DNA, 762 bp, synthetic construct
  source 1..762: mol_type = other DNA; note = Synthetic coding sequence
tgagtgggcgtggaggccgcccgggtgatcgccaaggccctggagaaaaagtccgagctgaaacggtgccactggtcagacatgtttacaggaaggctgaggacagaaatacctcccgccctcatcagcctgggcgaggggctgataactgcaggagcccagctcgtagaacttgacctttccgataacgcattcggtccagatggcgtgcagggctttgaagctttgctaaaaagctctgcttgcttcacactgcaggaacttaagctgaataactgtggcatggggataggtgggggaaaggtgattggcaccctggaggaagtccacatgccacagaacggcattaaccaccctgggattaccgccctcgcacaggctttcgccgttaatccattgctccgagttatcaacctgaatgataacacgttcactgaaaagggcgcagtggccatggcggaaaccctcaaaactttgagacaggttgaggtcatcaacttcggagattgccttgtgaggagtaaaggggctgtggcaatcgccgacgcaatcagaggcggactcccaaagctgaaagaattgaacctttcattctgcgagatcaagcgggatgcggccctcgcagtggcagaggctatggcagataaagcggagctggaaaagctagaccttaatgggaacaccctgggggaagaaggatgtgagcagctccaggaagtactggagggctttaacatggctaaagtgctcgcatcactctag

SEQ ID NO: 25997 - DNA, 3735 bp, synthetic construct
  source 1..3735: mol_type = other DNA; note = Synthetic coding sequence
gacgtgggcggcgaccggccctgggacagcggcaacacccagctgccacctcggaacccggtgaaggctaatgcaatgttcggagccggtgatgaggacgacactgacttcctgagtccctcaggaggagctcgactggccagtctgtttggcctggatcaggcagcagctggacatggcaatgaattctttcaatacactgcgcctaagcagccgaaaaaaggccagggcactgccgctaccggcaatcaggcgacccccaagaccgcccccgcaaccatgtcaactccaaccattctggtggcaacagctgtgcacgcctatcgctacaccaatggacagtatgttaaacaaggaaagttcggagctgccgtgctcgggaatcatacagctagagagtaccggatcctgctatacatttcacagcagcagcctgtgacagttgcacggatccacgttaacttcgagctcatggtccggcccaacaattactctacgttctatgacgaccagcgccagaactggtccattatgtttgagtcggaaaaggccgctgtcgagttcaataagcaggtctgtatcgcaaagtgcaattcgacatccagccttgacgctgttctgtcccaagatttgatagtggccgatggaccagcagttgaagttggcgattccctagaggttgcctataccggctggcttttccagaaccacgtgctcgggcaggtttttgactctacagctaacaaagataaacttcttaggctgaagctggggagtggcaaagtgatcaagggatgggaagacgggatgctgggaatgaaaaaaggagggaagcgccttctcattgtgcctcccgcttgcgccgtagggtccgaaggggttattggatggacacaagcaacagatagtatactggtattcgaggtcgaggtgcggagggtcaaattcgccagagacagtggttctgacggacactctgtgagttccagggattccgcagcaccctcgcctatcccaggagctgataatctgagcgctgaccctgtcgtgtcacccccgacctccattcccttcaaatccggggaacctgcactccggacaaagtcgaactcattatctgagcaacttgcaatcaatacaagccccgacgctgtgaaggccaaactgatctcaaggatggccaagatgggccagccaatgcttccaatcctgcctccgcaactcgactctaacgactccgaaattgaagacgtcaacacactccagggcggcggccagcccgtggtgacccctagcgttcagcctagcctgcatccagcacatccggcccttcctcagatgacctctcaggcgccacagccatcagtcacaggcctccaggctccgagtgccgccctgatgcaagtgtccagtttggatagccactctgccgtctctggcaacgctcagtcctttcagccatacgctggcatgcaggcctatgcttatccccaggcatctgccgttacctcccaactgcagccagttcggccgctctatccggcgcctctttcccagccacctcatttccagggatctggagacatggctagctttctgatgacagaagccagacagcataataccgaaatcaggatggcagtatccaaggtagcggataaaatggatcacttgatgactaaagttgaggaactgcagaaacactctgctgggaatagcatgctgatcccctcaatgtccgtgaccatggagacttctatgattatgagtaacattcagagaattatccaagagaacgaacgtcttaagcaagaaatcctcgaaaaatctaataggattgaggagcagaacgataaaatttcagaactcatcgaaaggaatcagcgatatgttgaacagtctaaccttatgatggagaagcgaaataacagtcttcagaccgcgacagagaatacacaggccagagtgctgcatgctgagcaggagaaagccaaagtaactgaagagctggctgccgcgacagcccaggtgtcacacctgcagctgaagatgacagctcaccagaagaaggagaccgaactgcagatgcagctcacagagtcactgaaggagacagacctcttgagagggcagctgacaaaggtgcaggctaaattgtctgaacttcaggagacctccgagcaagcacaatccaaattcaaatccgagaaacagaacaggaaacaacttgaactgaaagtcacttctctggaagaagagctgacagatcttcgggtcgaaaaggagtctctggaaaagaacctctccgagcggaaaaagaagtctgcacaggagcggtctcaggcggaggaagagatagacgagatcaggaaaagctaccaggaagaactggacaagttgcggcagctgctgaagaaaacaagggtgagtactgaccaagcagcagccgaacaactgagtctcgtgcaggcggaactacagacacagtgggaagctaagtgcgaacacttgcttgcttccgctaaggatgaacaccttcagcagtaccaggaggtctgtgcccagcgcgatgcgtaccaacagaaactggttcaactgcaggagaagtgccttgcactgcaggctcagatcacggccctgactaaacagaacgagcagcacatcaaggaactggaaaagaataagtcacaaatgtctggcgtcgaggctgctgcatccgacccttcagaaaaagtgaagaaaatcatgaatcaggttttccagtccctgcgacgagaatttgagcttgaggagagttacaatggtcggaccattctcggtaccatcatgaacaccatcaagatggttacgctgcagctgctcaaccagcaagaacaagaaaaagaggagtcatcgtcagaggaagaagaggaaaaggccgaggaacgtccccggagaccctcccaggagcagtctgctagcgcatcatctggccagccccaagccccattgaatcgggagcggcccgaatctcctatggtgccttcagagcaagtggttgaagaagccgtccccctcccaccacaggcactcactacatcccaagacgggcaccgcagaaagggggacagtgaagcagaagccctttcggagattaaagacggatccctaccccccgagctttcgtgcattccaagccaccgcgtgctgggccctccgacaagtatcccacccgagcccctcggaccagtgagtatggattccgagtgcgaagagtctctcgccgcgagccctatggccgcaaaaccagacaatccttctgggaaagtgtgtgttagagaggtcgctccggacggccctctccaggagtcaagtacccgactgtcactgacgagtgacccagaggagggagatcccctggcactaggccccgaatctccaggcgagccacagcctccgcaattaaaaaaggatgatgtgacatcttcgaccgggcctcacaaggagttgtcatccaccgaggccggtagcacggtggctggagctgccctgagacccagccaccatagtcagcgctcctcactgtccggggatgaggaggacgaactgtttaaaggcgccaccctgaaagccctgcggcccaaggctcagcctgaagaggaggacgaagatgaggtaagtatgaagggtcgccctcctccgacccctctgtttggggacgatgatgacgacgatgatatagattggttgggttag

SEQ ID NO: 25998 - DNA, 1653 bp, synthetic construct
  source 1..1653: mol_type = other DNA; note = Synthetic coding sequence
atgaagtgggaggagtacgaggagctgctgcactacgccatcgtgacacccaatattgagccttgtgcctcccagtcctctcaccctaagggagagctcgtgcccgacgtccgcatatcaaccatccacgacatcctgcattcacaagggaataattcggaggtgagggaaaccgcaattgaagtcggaaagggttgtgatttccatatttcttcacactccaagactgacgagtcgagtccggttttaagcccaagaaagccttctcacccagtgatggactttttctccagccatctcctcgccgacagctcctccccagccaccaattcctcccacactgacgcccatgagattctggttagcgatttcctagtgagcgacgaaaatctgcagaaaatggaaaatgttctggacctgtggtcttccggactgaagacaaacattatatccgagctgagcaaatggcgcctcaattttatcgattggcatagaatggagatgaggaaagagaaagagaagcacgccgctcaccttaagcagctgtgcaaccagatcaatgaattgaaggagcttcagaaaactttcgaaatcagtatcggccgaaaagacgaagtcatcagttccttgagccatgcgattggaaaacagaaggagaaaatcgaactgatgcggacattttttcattggcgtatagggcatgtgcgtgcaagacaggacgtgtacgaaggcaagttagcggaccagtactaccaacgcactctccttaaaaaggtgtggaaagtgtggcgcagcgtcgttcagaaacagtggaaggacgtcgtagagagagcttgtcaggcccgcgccgaggaagtctgcatccagatttccaatgactacgaggccaaagtcgcgatgttgtccggcgccctcgaaaatgcgaaagcagagatccagaggatgcagcacgagaaggaacacttcgaagactctatgaaaaaagcgttcatgagaggcgtctgcgcacttaacttagaagctatgaccatcttccagaatagaaacgacgctggtatcgacagtactaataataagaaggaggagtacggtccaggtgtccagggtaaagagcatagcgcccacctcgatccctcagctccaccaatgccactgcctgtaactagcccactactcccaagtccacctgccgctgtgggcggcgcctctgccacagccgtgccaagcgcagcgtcaatgacaagcacccgagcagcttccgcatcatctgtgcatgttcccgtgagcgcgttgggcgcggggtcggccgccaccgccgcttccgaagaaatgtacgtgccaagggtggtgacttcagcgcagcaaaaggccggcaggacgataacagctcgcatcactggccgctgcgactttgccagcaaaaaccgtatctcctcttctctcgccataatgggcgtttctccacccatgtcttcagtcgtggtggagaagcaccatcctgtgactgtccagacaataccccaggctactgcagccaagtaccctaggaccatccatccagaaagttctacgagtgccagcagaagcttaggcacacggagcgcccatacccagagcctgacatcagtccatagcattaaggttgtagactag

SEQ ID NO: 25999 - DNA, 402 bp, synthetic construct
  source 1..402: mol_type = other DNA; note = Synthetic coding sequence
atgagccccagccagatgatcatgcccaacgtgatggagatgatcgcggcactcggccccggtccatccccataccctctgcctcctcctccaggaggaacgaacagtaatgattatagcagccagggcaataactaccaagggcatgggaatttcgactttcctcatgggaacccaggcggaacaagtatgaatgacttcatgcatggcccgccacagctctcccacccaccggacatgccgaacaacatggctgcgctggaaaaacccctgagccacccgatgcaggagaccttactgccggaactgaccaatcctgatgagttgctctcctacctcgatccccctgatctgcccagcaacagtaacgacgatctgctctccttatttgagaataactag

SEQ ID NO: 26000 - DNA, 1473 bp, synthetic construct
  source 1..1473: mol_type = other DNA; note = Synthetic coding sequence
atgagcagctgcgtgagcagccagcccagcagcaaccgggccgccccacaggatgagctcggcgggagaggatcttcatcttctgaaagtcagaagccatgcgaggcgctgcgtgggctttcgtcgctgagcattcatttgggcatggaaagtttcatcgtggtaactgagtgtgagcccggctgtgccgtcgatctaggcctcgcccgtgaccgtcctcttgaggcggatggacaagaagtccctctggacacctctggctctcaggccaggcctcacttgtctggccggaaattgtctctccaggagcgcagccagggcggcctcgccgcaggcggcagtttagatatgaatggccgttgtatatgtccttccttgccttactcacctgtgagctccccccagtctagccctcggcttcctcgacgccctactgttgaatcccaccacgtgtctataacaggcatgcaagattgtgttcagttgaatcagtacacactgaaggacgaaatcggcaagggctcctacggtgtagtaaagctggcctataatgagaatgacaatacttactacgcaatgaaagttcttagcaagaaaaagcttatcagacaggccgggtttccccgaagaccacctcccagaggaacccgacccgccccagggggctgtattcagcctagaggtccgatcgagcaggtgtatcaggaaatcgccattctgaagaaactcgaccatcctaacgttgtgaaactggttgaggtcctggacgatcccaacgaggaccacctctatatggtgtttgagcttgttaaccaggggcccgtcatggaagtacctacgctgaagcctttgagtgaagaccaggctcgcttttactttcaagacctgatcaaagggattgaatacctgcattaccagaagataatccacagagacatcaaaccatctaacctattggttggcgaggatgggcacatcaaaatcgcagactttggcgtgagcaacgagtttaaaggatccgacgctttactttccaacaccgtgggaacgccagcatttatggctcctgagtcactttcagaaacaaggaagatattttctgggaaggccctcgacgtgtgggcaatgggggtaacattatactgcttcgtgttcgggcagtgtccctttatggacgagagaatcatgtgtctccattccaaaatcaaaagtcaagccttggaatttcccgaccagcccgatatcgcggaggatctcaaggacctgattacacgtatgcttgacaagaacccagagagccgaattgtagtgccagagataaaaatcctggtgaagacgatgattcgcaagcgtagtttcggtaacccattcgaagggagtcgccgcgaggaaaggtccctgtctgcaccaggaaacctgttgactaaaaaacccacccgggagtgcgagtctctatcagagcttaaaacttag

SEQ ID NO: 26001 - DNA, 1872 bp, synthetic construct
  source 1..1872: mol_type = other DNA; note = Synthetic coding sequence
atggccgccgccaccggcgaccccggcctgagcaagctgcagttcgccccattttcatccgctctcgatgtgggcttctggcatgagctgacgcagaagaaactaaacgagtaccgtctcgatgaggcacctaaggacattaagggctactattataacggagactcagccggcctgccggcacgcctaacgcttgagttttccgccttcgatatgagtgctcccacgccggctaggtgttgtcccgctatcgggacactctataataccaacaccctggagagcttcaaaacagctgataagaagctactcctggagcaggcagcaaatgagatctgggaatccataaaatccggtacagctctggaaaatccagttttactgaacaagttcctgctgctcacttttgctatcgaggctttggagtgcgcctacgataacctgtgtcagaccgagggagtaaccgccctgccctactttttgattaaatacgatgagaatatggtgctcgtatctctcctgaaacactacagtgatttttttcagggccagagaactaaaataacgattggagtgtacgatccttgtaacctggcccagtatccaggatggccattacgcaacttcctcgtcctcgctgcacataggtggagttctagctttcagtcagtggaggtagtttgcttcagagataggactatgcagggagcccgggacgtcgctcattccattattttcgaggtgaaattgcccgagatggccttctcccctgattgcccaaaggctgtgggttgggaaaagaaccagaaaggcggaatggggcccagaatggtgaacctgtccgaatgtatggatcctaaacgcctggctgagtcgtctgtggacctcaatctgaagctgatgtgctggcggctggtgccaacgctcgaccttgataaagtggtgtctgtcaagtgcctgttgctgggcgccggcacacttggttgtaatgtcgcgagaacactgatgggctggggcgtgcgccacatcactttcgtcgacaatgccaaaatctcatattctaatcctgtccggcagcctctttacgagtttgaagattgcctgggaggcggtaaacccaaggccttggctgccgccgacagactccagaagatttttcccggagtcaacgcgcgaggcttcaatatgtccatcccaatgcctgggcaccccgtgaacttctcaagtgtgaccctggagcaggcccgaagggatgtcgaacaattggagcagctcatcgaaagtcatgacgtggtctttttattaatggacactagagagagcaggtggcttcccgcggttattgccgccagtaaacggaagctcgtcatcaacgcagccctcggctttgataccttcgtagtgatgcgtcacggtttgaagaagccaaagcagcagggagccggagacctttgcccgaatcacccagttgcttcagcagacctactcggcagcagtttgttcgccaacattcccggttataaactaggatgttatttttgtaacgacgtcgtagcccccggggactctacaagagaccgtacgctggaccagcagtgcaccgtttccaggccaggcctggcagttatcgccggggctttggctgtagagcttatggtatccgtgctccaacaccccgagggtggttacgcgattgccagctcgagtgacgatcgaatgaatgagcctccaacatctctggggctagtgcctcaccaaatccgcgggtttcttagccggtttgacaacgtcctgccagtaagtcttgcgttcgacaaatgtacagcatgcagctcaaaaatatgggatatgtccgatgatgagacaatttag

SEQ ID NO: 26002 - DNA, 966 bp, synthetic construct
  source 1..966: mol_type = other DNA; note = Synthetic coding sequence
cggcggaacgtggagctgatcaacgaggaggccgccatgttcgacagtctgttgatggactcgtacgtgtccagcacgacaggggagtctgtcatcaccagggagatggtagaaatgctcttttctgatgattccgacttacagctggcaaccacccagaagtttaggaaattgctgtccaaggagcccagcccaccgatcgatgaggtaattaatacccccagagttgtggacaggttcgttgaatttctgaagcgcaacgagaattgtactctccaggccgtctgggccctgggaaatatcgccggcgacagcagcgtttgtagagactatgtgctgaattgctcaatcctgaacccgttgttaaccttgctgaccaaaagcacacgccttaccatgacccgcaacgccgtgtgggcattatcaaatctctgtagaggcaagaatccacctcccgagtttgcaaaggtgtccccctgtctgcctgtactgtctcgcttactgtttagctccgattctgacctgctggccgacgcctgttgggctctgtcatatctgtctgacggccccaacgagaaaattcaggccgtgatcgactctggagtgtgtaggaggctggtagaactcctcatgcacaacgactataaagtagcctcccccgcactgcgcgcggtcggcaacatagtgacaggtgatgatattcagacccaggtgattctcaactgttccgcactcccttgcctccttcacctgctctcctccccgaaggagtctattcgcaaagaagcttgttggacaatctcaaatatcacagcagggaacagggcccagatccaggccgtgattgacgccaatattttcccagtgctgatcgagatcctgcagaaggctgaatttcgaacccgaaaggaagcagcctgggcgattacaaacgcgacttccgggggtacacctgagcagatttag

SEQ ID NO: 26003 - DNA, 795 bp, synthetic construct
  source 1..795: mol_type = other DNA; note = Synthetic coding sequence
atgggcggcgcccagctggagctgcccagcggcgcccggcccggcgtgtgcgtccgaaggtcctttcgggctcacgcgggtgaccaacccaggcggcctcccgggcccattcctgtcccaggcacaatgaagcaggagtcagccgcgcctaacactccgccaacctctcaaagcccgactccctctgcacagtttcccagaaacgatggcgacccccaggctctatggatttttggttatgggtcccttgtctggcgccctgattttgcctactcagactcgagagtgggattcgtgagagggtactctaggagattttggcaaggagacacattccatcgaggaagcgacaagatgcctggacgggtggtgactctgctggaggatcatgagggctgcacatggggcgtcgcgtatcaggtacagggcgaacaagtgtctaaagctcttaagtatctcaacgtcagagaggccgtccttggcggttacgatacaaaagaggttaccttctacccgcaagacgctcccgatcagccattgaaagccctggcgtacgtggcaactcctcaaaatcccggttatctgggccctgcacctgaggaggctatcgctacacagatcctcgcttgtcgcggcttctccggtcataaccttgagtacctgctaagattggccgactttatgcagctgtgcggtcctcaggctcaggacgaacacttggctgccattgtggacgcagtggggaccatgctcccatgcttttgtccgactgaacaggccctcgccctggtttag

SEQ ID NO: 26004 - DNA, 747 bp, synthetic construct
  source 1..747: mol_type = other DNA; note = Synthetic coding sequence
atggccaccagcgcccccctgcggagcctggaggaggaggtgacctgtagtatatgtctcgactacctgagagaccctgtaactattgactgtgggcacgtcttctgcagatcctgtacaaccgacgtcaggcctattagtggaagccggccggtttgtcctctatgtaaaaagccctttaaaaaggaaaacattcgtcccgtgtggcaactagcttcccttgtagagaacatcgagaggctgaaagtagacaagggaagacaacctggggaggtgacccgagagcaacaggatgctaaattatgcgagcgccaccgagaaaagttgcactactactgcgaggatgatggtaagctcctgtgtgtgatgtgcagagaatcaagagaacaccgccctcatactgccgtcctcatggaaaaagccgcccagccccatcgagaaaaaatccttaaccatctttctacgctgcgtagagaccgggacaagatccagggcttccaagcgaaaggggaagccgacatcctggccgccctgaagaaattgcaggaccaacgccagtatattgtcgcagaattcgaacaaggacaccagttcttacgcgagagggaggagcacttgcttgaacaattggcaaagctggaacaggaactgactgagggaagggagaaattcaaatctaggggagtaggggaactggccaggctcgcccttgtcattagcgaattggaagggaaagctcagcagtag

SEQ ID NO: 26005 - DNA, 768 bp, synthetic construct
  source 1..768: mol_type = other DNA; note = Synthetic coding sequence
atgagcagcagcatgtggtacatcatgcagagcatccagagcaagtattcgttgtccgagcgactcattaggactatcgccgccatccgttcctttccgcacgataatgtcgaggaccttattcgcgggggagcagatgtcaactgtactcacggcaccctgaaacccctccattgtgcatgcatggtatcagatgcggactgtgtggaactgctcttggagaaaggtgctgaggtgaacgcactggacgggtacaacaggactgccctccactacgcagccgagaaagatgaggcctgtgtggaggtacttttggagtacggcgccaatccaaacgctctggactacaataacgacaccccactgtcttgggccgccatgaagggcaacctcgagtccgtgtcaatcttgctggactacggtgcagaggtgagagtgattaacctgatcggccagaccccaataagtcgcctggtggctctgcttgtgcgtggactcggtacagaaaaagaggactcttgctttgagctcctgcatagggctgtaggccacttcgaactgagaaagaacggtactatgcctagggaagtagcgcgggatccacagctatgcgaaaaactgactgtgctgtgctcagctcccggtacgttgaaaacacttgcccgttacgccgtgaggagatcattgggcctgcagtacttgccggacgccgtgaagggtctccccctgccagccagcctcaaggagtacctgttgctcctcgagtag

SEQ ID NO: 26006 - DNA, 585 bp, synthetic construct
  source 1..585: mol_type = other DNA; note = Synthetic coding sequence
gagcccgtgcagccccactggttctactgcaaggaggtggagtacaagcaactctggatgccattcagcgtgtttgactcactcaatctggaggagatctacaatagcgtgcaacccgacccagaatcagtggtgttaggaacagatggaggacgctatgacgtttacttatacgatcggatacggaaagccgcatactgggaggaagagcccgccgaggtgagaaggtgcacctggttctacaagggagataccgactccagattcatcccatatacggaggaattttcggagaaactggaagtgatagtacagtttcagccttcttccgtccctgatgagtggggcaccacacaggacggccagacccggcctcgcgtagtgaagagaggtattgatgacaatttagacgagattccagatggagagatgccacaggtggatcatctggtcttcgtggttcatggaattgggcccgtgtgtgatctgcggttccggtctatcatcgagtgtgttgacgacttcagggtggtctctttaaagcttctgcgaacacactttaaaaaaagtctggatgatggctag

SEQ ID NO: 26007 - DNA, 981 bp, synthetic construct
  source 1..981: mol_type = other DNA; note = Synthetic coding sequence
atgccccacctgcccctggccagcttccggccccccttctggggcctacgccactctcgggggttgccacggttccactctgtgagtactcaaagtgaaccccacggcagcccaataagtaggaggaatcgtgaagccaaacagaagcgcctgagagaaaaacaagctacattagaagcggagatcgccggggagagcaagtctccagccgaatccataaaggcctggcgtccaaaggaactcgtgctgtatgaaatccccaccaaacccggcgaaaaaaaggatgtctccgggccacttcctccagcttactctccaaggtatgtggaggccgcatggtatccctggtgggtgagggaaggctttttcaagcccgaatatcaagcaaggcttccgcaggcaacaggagagacgttttccatgtgcataccccctcccaatgtgactggctctctgcacataggccacgccctgactgtggccattcaggacgcactagtccggtggcaccgcatgcgaggggatcaggttctctgggtgccaggcagtgatcatgctggcattgccactcaggccgtggtggaaaaacagctgtggaaagagcgaggcgtacggcgtcacgaactgtcaagagaagccttcctgcgagaagtgtggcagtggaaagaggctaagggaggcgagatttgtgaacagctgcgggccttaggcgcatcattggactgggatcgcgagtgttttacaatggacgtcgggagcagcgttgccgtaactgaagcattcgtccggctgtacaaggccgggctcctgtatagaaatcatcagctggtgaattggtcctgtgcgctccggagcgcaatctctgacatcgaagttgagaacaggcctctgccaggccacactcaactgaggctgcctggatgccctacaccggtgtctttcgggctgttgttctcagtggcctttcctgtcgatggctag

SEQ ID NO: 26008 - DNA, 990 bp, synthetic construct
  source 1..990: mol_type = other DNA; note = Synthetic coding sequence
atggccggcgccctggagggcgacatcttcatcggccccaaggccgaggagcaccgaggcttgctgagcatacgatatcccatggagcacggcatagttaaagactggaacgacatggagcgcatctggcagtatgtctacagcaaagatcaactgcagacattttcagaagagcaccctgtgctgttgacagaagcccctcttaatccaaggaagaaccgggaaagagccgccgaggtattcttcgaaacattcaatgtccctgccctctttatctcgatgcaggccgtgttatcattgtatgctaccggccgcactaccggtgtggtccttgattctggtgacggtgtgacgcatgccgtgcccatttacgaaggcttcgctatgcctcactcaattatgaggatagacatcgccggccgcgacgtgagccgctttctccggctgtacctgcgcaaggagggctatgactttcactcaagtagtgaatttgaaattgtcaaggcaatcaaggaaagggcatgttacctctctataaatccccagaaagatgaaactctggaaaccgaaaaagctcagtattatctgccagatgggtccacaatcgaaataggcccaagccgttttcgggcaccggaactgctttttagacctgatctgattggcgaggaatccgagggaattcatgaagtgttagtttttgccatacagaagagcgacatggatctgaggaggaccctcttcagcaatattgtactcagtggggggagcacactgtttaagggatttggggacaggctgctttcagaagtcaagaagttagctcccaaggatgtcaaaattcggataagcgcgcctcaggaaagattgtactcgacatggatcggaggcagtattctcgcctctttagacacctttaagaaaatgtgggtgagcaaaaaggagtacgaggaagacggtgctcgtagcattcaccggaagacattctag

SEQ ID NO: 26009 - DNA, 450 bp, synthetic construct
  source 1..450: mol_type = other DNA; note = Synthetic coding sequence
atggagaagaccgagctgatccagaaggccaagctggccgagcaggctgaacgctatgatgacatggccacgtgtatgaaagccgtaaccgagcagggagcagagctgtctaatgaggagaggaacttgctgagtgtagcatacaaaaacgtagtgggtggccgacgttccgcttggcgggtaattagttccatagaacagaaaacagatacttcagacaagaagctgcagctcatcaaggattaccgcgagaaagttgagtcagagctgcggtccatttgtactacagtcctcgaactgctggataaatacctgatcgccaatgcgaccaaccccgagtccaaggtcttctatctgaagatgaagggagattacttcaggtacctggccgaggttgcctgtggggatgacagaaaacagaccattgataattctcagggcgcctactag

SEQ ID NO: 26010 - DNA, 735 bp, synthetic construct
  source 1..735: mol_type = other DNA; note = Synthetic coding sequence
atgctgagcgaccggaagcgggagctggagcaccggctgagcgccactctggaagagaacgatctgctccaggggaccgtagaggagttacaggacagagtgctaatcctggaaaggcaggggcacgataaagatcttcagcttcaccagagccagctggaattacaggaggtgcgccttagttgtcgccagctacaagtgaaggtggaagagcttacagaagaacggtccctgcagagctcagccgcaacctcgactagcctgcttagcgagattgagcaatctatggaagcggaggagcttgagcaggaaagagaacaggtcacccttctaagcgtggagatgacagcactgaaagaagagagagatcggctgcgcgttaccagtgaggacaaagaacctaaggaacagttgcagaaagctatccgagatcgtgatgaagctattgccaaaaagaatgccgtagaattagagttagccaaatgccggatggacatgatgtccctgaattctcagctacttgatgccatccagcagaaactgaacctctcccagcagctggaagcttggcaagacgatatgcaccgtgtgatagacagacaactgatggatacacacctgaaggaacggtcccagcctgcggccgctctctgccgtgggcatagcgccggcaggggggacgaacctagtatcgcagagggaaaaagacttttcagtttcttcaggaaaatctag

SEQ ID NO: 26011 - DNA, 603 bp, synthetic construct
  source 1..603: mol_type = other DNA; note = Synthetic coding sequence
tgacacatgctgagcaaggtgggcatgtgggacttcgacatcttcctttttgatcggctcaccaacgggaacagcctggttacactgctgtgccatctgtttaacactcacggtctaatccaccacttcaagttggacatggtaacacttcaccgctttctggtgatggtacaagaagactaccactcacagaatccgtaccacaacgcagtgcatgccgccgacgtaacacaggccatgcactgttatctaaaagaaccaaaacttgcaagttttctgacacctctggatataatgctaggactccttgctgcagcagcgcacgacgtggaccacccaggggtgaatcagccctttctgataaagaccaatcatcacttggccaacctgtaccaagtcagggagcctaatctggagcccgccactgtatggtccatagcattgggacccgtgctcaagcctgaatcttgtccctggcggaagccttgcttccgcgtgctggaggtccagcgccgcatgaagcataacctatgtccccagaagttcgttcagacacagatgctcaaaatgtcgaaaatccaagccaatcttataccggtgtag

SEQ ID NO: 26012 - DNA, 1728 bp, synthetic construct
  source 1..1728: mol_type = other DNA; note = Synthetic coding sequence
atggccatggcccccagccccagcctggtgcaggtgtacaccagccctgcagcggtggccgtctgggagtggcaagacggtttgggaacgtggcatccttactccgctacagtgtgcagttttatcgaacaacagtttgtccagcagaaaggtcagagatttggcctagggagcctggcccactctataccccttggacaggccgatcctagtctggccccttatatcatcgatttgcccagctggacccagttcaggcaggatactggcacaatgcgtgctgtacggcggcatctctttccacagcactccgcacctggtcggggcgtcgtttgggaatggctcagtgacgacggctcctggacagcctacgaagccagtgtctgcgactatctggaacaacaggtggctcgcgggaaccagctggtagatctggccccactgggctacaattacaccgttaattatacgacccatacccaaaccaacaagacctctagtttctgccggtctgtccggaggcaagcgggacccccgtatcctgtgaccacaatcatcgctcccccgggccacacaggcgtggcgtgtagttgtcatcaatgtctcagtggtagtcgaacgggtcccgtgagcgggcgctaccgacattcgatgacaaatcttccggcctacccggtcccccagcatccccctcacaggacagccagtgtgttcgggacacatcaagcattcgcaccatacaataagcccagtctgtccggggcgaggagcgcaccaagactgaacacaacgaacgcttggggtgccgctccaccctccctgggatcccaacctctatatcgaagtagcttgagccaccttggccctcagcaccttccccctgggtcttccacaagcggagccgtgtctgcctcgctgccgtctgggcctagctcatcacctggcagtgtgccggccaccgtccctatgcagatgccaaagccctctcgagtgcagcaggccctagccggggccacgccaaagcctgaaccggagcctgagcaagtaatcaagaattacacggaggagctcaaagtgccccccgacgaagactgcattatctgtatggagaaactgtcaaccgccagcgggtactctgatgttactgactcaaaggccattggatctctggccgttgggcacctgaccaagtgcagccacgccttccatctcctttgcctgctggcaatgtactgcaacggcaataaagacggtagcctgcaatgcccttcctgcaagacaatttacggcgaaaaaacaggcacacagccacaaggaaagatggaggtgttgcggttccaaatgtccttgccaggacacgaagattgcggcactattttgatcgtgtactccattccgcacggcatacagggaccagagcatccaaaccccggcaaacccttcactgctcgtgggttcccacgacagtgctatttgcctgataatgcacagggacgaaaggttcttgaacttctgaaggttgcctggaagcggagacttattttcactgttgggacctcttctaccaccggcgagacggacactgtcgtctggaacgaaatacaccataagaccgaaatggatcgcaatatcaccggccacggttacccggatcctaactatctccaaaacgtactggctgagctggccgcacagggtgtaactgaagactgtttagagcagcaatag

SEQ ID NO: 26013 - DNA, 3036 bp, synthetic construct
  source 1..3036: mol_type = other DNA; note = Synthetic coding sequence
atggtgagcagcgaccggcccgtgagcctggaggacgaggtgagccattctatgaaagagatgattggagggtgttgcgtgtgcagcgacgagcggggttgggcggagaacccattagtctattgcgacggccacggctgttccgtggccgtgcatcaggcctgctacggcatagtacaggttcccacgggcccttggttctgccgcaaatgcgaaagccaggagcgtgccgccagggtgcggtgcgagctgtgtccccacaaggatggggctctgaagagaacagacaacggtggctgggcccatgtggtctgtgctctgtacattccagaagtccagttcgccaacgtttctactatggagcccatcgttctgcagagcgtgcctcacgacagatacaacaagacctgctacatttgtgatgagcaggggcgggaatctaaagcagcaaccggagcatgcatgacttgcaacaagcacggatgcaggcaggccttccacgtcacatgtgcacagtttgctggcctcctttgcgaggaggagggaaacggggccgacaatgtgcagtattgcggatactgcaaataccacttctcaaagctaaagaagtccaaacgaggtagtaatcgtagctatgaccagagcctctccgactcctcttctcactctcaagataaacaccatgagaaagaaaagaagaaatataaggaaaaggacaaacacaaacagaaacacaaaaagcaacccgaacctagtccggctctagtcccctcactgactgtcactactgaaaagacctatacctctacctccaataactcaatctcgggttctctaaagagattggaggatacgactgcccggttcacgaatgctaatttccaggaggtctctgctcacacctcaagcgggaaggacgttagcgagactaggggctccgagggtaaaggaaaaaaatcttctgctcatagcagcgggcagagagggcgcaaacccggtggaggccgcaatcctggtaccaccgtttccgctgcttcccccttccctcagggatcgttcagcggcacccctgggtctgttaaaagcagttctggtagcagtgtacagtcccctcaggacttcctgagcttcaccgatagcgacctgcggaatgatagctattcacatagccaacagtcctccgcaacaaaagatgtgcacaagggagagagcggaagtcaggaagggggagtcaatagcttttctaccctgataggactgccatcaacgtcggccgtcacctcccaacctaaaagttttgagaattcacctggcgaccttgggaatagttcattgccaactgctggctataagagagcccagacatccgggattgaagaagaaactgtcaaggaaaaaaaacgcaagggcaataagcaatcgaaacacggtcccggtagaccgaagggaaataaaaatcaggagaacgtctcacatctcagcgtgagtagcgcatccccaacatcctcagtagcctccgctgcgggttccatcacgagcagctcgctgcagaagtcacccaccctccttcggaacggctctctgcagtccttgtctgtcggctctagtcctgtaggctctgagatcagtatgcagtacagacatgatggggcttgccctactacaacattctcagagctgctgaatgctatccataatggcatttacaacagtaacgacgtagcagtgagcttcccgaatgtggtgagcggatccggatcctctacaccagtaagcagctctcacctcccccagcagtccagtgggcacctgcagcaggtgggcgccttatctcctagtgcggtttcttccgctgcccctgccgtggctactacacaggctaacacgctgtcgggttcttctctgagccaggcaccaagtcatatgtacgggaaccggtctaactccagtatggcagccctgattgctcaaagtgagaataaccagacggaccaggatctcggcgataacagtcggaatctcgtcggccgcggctcttcccctagaggttctttgagtccgaggagccctgtttctagcctgcagattcgctacgatcaaccagggaattcctctctggagaatctcccaccggtggccgcaagcatcgaacagcttctggagcgccagtggtcggagggccagcagttcctgttagaacagggcacaccttccgatattcttgggatgttaaaatccctgcatcagctccaggtggagaacaggcgcctggaggagcagatcaaaaacttaactgctaagaaggaacggctgcagctgctcaatgctcagctgtctgtgccgtttccgacaatcaccgccaatcccagcccttcccatcaaatccacacctttagcgcacagacggcccccactaccgattccctgaacagctcaaagtccccccacatcgggaattctttcctaccagataacagtctgccagtgctcaaccaggatcttaccagcagtggacagagcacatctagtagttcggccctctctactcccccacctgccggtcagtcgccggctcagcaaggaagtggcgtgagcggtgtgcagcaggtaaatggagttactgttggggctctggcatcaggaatgcaacctgtaacctctacaattcctgcagtcagcgctgtgggaggaatcatcggggctctcccaggcaatcagcttgccatcaatggtatcgttggtgctctaaatggagtcatgcagactccagtcactatgtctcagaacccaacccccctgacacacacaaccgtccctcccaatgcgacacaccctatgcctgccaccctgacgaattccgcatcagggctgggcctgctttctgaccagcagcgccagatcctgatacatcaacagcagtttcagcagctgcttaatagtcagcagctcacacctgtacataggcatccgcacttcacccaacttccccccacgcacttcagcccaagtatggagattatgcaggtgcggaaatag

SEQ ID NO: 26014 - DNA, 3786 bp, synthetic construct
  source 1..3786: mol_type = other DNA; note = Synthetic coding sequence
atggccgccgccgccgccagcggcgccggcggcgccgccggcgccggtaccgggggcgcaggtcccgcaggacgcctcttgccaccacccgccccaggctcccctgccgcccctgccgccgtgtcccctgcagctggacaacctcgacccccagctcccgctagcagaggacctatgcccgcaagaatcggctactacgagatcgatagaacaatagggaaaggaaacttcgccgtcgttaaaagggccacccatttggtcaccaaagccaaggttgctatcaaaatcatcgataaaactcagctggacgaagaaaacttgaagaagatcttccgggaggttcaaattatgaaaatgctctgccatccacacatcattcgcctctatcaggttatggagactgaacgaatgatttatttagtgacggagtacgcgagtggcggagagatcttcgaccacctggtggcacacgggagaatggccgagaaagaggcacggcggaagtttaaacaaatcgttacggcagtgtatttctgtcactgtaggaacatcgtccacagggatctgaaggctgagaatctcctattagacgctaatttgaatatcaaaatcgccgatttcggcttcagtaatctgttcaccccaggacagctgctgaagacctggtgtggctcccctccttacgctgccccagaactgtttgagggaaaggagtatgacggaccaaaagtagatatctggtcccttggagtcgtcctgtatgtgttggtctgcggggctctgccatttgatggttccacactgcagaatcttcgtgcaagggttctgtccggtaaattcaggattccttttttcatgagtaccgaatgtgaacaccttattcggcacatgctggtcctcgatccaaataaaaggctgagtatggaacagatttgtaaacacaaatggatgaaactgggggacgcagaccccaactttgataggctaattgctgaatgtcagcaactgaaggaagagaggcaggtcgacccactaaatgaagacgtgcttcttgccatggaagacatgggcctagataaagagcagactttgcaggctgaacaggctggaacggccatgaacatttctgtcccgcaggtccagttaatcaatccagaaaatcaaatcgtcgaacccgacggcacactgaatctggattccgatgaaggagaagaaccgtcccctgaagctctggtcaggtacctgtcgatgcgccgacacacggtcggagtcgccgacccgagaactgaagtgatggaagatcttcagaagctgctcccgggattccccggcgttaacccgcaggccccttttctgcaggttgcccctaatgtgaactttatgcacaacctgttgcctatgcaaaatttacagccaacaggccagttggagtacaaggaacagagcctgcttcagcctcccacacttcagctcttaaatgggatggggccacttggacgtagagcgagcgatggtggggccaatatccagcttcatgcccagcagttacttaagaggcctcgaggaccatcacctctcgtgacaatgacaccggctgtgcccgccgtcacccctgtggacgaagaaagctccgatggggaacccgatcaagaggcagttcagaggtatctcgccaaccgctcaaaacggcacacattggccatgacaaacccaacagcagaaatcccaccagatctgcagaggcagctaggacagcagccgtttaggtcccgagtttggcccccacaccttgtaccagaccagcatagatctacatacaaagactcaaatacccttcatctgcccaccgaacgcttcagccccgttaggcggttctccgacggagccgcatccattcaggcgtttaaggcccaccttgagaaaatgggcaataattcctcgatcaaacaactgcagcaggaatgcgaacagttgcaaaagatgtatggaggccagatagatgaaaggactttagaaaaaactcagcagcagcatatgctctatcagcaggaacaacaccaccaaattcttcagcagcagatccaggactccatttgccctccacaaccatcgcctcctctacaggctgcatgcgagaaccagccagcgttgctcactcatcaacttcagagactcagaattcagccctcaagccccccccctaaccacccaaacaaccacctatttcgacagcccagcaacagcccaccgccaatgtctagcgcaatgattcaacctcacggagcagcctcctctagccagtttcagggacttccatcgcggagcgctatcttccagcagcagcctgagaactgctcttccccccccaatgtggccctgacctgtttgggaatgcagcagccagcccagagccagcaggtcaccattcaggttcaggaacccgtcgacatgctgtctaacatgcccggcactgcagctggcagtagcggccgcggtatctctatcagcccctccgccggtcagatgcagatgcagcatagaacaaacctcatggccaccctcagttatggccatagacctctgtcaaagcaactatcggcggactctgcagaagctcatagcgcacaccaacagccaccccactatactaccagcgcccttcagcaagctctgctaagccccacacccccagactatactaggcaccagcaggtgccacatatcctgcagggcttgctgtcgcctcgtcattctttaactggtcactcagacattcgtctcccacccactgagtttgctcagctgatcaagcggcaacagcaacagcgccagcagcaacagcagcaacaacagcaacaggaataccaggagctgtttaggcatatgaaccaaggtgacgcagggtcactcgcaccgagccttggaggccagagtatgactgagaggcaggctctctcttatcagaatgccgatagctaccaccatcatactagcccacaacaccttctgcaaattagagctcaggagtgcgtgtcacaggcttcttcacccacccctccccacgggtacgcccaccagcccgccctgatgcattccgagtccatggaggaagactgctcctgcgagggcgcgaaggatgggtttcaggactctaaatcttctagcacactcaccaaggggtgccatgatagtccgcttttactatcaaccggcgggcccggggatccagaatccctgctaggcaccgtgagccatgcccaggagttagggatccacccctatggtcaccaaccaacagcagcctttagtaaaaacaaagtgccctccagagagcccgtaattggtaactgcatggaccgcagcagccccggccaagctgtggaactcccagatcataatggcctgggataccccgcccgcccatcggttcatgaacaccatcgccccagggcactccagcgccaccatacaatccagaactccgacgacgcctatgtgcagttagataatctacccgggatgtctctcgtggcaggcaaggctctctcaagcgccaggatgagcgacgctgtgctttctcagagttctctcatgggtagccagcagtttcaggatggggaaaacgaagagtgcggtgcctccctgggcgggcatgaacatccggacttatctgatggaagtcagcacttgaacagcagttgttacccttcgacatgcattacagacatcctgctgtcttacaagcatcccgaggtgagcttttctatggagcaggccggcgtgtag

SEQ ID NO: 26015 - DNA, 519 bp, synthetic construct
  source 1..519: mol_type = other DNA; note = Synthetic coding sequence
atgagcagcaacgagtgcttcaagtgcggccggagcggccactgggctagggagtgccctactggaggggggagaggcaggggcatgcgctcacgaggccgcgggtttcagttcgtctcatcatctctgcccgatatttgttaccggtgcggagaatccgggcacttggctaaggattgtgacctccaggaggacgtggaggcatgctacaactgtggccgtgggggccatatcgccaaggactgcaaggaacccaagagagagcgggaacagtgctgttataattgcggcaagcccgggcacctcgccagagattgtgaccatgccgatgagcagaagtgttatagctgtggcgagtttggtcacattcaaaaagactgtaccaaggtgaagtgttaccggtgcggagagacaggccacgtagcaatcaattgctctaaaacttccgaagtcaactgctaccggtgcggtgagtctggtcatctcgctagagaatgcactatcgaggccactgcctag

SEQ ID NO: 26016 - DNA, 471 bp, synthetic construct
  source 1..471: mol_type = other DNA; note = Synthetic coding sequence
atgctggccgagaagctgcccaacctgacccacctgaacctgagcgggaacaaactgaaagacatctctacgttggaacctctgaagaagctcgaatgcctgaagtccctggacctgttcaattgcgaggtgactaatctgaatgactacagggaatcagtgtttaaactattaccccagctgacttatcttgatggctacgacagggaggaccaagaagcgcctgatagtgatgccgaagtggatggcgtcgatgaggaagaagaagatgaagagggtgaagatgaggaggacgaagacgacgaggatggggaagaggaggagttcgacgaggaggacgatgaggacgaggacgtcgagggagacgaagatgacgacgaggtcagcgaggaagaggaggagttcgggctcgacgaagaagacgaagacgaggatgaggatgaggaagaagaagaggggggtaaaggttag

SEQ ID NO: 26017 - DNA, 516 bp, synthetic construct
  source 1..516: mol_type = other DNA; note = Synthetic coding sequence
atgagcagcggcaacgccaagatcggccaccccgcccccaacttcaaggctactgctgtaatgccagatggccagtttaaggatatcagtttgtctgattataagggaaagtacgtggtcttttttttttaccccctggactttacatttgtctgtcccactgagatcatagcattctctgaccgcgcagaagaattcaaaaaactcaactgtcaggtgatcggggcctctgtggacagccacttttgccacttggcgtgggtgaataccccaaaaaaacaggggggcttgggcccaatgaatattccacttgtgtccgatccgaaaaggaccattgcccaggattatggcgtgctgaaagcagatgagggaatctcttttagggggctattcatcatcgatgataaaggaattctgcgacagatcaccgttaatgacctacctgtggggaggagcgtcgatgagacattgcggctggtccaggcctttcagtttactgacaagcacggcgagtag

SEQ ID NO: 26018 - DNA, 111 bp, synthetic construct
  source 1..111: mol_type = other DNA; note = Synthetic coding sequence
atgatcgagaagatgcagggcagccggatggacgagcagcggtgctcattccctcctcctttaaagaccgaagaggactatattccctacccaagtgtgcatgaagtgtag

SEQ ID NO: 26019 - DNA, 639 bp, synthetic construct
  source 1..639: mol_type = other DNA; note = Synthetic coding sequence
atgagcagcaagggcagcagcaccgacggccggaccgacctggccaatggctcactcagcagctctcccgaagaaatgtccggcgctgaagaggggcgggaaacatccagcggcatcgaggtggaagccagcgatctttctctaagcctaacaggggatgacggagggcctaaccgcacctcaacagagagtcggggtacggacaccgagtcttcaggcgaagacaaggacagcgactctatggaggacacaggacactacagtattaatgacgagaacagagtgcatgaccgctctgaggaggaggaggaagaggaagaggaggaggaggaagagcagcctaggcgccgtgtgcagcgaaaaagagctaacagggaccaggacagcagcgacgacgagcgagccctcgaggactgggtgagcagcgagacttctgcattgccacggcctaggtggcaggccctccctgccctgcgggagcgagagctgggctccagcgcccgattcgtgtatgaggcctgcggcgccagggtgttcgtgcagcggttccgactgcagcatggcctcgaagggcatactgggtgtgtgaataccctccacttcaaccagcgcggaacatggctggcctctggctcttag

SEQ ID NO: 26020 - DNA, 726 bp, synthetic construct
  source 1..726: mol_type = other DNA; note = Synthetic coding sequence
atgaccagcgtgacccggagcgagatcatcgacgagaagggccccgttatgtcaaagacccatgatcaccagttagagtcctccctatcgccggtggaagtttttgccaagacatccgcctcactggagatgaatcagggggttagcgaagaacgtatccatcttgggtccagtccaaaaaagggcggaaattgtgatttgagtcatcaggagcgccttcagagtaagagcctgcacctctcaccgcaggagcagtctgcatcataccaagataggcgacaatcttggcgtcgtgccagtatgaaagagaccaaccgaagaaagtccttacaccccattcaccagggtattacagagctgagtaggtcgatctctgtcgacttagctgaaagtaagcggcttggatgtctgctgctaagctcctttcagtttagcattcagaagctggagcccttccttcgtgacaccaagggattctctctggagtcttttcgcgccaaagcaagctccctgtcagaggagttaaagcatttcgcagatgggttggaaactgacggcacactgcagaaatgttttgaggattcgaatggtaaggcgtccgatttctccctggaagcgagcgtcgccgagatgaaggaatatattaccaagttctctctagagaggcagacgtgggaccaactgctgctgcactatcagcaggaggccaaggagatcttatcttag

SEQ ID NO: 26021 - DNA, 1188 bp, synthetic construct
  source 1..1188: mol_type = other DNA; note = Synthetic coding sequence
atggccagcgccgccagcgtgaccagcctggccgacgaggtgaactgtcctatttgccagggaacccttcgggaaccagtcaccatagactgcgggcataacttctgccgagcctgcctcactagatactgcgaaatacctgggccagacctggaggaaagccccacatgccccctgtgcaaggagccattccgccccgggtcctttagaccaaactggcagctcgctaacgttgtggagaacatagaacgcctgcagctcgtttctaccttgggactcggggaggaggacgtctgccaggagcatggcgaaaaaatttacttcttttgtgaggatgacgagatgcagctatgcgtggtttgtcgggaggcgggagaacacgccacacataccatgcgttttctagaggatgccgccgcgccatatcgcgaacaaattcacaagtgcctgaaatgtttaagaaaggagagagaggaaattcaggaaattcagagtagagaaaataagcgtatgcaggtcctcttaacgcaggtgtccaccaagcggcagcaagtgatttctgaatttgctcacttacgtaaatttttagaagaacagcagagcatccttctcgcacaactggaatcacaagacggggatatcctgaggcagagggacgaattcgacctgttggttgctggcgaaatctgcaggttctctgccttgatagaggaactggaggagaagaatgagagaccagctcgggagctgctgacagacataagaagtacgctgatacggtgcgagacccgcaagtgcagaaaacccgtggctgtatcaccagagctgggccagcggatccgagattttccgcaacaggcactgccactgcagcgcgaaatgaagatgttcctggagaagctgtgctttgagctggactacgaacccgcccacatatctctggacccgcagacatctcatcccaaactccttctgtccgaggaccaccagcgggcccagttcagttataagtggcagaattcccctgacaacccacagcggttcgatagggccacgtgcgtccttgcccacacagggatcacaggtggcaggcacacatgggtgtggatggcacgtgtacccggcgattccgggtgttgtcagttctgcagtccccccagcgtgcttggcaccgaggtggccgcatag

SEQ ID NO: 26022 - DNA, 1887 bp, synthetic construct
  source 1..1887: mol_type = other DNA; note = Synthetic coding sequence
atgagcgacaagagcgacctgaaggccgagctggagcggaagaagcaaaggctggcccaaatacgcgaagagaagaaacgcaaggaagaggagcgcaagaagaaggaagccgacatgcagcagaaaaaggaacccgtgcaagacgacagtgatttagatcgcaaacgccgggagacagaggcactgttgcagtctatcggcatcagccctgaacctcctctggttcccacgcctatgagcccttcgagtaagagcgtaagcaccccctcagaggccggatcgcaagacagcggagatttgggacccttgacgcggacattgcagtgggataccgatccttcagttcttcagcttcagagcgattccgagcttggccgccgattgcataagctgggcgttagcaaggtcacacaagtcgacttccttccccgcgaggtggtgtcctatagcaaggagacccagactcccttggccactcaccagagtgaagaggacgaagaagatgaggagatggtcgagtcaaaggtcgggcaggactccgagctggagaaccaagataaaaagcaggaggtcaaggaggctcccccgcgcgaactgactgaggaggaaaaacagcaaattctgcactctgaggaattccttatttttttcgataggaccatacgggtcattgagcgagccctggccgaggacagcgacatcttctttgactattccggacgcgagctagaggagaaagatggagatgtgcaggctggcgctaatctgtcttttaaccgacagttctatgacgagcactggtcaaaacatcgcgttgtcacttgcatggattggtcgctgcagtaccctgagcttatggtggccagctacaataataatgaggatgctcctcacgaaccggatggggtggccttagtatggaatatgaaattcaaaaagaccacacctgagtacgtcttccattgtcagagcagcgtgatgtctgtctgctttgctaggtttcatcccaacctggtggtcgggggcacttactctggacaaattgtgctgtgggataatcgttctcacaggcggacccctgtgcagcgtacacccctgtcagcagctgcgcatacccaccctgtttattgcgtgaacgttgtgggaacacagaatgcccataatctcatcactgtcagcaccgatggcaagatgtgtagttggtccttggatatgctcagcacaccccaggagagcatggaattggtctataacaagtcaaagccagttgcggtgacagggatggcgtttcctacgggagatgtgaataactttgtggttggaagtgaagagggcacggtgtataccgcatgcaggcatggctccaaggccggtatcggcgaggtgttcgagggccatcagggacctgttacgggtattaactgccacatggcagtgggtccgattgacttttcgcacttgttcgtaaccagcagcttcgactggaccgttaagctgtggactactaaacacaacaagccattatatagctttgaagataacgctgactacgtatacgacgtgatgtggtcacccgtgcatccagccctgtttgcctgcgtcgacggtatgggcaggctcgatctgtggaacctgaacaatgataccgaggtccccaccgcatccgttgccattgagggagcctccgccctcaaccgagtccgctgggctcaggccgggaaagaggtggctgtaggtgatagtgaggggagaatttgggtgtatgacgtcggtgaactcgcagtaccacacaacgatgaatggaccagattcgccagaactctggttgaaataagagcaaatcgcgccgactccgaagaagaagggacagtggagctgtccgcttag

SEQ ID NO: 26023 - DNA, 1644 bp, synthetic construct
  source 1..1644: mol_type = other DNA; note = Synthetic coding sequence
atggccggcaccaagaacaagacccgggcccaggccaagaccgagaaaaaagctgcgattcaggcgaaagccggggccgagcgtgaggcaaccggcgttgtgcgacccgtggcaaagactagagcaaaggcaaaagcgaagaccggttctaaaactgatgcagtcgccgagatgaaggccgtgagcaaaaacaaggttgtggccgagaccaaggaaggagctctgagcgagccgaagaccctaggtaaagcaatgggcgacttcacacccaaggccgggaacgaatccacatcttcaacgtgcaaaaacgaggctggcaccgacgcctggttctgggccggggaagaagccacaatcaactcctggttctggaacggagaggaggcaggcaatagcttctctaccaaaaacgacaagccagagattggtgcgcaggtctgcgccgaagagctcgaaccagcagccggagccgactgcaagcccaggtccggggccgaggaagaggaagaagaaaacgtgatcgggaattggttctgggagggagatgatacgtcatttgatccaaacccaaagccagtcagtagaatcgtcaagccccaaccggtgtacgaaattaatgaaaagaatagacccaaggactggtcggaggttaccatctggccaaatgcacccgcagtgacccctgccgtgctaggatttcgcagtcaggccccctccgaagcctctcctccctcctacattgtccttgcttcagccgaggaaaatgcatgctccctccccgttgctacagcctgcaggccatcacggaataccaggtcatgcagtcagcccatcccagaatgccggttcgacagtgacccctgcattcagacaatagatgaaattcggagacagatacgcatacgagaggttaacgggattaagccgttcgcttgtccctgcaagatggagtgttacatggattctgaagaattcgagaaactggtctctctacttaaaagcacgaccgacccgctgattcataagattgcacgaattgcgatgggcgtgcataacgtgcacccattcgcacaggagtttatcaatgaagtgggggttgtgacacttatcgagtccctactatccttcccatctcccgagatgcggaaaaagacggttatcactctaaatccacctagcggggacgagcgtcagcgaaaaatcgagctgcatgttaagcacatgtgtaaagaaaccatgtctttcccactcaacagccctgggcaacaaagtgggctgaaaattctgggccagctcactaccgactttgtgcaccactatatcgtggctaactactttagcgaactgttccatctgctgagttctggcaattgcaagacaagaaacctggtcctgaaactattgttaaatatgagtgaaaatcctactgctgcgagagatatgattaacatgaaggccttagccgcattgaagcttattttcaatcagaaagaagctaaagccaacctggtatccggggtggcgatcttcattaacatcaaggaacatatccgcaaaggttcaatagtcgtcgtcgaccacttaagttacaacacccttatggcgatcttccgcgaagtgaaggagataatcgaaacaatgtag

SEQ ID NO: 26024 - DNA, 747 bp, synthetic construct
  source 1..747: mol_type = other DNA; note = Synthetic coding sequence
atggccttcagcggccgggcccggccctgcatcatccccgagaacgaggaaatacctagggctgcactaaatacggtgcatgaagctaatggaacggaggatgagcgagcagtttcaaagctgcagaggagacactccgacgtgaaagtgtataaggaattttgcgatttttacgcaaagtttaatatggcaaatgctctggcctccgccacatgtgagagatgtaagggagggttcgcccctgccgaaactatagtgaatagcaacggcgaactgtaccacgagcagtgctttgtgtgcgcacagtgtttccagcagttcccggaggggctgttctacgagttcgaggggaggaagtactgcgaacatgattttcagatgctcttcgcaccgtgttgtcatcagtgcggcgaatttatcattgggcgggtgatcaaggccatgaacaacagctggcatccagaatgtttcaggtgtgatctgtgccaagaggtgttggctgacattggcttcgtcaagaacgcgggccgacatctatgcagaccatgccacaatagagagaaagcccgtgggctgggcaagtacatctgccagaagtgtcacgccattattgatgagcagccccttatcttcaaaaacgatccttatcatccagatcactttaattgtgcaaactgtggtcaagagggcagtgactgccgatgtacaggcgccgagcggggtgccatcttgccagctatgccatag

SEQ ID NO: 26025 - DNA, 621 bp, synthetic construct
  source 1..621: mol_type = other DNA; note = Synthetic coding sequence
atggagagcaacttcaaccaggagggcgtgccccggcccagctacgtgttctcggccgatccgattgctagaccaagtgaaatcaatttcgacggcattaagttagatctcagccacgagttttctctggttgcaccgaataccgaagcaaatagcttcgagagtaaggattatctgcaagtgtgcctgagaatcaggcccttcacacaatcggagaaggagctggaaagcgaaggctgcgtacacatccttgattcacaaacggtggtcctcaaggagccccagtgcattttaggacggctctcagagaagagttccgggcagatggcacagaagtttagctttagtaaggtgtttggaccggccacaactcaaaaagagttctttcaagggtgtatcatgcagcccgtgaaagacctactcaaggggcagagtcggcttatttttacctatggtctcacgaatagcgggaagacgtacacatttcagggaaccgaggagaatatcggtatactgcctagaactctgaacgttctgttcgactctcttcaggagcggctttacaccaaaatgaacctgaagccacatcgatctcgcgaatatctccgcctcagctcctag

SEQ ID NO: 26026 - DNA, 990 bp, synthetic construct
  source 1..990: mol_type = other DNA; note = Synthetic coding sequence
atggaggtggccgagcccagcagccccaccgaggaggaggaggaggaggaagagcatagcgccgaacctagaccccgtaccaggtctaatcctgagggtgcggaggatcgagccgtgggagcacaggcaagcgtgggctcccggtctgaaggggaaggagaagccgcctcggctgacgacggaagtctgaacaccagcggagccgggcctaaaagttggcaggttcctccgcccgcgccagaagtccagattagaacccctagggtgaactgtccggagaaagtcattatctgtcttgatctctccgaagagatgtctttgcccaagctggagtcctttaacggaagcaagacaaatgccttaaacgtctcccagaaaatgattgaaatgtttgtcaggaccaagcacaagatagacaagtcccatgagtttgcactggtggttgtcaacgacgatactgcttggctgtccggcctgacctccgatccaagagagctgtgcagctgtctgtacgacttggaaacagcatcttgctctacattcaacatcagcggagcaagtcctgcaaggcaacaaaaaaccgagttgcctgtgacagagaacgtgcaaacaattccccctccatatgtggttaggactatcctggtgtatagtagacccccctgccaaccccaattctcactcactgagccgatgaaaaagatgtttcagtgtccatacttcttttttgatgtggtgtacattcacaacggaacggaggagaaagaagaagagatgtcttggaaggatatgtttgcttttatgggttctctggatacaaagggaacctcctacaaatacgaggtggccctggccgggccagctctcgaactgcacaactgtatggccaagctgctcgctcatccgctgcaacggccctgccaaagccatgcctcttattcccttttggaggaggaggatgaggccatcgaagtggaggctacagtctag

SEQ ID NO: 26027 - DNA, 1620 bp, synthetic construct
  source 1..1620: mol_type = other DNA; note = Synthetic coding sequence
atggccaccagcgcccccctgcggagcctggaggaggaggtgacctgttctatttgcctcgattacctgcgggacccggtgacaattgattgtggccacgtgttctgccgcagttgcactacggatgttagacccatctctgggagtagacctgtttgcccgttgtgcaaaaagccatttaagaaggaaaacatcaggcccgtatggcagctggctagcttagttgagaacatagagcggctgaaggtggacaaagggcgacagcccggtgaagtgactcgagagcaacaggacgctaagctttgtgagcgccaccgcgagaaactccactactattgtgaagacgatggcaaactgctgtgcgtaatgtgtagggaatcaagagagcaccgcccgcacaccgctgtactcatggaaaaagctgctcagccccaccgggaaaagattcttaatcacctgtccactctccggcgggaccgtgataagatccagggttttcaagccaagggcgaggccgatatcctggctgccctgaaaaaactccaagatcaacggcaatatattgtagctgaattcgagcaggggcaccagtttctgcgcgaacgggaagagcacctgctcgagcaacttgccaaacttgaacaggagctgacggaaggacgggaaaagttcaagtcccgcggagtcggcgaactggccagactggcactggttatctctgagctcgaaggcaaagctcaacaaccagcagcagagctgatgcaggacactagagacttcctcaatcggtacccccgcaagaagttctgggtgggaaaacccatcgccagggtcgtgaaaaagaagacaggggagttctcagataagctgctcagcctccagcggggactgcgagagtttcagggtaagctgttaagggatttggagtataaaacagtctctgtgacccttgaccctcaatcagctagtggatacctgcagcttagcgaggattggaagtgcgtgacctatacatccctgtacaaatcagcctatttacacccccaacaatttgactgtgaaccgggcgtgttagggagcaaaggtttcacgtggggcaaagtttattgggaagttgaggttgagcgggagggttggtccgaggacgaggaagaaggcgacgaagaggaggagggcgaagaggaagaggaggaggaagaagctggctacggggacggctacgacgattgggaaactgacgaagacgaggaatctctgggcgacgaagaagaggaggaagaggaagaggaagaagaggtattagaatcttgtatggtgggagtcgccagagattctgttaaacgtaagggcgatctcagtctcaggccggaggatggagtgtgggccctgagactttcctcctcaggcatttgggcaaacacatcacccgaggccgaactcttccccgcactgagacctcgcagggtgggcatcgcattagactacgagggcgggacggtgacattcactaacgcggaaagtcaggaactgatttatactttcacagcgacctttacacgtcgcttagtgcctttcctttggctcaagtggcctggaactaggctgctgcttcgcccctag

SEQ ID NO: 26028 - DNA, 3558 bp, synthetic construct
  source 1..3558: mol_type = other DNA; note = Synthetic coding sequence
atgtgcgaggtgatgcccaccatcaacgagggcgaccggctgggccctccacacggggcagacgccgatgccaacttcgagcagttgatggtgaatatgctcgacgagcgcgaaaaactgctggagagtttgagagagtctcaggagacccttgcggcgacacagtctcgactgcaggacgcaatccacgagagagaccagctgcaacgccatctcaactcagcattacctcaggagttcgcaacccttactagagaattaagcatgtgtcgggaacaactgctggaacgggaggaagagatctcagagctcaaagctgagaggaacaatacccgcttgttgcttgaacacctcgagtgtctggtcagcaggcatgagcggagtttgcgaatgacagtggtgaaacgacaagctcagtccccatcaggagtgagcagcgaagtggaggtcctcaaagcccttaagagcctatttgagcaccacaaggcactcgacgagaaagtccgggagaggctgcgggccgccctcgaacgagtgacgactctggaagaacaactggccggggctcatcaacaggtgagcgcacttcagcagggcgctggagtcagggacggtgccgccgaggaagaggggaccgtcgagttgggccccaaaaggttatggaaagaagacacggggcgggttgaggaacttcaggagcttcttgagaaacagaattttgagctgtctcaggcccgggaacggctggtaaccctgaccactacagttactgaacttgaggaagacctgggtaccgctaggagagacctaatcaagagtgaggagctgtctagtaagcatcagcgagatctgagagaagccttggctcagaaagaggacatggaggaaagaattacaactctggagaagagatacctggccgcacaacgagaggcaacaagtatccacgatctcaatgataagctcgagaatgagctggccaataaggagagcctgcacagacagtgcgaggaaaaagcccgccacctccaggaactgttggaggttgccgagcaaaaactccagcagaccatgaggaaagccgagacactgccagaggttgaagccgagctcgcccagagaattgccgccctgactaaagctgaagagaggcatggaaacattgaggagcacctgcgacagctggaaggacagctggaggaaaaaaaccaggaactggccagaactgccgtgcaggtgcgccaacgggagaagatgaacgaggatcacaacaagaggctgagtgataccgtggacaggctcttatccgagtcaaatgaaagactacagctgcatttaaaagagcgtatggccgcgctggaagagaagaatactcttatacaggaactggagtcgagccaaaggcaaatcgaagagcagcatcaccacaagggacggctgagtgaggaaatcgagaagcttcgccaggaagtggaccagttaaaaggaagaggtgggcctttcgttgacggcgtacactctcgaagtcacatgggttccgctgctgacgtgcgtttttccctcgggactacaacacacgcccctccaggggtgcatcggcggtattctgctctccgtgaggaaagcgctaagttagccttaccactgacagttaccttgcgcagccctacctggatgagaatgtcacaaggcgtgtgctgcaacctggaatatcactcctctggaacgctgtgcggcagtagcggccctcttcccgtccccgagatgattcaggaggagaaagaaagtactgaactgagagcggaagaaatcgagacgagggtgaccagtgggtcaatggaagcgctgaatttgaaacagctccgcaagcgaggatctatcccgacgtccctcaccgcactgtctctggcctccgcaagtccccctctaagcggaaggtccactccgaagttgactagtcgaagcgctgcgcaggatctcgaccgaatgggcgtgatgacattaccaagtgatctacggaaacacaggaggaaattactgagccctgtgtcgcgcgaggaaaacagagaggacaaagcgacgatcaaatgcgagacttcccctccttcctctcccaggacgctccggttagagaaactcggacacccagcgctcagtcaggaggagggaaagtccgcccttgaggaccaggggtccaatccaagctcctcaaattcctctcaggattcacttcacaagggcgccaaaaggaaggggataaaaagctctattggtcgcctgtttggcaaaaaggaaaaggggagactgatacagctctctagggacggagcaactggtcacgtgttacttaccgattcagaattctccatgcaggaaccgatggtccccgctaagcttggtacacaggccgaaaaggaccggcgtctgaaaaagaaacatcaattgcttgaggatgcccggagaaaaggcatgcccttcgctcagtgggatggcccaaccgtcgtgagctggcttgagttatgggtgggtatgccagcatggtacgtggccgcatgtcgcgcgaacgttaaatccggggcgatcatgagcgctttatcagatacagaaattcagcgcgagattggtatctctaacgctttgcatagattaaaattgcggctggccatccaagaaatggtgagcctgacttcgccgagcgcccctccaacatctcgaacatcttcaggcaatgtctgggtgacccatgaggagatggaaactcttgagacatccaccaagaccgattctgaggagggatcctgggcgcagactcttgcctacggtgatatgaatcatgagtggatcgggaatgagtggcttccctccttaggcctcccacagtatagatcttactttatggaatgtctggtagacgcccgaatgctggaccatctgacaaagaaggatctgcgcgttcacctcaaaatggtcgactccttccaccgcacatccctccagtatggaatcatgtgcttgaaacgcttgaattatgacagaaaggaactggagaagcggagggaagagtcacagcacgaaattaaggacgttctggtgtggactaatgaccaggtggttcactgggtgcagagcattggattacgcgactacgcggggaatctccatgaatccggggttcacggcgcattactcgcccttgacgagaatttcgaccacaatacactggctctgatactgcagatacccactcagaacacccaggctcggcaggttatggaacgtgagttcaataacctgctcgcactcggaacagatcggaagctggacgacggggacgacaaggtgtttagacgcgcaccaagctggaggaaacgctttcgcccgcgggaacatcacggaagaggggggatgctgtctgcatccgctgaaaccctgcctgctgggttccgcgtctcaactctgggcacccttcagccacctccagcaccccccaaaaaaattatgccagaagctcactcacactacctctacggtcatatgttgtccgccttccgagactag

SEQ ID NO: 26029 - DNA, 1383 bp, synthetic construct
  source 1..1383: mol_type = other DNA; note = Synthetic coding sequence
atggagatctgcgacatcatcaacgagaccgaggagggccccaaggatgcactgcgggccgtcaagaaacgtattgttgggaacaaaaacttccacgaggtgatgctagccctcacagtgctggagacctgcgttaagaactgcgggcacaggttccatgtgcttgtggcatcccaagatttcgtggagtccgtgctggtcagaactatcttaccaaagaacaatccgccaacaatagtgcacgacaaggtcttgaacctgatccagagttgggcagacgccttcaggagcagtcctgacctcactggagtcgtgaccatttatgaggacctgaggagaaagggacttgagttccccatgacagacctggacatgttgtcacccatccacacacctcagcgcacagtgtttaattccgagacccagtcaggccaggactctgtcggtaccgactcttcacagcaggaagattctggccagcacgcagctccacttccagccccaccaatactgtcaggggataccccaatcgcgccaactccggaacagataggcaagctgagatctgaactcgaaatggtgtcaggaaacgtgagagtgatgagcgagatgttgaccgaactcgtaccaacccaggcagagcccgcagacctggagctcctgcaggaactgaaccgcacgtgccgcgcaatgcagcagcgtgtcctggagctgattccccagatcgctaatgaacaactgacagaggaattgctgatagtaaacgataacctgaacaacgtctttctgcggcacgaacgttttgaaagattcaggaccgggcagaccactaaggcaccctctgaggccgagccagctgctgacctgatagacatgggtcccgatcccgccgccacaggaaacctgagcagtcagctggctgggatgaatttgggctcgtcatcagttcgggctggcctgcaatcactcgaagccagtggccgccttgaggatgaattcgatatgtttgccttgacacgagggtcctccctggccgaccagaggaaagaagtcaagtacgaggccccacaggctactgacggcctcgcaggcgccctggatgccagacagcagtccactggggctatcccggttactcaggcctgcctgatggaagacatcgagcagtggctctcaacagatgtcgggaacgacgccgaggagcccaaaggggtgacatctgagggcaagttcgataagttcctcgaggagcgtgccaaggcagccgaccgcttgcccaatctgtcctccccctctgcagaagggccaccaggccctcccagtggccccgcgccgcggaagaagactcaggagaaagacgatgatatgctgttcgccctgtag

SEQ ID NO: 26030 - DNA, 180 bp, synthetic construct
  source 1..180: mol_type = other DNA; note = Synthetic coding sequence
atgatgatgaagatgatgatgcggatgaagatccggaagatccggtaccattgtcagaggaagcagaatctaatccataataatggaaatggactggggagtgtccccgtcgagaaactcgtgttacatccgtctccaatccagaacccacagcagtcagccgtggtatcttgcgagtag

SEQ ID NO: 26031 - DNA, 537 bp, synthetic construct
  source 1..537: mol_type = other DNA; note = Synthetic coding sequence
atgctgggcctggacgcctgcgagctgggcgcccagctgctggagctcctgcgcctggcattgtgtgcacgagttctcctggccgacaaggagggcgggcctcccgcagtggacgaggtcttggacgaggcggtgccagagtatcgcgcaccagggaggaaatccctactcgagatacggcaactagacccagatgatcgtagcctggcaaagtataagcgcgttctgctcggccctcttcctccagctgtggatccatcgctgcccaacgtacaggtcacaaggctgacactactctcagagcaggctcctgggccagtggtaatggacttaacaggcgacctggctgttctcaaggatcaggttttcgtgctgaaagaaggtgtagactacagggtccatagggagattgtgagcggtctcaagtgcctacaccacacataccgtcgtggactgcgcgtagacaagacggtatacatggtgggtagttacgggccgagcgcacaggaatacgagttcgtgactccagtggagtag

SEQ ID NO: 26032 - DNA, 1119 bp, synthetic construct
  source 1..1119: mol_type = other DNA; note = Synthetic coding sequence
atggacagcgtgcggagcggccccttcggccaggtgttccggcccgataattttatattcggacaatgcggtgctggcaataactgggcgaagggccattacacggagggagctgaactgatggaatcagtgatggacgtagttcgcaaagaggctgaatcgtgtgactgcttacaaggcttccagcttacccacagcctgggtggcggcacaggctctggtatggggacattgttactgtcaaaaatcagagaggaatacccggatcggatcatcaacaccttttctatcctgcctagccccaaggtctctgacaccgtcgtggaaccatacaacgccaccctgtccgtacatcagctgattgaaaacgccgacgagacgttttgtatcgacaatgaagccctgtacgacatctgttcaaaaacattgaagcttccaaccccgacgtatggtgacctgaaccacttggtcagcgccacaatgtcgggcgtgaccacctgcctgaggtttccaggccagctgaatgccgacctacgaaagcttgccgtgaacatggtcccctttccgcgcttgcatttcttcatgcccggtttcgctcctctgaccagtcgcgggtcacagcagtacagggcccttaccgtggcagaactcactcagcagatgttcgacgccaagaatatgatggcagcgtgtgatccaagacatgggaggtacttgaccgccgccgcaatttttcggggacgcatgcccatgagagaggtggatgaacagatgttcaacatccaagataagaactcttcttatttcgccgattggctccccaataacgtcaaaaccgctgtgtgcgatattccgccacgaggccttaagatgagtgctaccttcatcggcaacaacactgccatacaagagctcttcaaacgggtctctgaacagttcactgccatgtttcggaggaaagctttcctccactggtacaccggggaaggcatggatgaaatggaattcactgaggccgagagcaacatgaatgacctggtcagcgagtaccagcagtaccaagatgcaacagccgaagaagaagaagatgaggaatacgcagaggaagaggtcgcgtag

SEQ ID NO: 26033 - DNA, 576 bp, synthetic construct
  source 1..576: mol_type = other DNA; note = Synthetic coding sequence
atggccgccgccaaggacacccacgaggaccacgacaccagcaccgagaacaccgatgaaagtaaccacgacccacagtttgaacccattgtgagcctgcccgagcaggagatcaagacactggaggaagatgaggaagagttgtttaagatgcgggcaaagttatttcgcttcgcttccgaaaatgacttgccagagtggaaagagcgaggcacaggtgacgtcaaactcttaaaacacaagactctcaagatttgtgctaatcattatatcacgccaatgatggagctcaagcccaatgccggttcagaccgagcttgggtgtggaacacccacgcggacttcgccgacgagtgcccaaagccagaacttctggctatccggttccttaacgcagaatcggaacccagggctttgggcacttgcctgacatggggctcacctgcctggcagcggggaggactgtgcgccacaaacgcagtggccttttggggagagggagcagtcactggcaaatgtgtggtttgggcggccctgccatgctgcctgggcgccatgcccagactgaaaccatag

SEQ ID NO: 26034 - DNA, 369 bp, synthetic construct
  source 1..369: mol_type = other DNA; note = Synthetic coding sequence
atggccaccagcgcccccctgcggagcctggaggaggaggtgacctgtagcatctgccttgattacctgcgcgatccggtaactattgactgcggccatgtgttttgtagatcatgcaccaccgacgttcgaccaatcagcggatctcggcccgtttgtcccttgtgtaagaagccctttaagaaagaaaatattaggccagtgtggcagctggcatctctggtggaaaacatcgaacgtttgaaagtcgacaagggtcggcagcccggggaggtaacacgagagcagcaggacgctaagctttgtgagcggcatagggaaaaattacattactactgcgaggacgacggtaagctcctttgcgtttag

SEQ ID NO: 26035 - DNA, 1383 bp, synthetic construct
  source 1..1383: mol_type = other DNA; note = Synthetic coding sequence
atggccagcctgctgcagagcgaccgggtgctgtacctggtgcagggggagaagaaagtgcgagcccccctgtcccagctgtacttctgccggtactgctctgagctgagatctctcgaatgtgtaagtcacgaggtggattctcactattgtccatcctgccttgaaaatatgccttctgccgaggcaaaactaaagaaaaatcggtgcgctaactgcttcgactgccccggctgcatgcacaccttatctactcgggccactagcatttcgacccagctacccgatgaccccgccaagacgaccatgaagaaggcatactacttagcctgcggtttttgcagatggacaagccgggacgttgggatggccgataaaagcgtagcgtcgggaggctggcaggagccggaaaatccccatacacagcgcatgaataaattaattgaatattaccagcaactggcacaaaaagaaaaggtcgaacgagacagaaaaaaactggctagaaggagaaattacatgcccttggccttctcagataagtatggtctgggtacgcggctgcagaggccaagagccggcgccagtattagtactttggctggcctctcattgaaggaaggcgaggatcagaaggaaattaagattgaaccggcgcaggccgtcgatgaggtcgagcccctgcccgaggattactacacaagaccagtgaacctgacagaggtcactaccttacagcaaaggctcctacagccagacttccaacccgtttgtgcttctcagctgtaccctcggcataagcatctactcatcaagcgttccctcagatgccggaagtgtgaacataacctgtctaagccagagttcaaccctacatcaataaagttcaaaattcagttggtcgccgtgaactacattcccgaggtgaggatcatgtccattccaaatttgagatacatgaaagagagtcaggtgttactgacattgactaatccagtcgagaatttgactcatgtcacattgttcgaatgtgaggagggagaccctgatgatatcaacagcaccgctaaggtggttgtgcccccaaaggagctcgttctggccggcaaggacgcagcagcagaatacgacgagctggccgaaccacaggacttccaggacgatccagatattattgcatttcggaaggcgaacaaggtcggtatcttcattaaggtgacccctcagcgggaggaaggcgaagtcacagtatgttttaaaatgaagcacgattttaaaaacttggccgcaccaattagaccaatcgaggagagtgaccaggggactgaagtcatctggttaacacagcacgttgagttaagcctgggacctctgctcccatag

SEQ ID NO: 26036 - DNA, 3336 bp, synthetic construct
  source 1..3336: mol_type = other DNA; note = Synthetic coding sequence
atggagatggacgccccccggccccccagcctggccgtgcccggcgccgcctctcgtcccggccgtttgttagacgggggtcatggaaggcagcaagtgcaggcgttaagctcccaacttctcgaagtgatcccggacagtatgcgcaagcaggaggtgaggacgggaagagaagccggtcaaggacacgggaccgggagccccgcagaacaagttaaggctctgatggaccttctggctggtaagggctcccaagggagccaagcaccgcaggccctggaccggactcccgacgctcctctgggaccctgctctaacgactcccgcatccagcggcacagaaaggctctgttatccaaggttgggggggggcccgagcttggcgggccctggcaccgcttagcttccctgctgctagttgaaggcctcaccgacctgcagcttagggagcacgattttacccaggtcgaggccaccaggggaggggggcacccagccaggacagttgcattagatcggctcttcttgcctctgtcacgcgtgagcgtgccaccccgtgtgtctataacaattggggttgccgggatggggaaaaccacattggtgagacactttgtgaggctctgggcccacggacaggtcggcaaggacttcagtttggtgctgcccctgactttcagagacctcaatactcacgagaagctgtgtgccgatcgactgatttgctcagttttcccccatgttggtgaaccctcgctcgccgtcgctgtccccgcccgggccctgttgattctggatggattggatgaatgccgtacaccactagatttttccaacacagtcgcctgtaccgatcccaagaaggaaatccctgtggaccacctgatcacgaacattattagggggaacttatttcctgaggtgtcaatatggataacatcccgcccaagtgcgtccggtcagattcccggagggctggtcgatcgaatgacagagataagggggttcaacgaggaggagatcaaggtttgcctggagcagatgttccctgaggatcaggcgttgcttgggtggatgctgagccaggtgcaggccgacagagccttatacttgatgtgtacagttcccgcattctgtagactaacagggatggctctaggtcacctgtggcgcagccgcacgggaccccaggacgccgaactgtggccgccaaggacattgtgcgaactctattcatggtatttccgcatggccctgagcggggagggccaagaaaagggtaaagctagtcctcgcattgaacaggtggctcacggcggacggaagatggtgggtaccctagggcgcctcgcttttcatgggcttctgaagaagaagtacgtattttatgaacaagatatgaaggcattcggggtggaccttgcgctgttgcagggcgctccttgttcttgcttcctgcagagggaggaaacccttgcatcttctgtggcctactgctttacacatctttctctgcaggaattcgttgcagcagcgtattactatggcgcgagcagaagggccattttcgatcttttcacagagagcggagtgtcgtggcccaggctcggtttcctgactcacttccgctccgctgcccagcgggccatgcaagctgaagacgggaggctggacgtgttcctgcggttcctctcgggcctccttagcccccgcgtcaatgcactgctcgccggatcattgctcgcacagggcgaacatcaggcataccgcacacaggtggctgagttacttcagggctgcctcaggcctgacgcggccgtgtgcgcacgagccatcaatgtcctacactgtctgcacgagctgcagcataccgagctcgctcgttccgtggaggaagctatggaatccggggctttagctcgtctgacaggccctgcgcaccgtgcagccctcgcttaccttctccaggtgtctgatgcatgtgcccaggaggctaacctgagcctcagtctgtcccagggggtactgcagagcctcctgccgcagctgctgtactgtaggaaattgcggctggacacaaatcagttccaggaccctgtaatggagcttctgggcagcgtcttaagcgggaaagactgtagaattcagaagattagcctggccgagaaccagatctccaacaagggcgctaaggctctcgcgagatcactcctggtgaaccgttccctgaccagtttggacctgagagggaactctatcggcccgcagggggctaaggcccttgctgatgccctcaagatcaataggacacttactagcttgagcctccagggcaatacggtgcgggatgatggggcccggtcaatggccgaggcgctagcgtccaaccgaacactatcgatgcttcatctgcagaaaaattccattggtcctatgggggcacagagaatggctgatttaaagcagaaccggtccctgaaggagttgatgttctcatctaacagtattggggatggcggggcaaaagcactggccgaggctttaaaagtgaatcagggcctggagagtctggacctccagagcaactccatttccgacgctggtgttgccgccttaatgggtgccctatgcacaaatcagaccctgctctccctgtctctccgggagaacagcatctctcctgaaggtgctcaggccatcgcccacgccctgtgcgctaatagtacgcttaagaatctcgatctgacagctaacttgcttcatgaccaaggggctagagcaatagcagttgccgtccgtgagaatcgaacgcttaccagcctgcatcttcagtggaacttcattcaggccggcgcagcacaggctctgggtcaggctttacagcttaacaggagccttacaagcctggatctgcaggaaaatgccattggggacgacggggcatgcgccgtggctcgcgccctgaaggtcaacacggcgttgaccgcactgtatctgcaggtcgcatccatcggagcaagcggggcccaggtgctgggcgaggcactggcggtcaatcgcaccctggagatacttgatctgcgggggaacgcaatcggcgtcgccggcgcaaaggcattagcaaacgctttgaaggtgaacagcagtctgagacgccttaacctgcaagagaactctctggggatggacggcgctatttgcatcgccactgcactctccggcaaccatcggctacagcatataaacctgcagggcaaccatataggagactcaggtgcacgaatgatatcagaggccattaagacgaatgctccgacgtgcacagtggaaatgtag

SEQ ID NO: 26037 - DNA, 2424 bp, synthetic construct
  source 1..2424: mol_type = other DNA; note = Synthetic coding sequence
atgctggagcggcgggccctgctgtggcagcgggaggccggccccggctggggcgatagggcgcgcgccggaactgggggcgccggcggcgggtgtggtggtgcaatggccgagcgaggaccagctttctgtggattgtatgatacctcgtccctccttaggtactgcaacgatgacaacctgagcggcacttccggcatggaagtcgacgaccgcgtaagtgctctggagcagaggctacagttgcaggaagacgagttagctgtcctgaaggcggcccttgccgacgctcttaggaggctgcgcgcctgcgaagagcagggcgccgctctgcgcgctcgtggaacaccgaagggaagggcacctcccaggctgggcactaccgcctctgtgtgtcagcttttgaaggggttacccacacgaacacccctgaacggaagcggccccccgcgcagagttggggggtatgccacatcccctagcagccccaagaaggaggccaccagtggacggtcatcggtgcgccggtatttatcacctgaacgtctggctagcgtacggcgagaggatcctcggtctcggacaacatcgtcctcatctaattgttcagcaaagaaagaggggaagactaaagaagtgatcttttccgtggaggatggctccgtgaaaatgttccttcgcggacgaccagttcccatgatgatccccgacgagttggcaccaacttactcgctggacacccgctctgagctgccttcctgtaggctaaaactggagtgggtgtatggatatagaggtcgcgattgcagagccaatctgtatctcctgcccacaggcgaaatcgtctacttcgtggcctcagtcgccgttttgtactccgttgaggaacagcggcagagacattatctgggccataatgacgatattaagtgtctcgctattcaccccgacatggtcaccattgcgacgggtcaggtggcaggcaccacaaaagagggcaaaccactccccccgcatgttagaatttgggattcagtttccctgtctaccctccatgtactgggcctgggggtgtttgatcgggccgtgtgttgcgtcggattttccaaaagtaatggcgggaatctgttatgcgcagtagacgaatcaaacgatcacatgttaagcgtctgggactgggccaaggaaactaaagtggttgatgtaaagtgttctaatgaggctgtgttggttgctacgttccatcctaccgaccctaccgtgttaatcacttgcggcaagtcccacatatacttctggactctggagggcgggagcctgagcaagcgacagggactgttcgaaaaacatgaaaaacccaagtacgtgctgtgcgtgacttttctggaaggcggtgatgttgttacaggcgactctggagggaacttatacgtatggggtaaaggtggcaaccggattacacaagctgtcttaggcgcacatgatgggggcgttttcggattgtgcgcacttcgcgatggcactctcgtatcgggtggcggtcgtaatagtatccttcagggatctgttcacacaggattctctctccttgttcagggccatgtcgaagaactgtggggccttgctactcacccaagtagggcacagtttgtcacgtgcggccaagataagttggtgcatctgtggagctccgactcacaccagcctctttggagccgaattattgaggaccctgcacgatctgctgggttccatccctctggtagcgtcctggctgtcggaaccgtaacaggaaggtggcttctgctggacactgaaactcatgatcttgtcgcaatacacaccgacggcaatgaacagatcagcgttgtgtcattttcccctgatggcgcatatctcgctgtcggctctcacgataatcttgtctacgtgtacaccgttgatcaaggaggaaggaaagtgtcccggctcggaaagtgttctgggcactcctctttcatcacccatttggactgggcccaggattcgagctgcttcgtcacaaacagcggcgattatgagatattatactgggatccagccacctgcaaacagatcacctctgcggacgctgtgcgaaacatggaatgggcaaccgctacttgtgtactgggttttggggtcttcggaatctggagcgagggcgcagatggaactgacataaatgcagttgccagatcccatgacgggaagttgcttgccagtgcagacgactttggcaaggtacatctgttctcatatccctgctgtcagcctagagcactctctcacaagtatggggggcattccagtcatgtaacaaacgtcgccttcctttgggacgattctatggctctcactactgggggaaaagacacctcagtcctgcaatggagggtggtatag

SEQ ID NO: 26038 - DNA, 1413 bp, synthetic construct
  source 1..1413: mol_type = other DNA; note = Synthetic coding sequence
atggaggagaccatcaaggacccccccaccagcgccgtgctgctggaccattgtcatttcagccaagttatatttaactctgtggagaaattctacatcccaggcggtgacgtgacttgccactatacattcacccagcatttcattccacgcagaaaggactggataggtatcttccgcgcattcaagtgctttcaagataaattggagcaggaactgttgaagtggaggtcgcaggggcagaaattacaagtgggttggaagacaacacgcgagtactacaccttcatgtgggtaacactgcccatcgacctgaataacaagtccgcgaaacagcaggaagtccagttcaaggcctactatctgccgaaagacgacgagtattatcagttctgttacgtcgacgaggatggcgttgtgcggggcgccagtattcctttccagttccggcctgagaatgaagaggacatcctggtggtcactacacagggcgaggtggaggaaatcgagcagcacaacaaagagctttgcaaagaaaaccaggagctcaaagacagctgtataagcctgcaaaagcagaatagcgacatgcaggcagaattgcagaagaaacaggaggagctcgagacccttcagagtatcaataagaagctggaacttaaagtgaaagaacagaaggactattgggagactgagctgctacagctgaaggaacagaaccagaagatgagttctgagaatgagaaaatgggcattagagtggaccagctgcaggctcagctaagtacacaggagaaggagatggagaaattggtccagggggaccaggacaagactgaacaactggagcagctcaagaaggagaacgatcacttatttctgtcactgaccgagcaacgaaaagaccaaaagaagctcgagcaaacggtggaacagatgaagcagaacgaaactactgcaatgaagaagcagcaggagctcatggatgagaactttgatctgagcaaacgcctgagtgagaacgaaatcatttgcaatgcactccagcggcagaaggagcggctagagggagaaaacgatctcttgaagcgcgagaactctaggctgctgtcttatatgggactggacttcaattctctaccctaccaggtgcccacttcagacgagggcggagctcggcagaaccccggtctggcatatggaaatccctacagtggcattcaggagtccagcagtccttctccgcttagcattaagaaatgtccaatttgtaaggcagatgacatatgcgaccatacactcgaacagcagcagatgcagcccctttgcttcaactgccctatatgcgacaagatcttcccggctacagaaaaacagattttcgaggatcatgtattctgccatagcctctag

SEQ ID NO: 26039 - DNA, 1023 bp, synthetic construct
  source 1..1023: mol_type = other DNA; note = Synthetic coding sequence
atgagcaagacccacgaccaccagctggagagcagcctgagccccgttgaggtgttcgccaagacgtcggcctcattagagatgaaccagggcgtcagtgaagagcgaattcacctgggctctagcccaaaaaagggagggaattgtgatctgtctcatcaggagcgcctacagtctaagtctcttcacctgtcaccccaggagcagagcgcgagctaccaagatcggcggcaaagttggcggcgcgctagcatgaaagaaaccaaccggcgaaaatccctgcaccccatccatcagggtataaccgaactgtcacgctcaatttcagtggatttggcggaatcgaagcgcctcggctgcctgctgctgtcatcgtttcaattttcaatccaaaagcttgagccgtttcttagggacacaaagggtttttccctggagagctttcgcgccaaggcttcctctctaagcgaggagctcaagcacttcgcagatggtctcgaaacagatggaactctccagaagtgcttcgaagattccaatggcaaggcttcagacttcagtctcgaggcttcagtggctgaaatgaaggagtatattaccaaattttcactggaacggcagacctgggatcagctccttctccattaccagcaagaggcgaaggagatactgtccagagggtctacagaagccaagatcaccgaggtcaaggtggaaccgatgacttacctgggctcttcccagaacgaggttctcaacacgaaacctgattaccagaagatcctgcaaaaccagtcaaaagtctttgattgcatggaacttgtgatggacgaattgcaaggctccgtgaagcaattgcaggctttcatggacgagtcgactcagtgttttcagaaggtctcagtccagttgggcaaacgtagcatgcaacagctcgatcctagtccagccagaaaacttttaaaactgcagctgcagaacccacccgcaattcatgggagcggtagcggtagctgccagtag

SEQ ID NO: 26040 - DNA, 522 bp, synthetic construct
  source 1..522: mol_type = other DNA; note = Synthetic coding sequence
atgacccacgtggccagccagttcgccagcagctacgtgttctactggcgggattatttcgaagaccaacccttgctctatcctcctgggtttgacggaagggtcgttgtttatccaagtaaccagaccttgaaggattacctgtcttggagacaagcggattgtcacataaacaatctctacaacacagtgttctgggcactgattcagcaaagtggactaacccccgtgcaggcccagggccggctccagggcactctcgccgctgacaaaaacgagattctgttttctgagttcaacataaattataacaacgaactcccaatgtacagaaagggcactgtactgatctggcagaaggtggacgaggtaatgacgaaagagatcaagttgccaactgagatggaaggaaagaaaatggcggtcacccgcaccagaaccaaacccgttccgcttcactgtgacattattggggatgccttttggaaggaacacccagaaatcttggatgaggactcatag

SEQ ID NO: 26041 - DNA, 285 bp, synthetic construct
  source 1..285: mol_type = other DNA; note = Synthetic coding sequence
atggagatggagagcgccgccgccagcacccggttccaccagccccatatggaacgcaagatgagtgctatggcctgtgaaattttcaacgagctgcgcctggagggcaaactctgtgacgtggttatcaaagttaacgggttcgagttcagcgcacacaagaacatcctttgttcctgctcttcctacttcagagcccttttcaccagtggctggaataacaccgagaaaaaggtctataatatccccggcatttctcctgacatgatgaaattgattatctag

SEQ ID NO: 26042 - DNA, 1572 bp, synthetic construct
  source 1..1572: mol_type = other DNA; note = Synthetic coding sequence
atgaaccagccctgcaacagcatggagccccgggtgatggacgacgatatgttgaaactcgctgtgggcgaccaggggcctcaagaggaagccggccagctagccaagcaggagggcatcctgtttaaagatgtgctctccctgcagctggacttcagaaatattctgcgaatagacaatctatggcaattcgagaacctgcggaaactccagctggataacaacattattgaaaaaatcgagggactggaaaatctcgctcacctggtgtggctcgacctcagctttaacaacattgaaaccatcgagggcttggacactctcgtaaacctagaagacctgagtctgttcaataaccgcatctccaagattgatagcctcgatgccctggtaaagctccaggtgctctctcttggcaataaccggattgataacatgatgaatattatctatctaagacggtttaaatgtctgcggaccctgtcattaagccggaatcctatatctgaggcagaggactacaaaatgttcatttgcgcctacctgccagatctaatgtacctcgattataggcgcattgatgatcatactaagaaactggcagaagccaaacatcagtacagcattgatgagctgaaacaccaggagaacctcatgcaggcccaactggaggacgagcaggcacagagagaagagctcgaaaaacataagaccgcttttgttgagcatctgaatggttcttttctctttgacagtatgtatgcagaagattcagagggaaacaacctgtcctatctccctggcgtcggggaactcctggagacctataaagacaaattcgtcatcatctgtgtgaatatttttgagtatggactgaaacagcaggaaaaacgaaagaccgagctggataccttctcagagtgtgtgagggaggccattcaggaaaaccaggaacagggaaagcggaagattgcaaaatttgaggaaaagcacttgagctcactgtccgctattcgcgaagagctggagctccccaatatcgagaagatgatactggagtgcagcgctgacatcagtgagctgtttgatgctctgatgacgcttgaaatgcaacttgtagaacagctcgaagaaaccatcaacatgttcgaaagaaacatcgtggatatggtgggtctgtttatcgagaacgtgcagtcgctaatggcgcagtgtcgagacttggagaatcaccaccacgaaaagctgttagagatcagcatctccactttggaaaaaatcgtagaaggagatctggatgaggacttacccaacgacctccgggctttgttcgtggataaagatactatcgtcaacgccgtgggagccagtcatgacatccacctgctcaaaatagataaccgtgaggatgaacttgtgactcgtatcaattcttggtgcacgcggctcattgacaggatccacaaagatgaaatcatgcggaaccgcaagagggtcaaagagatcaatcaatacatagaccacatgcagtctgagctagacaacttagagtgcggcgacatattggactag

SEQ ID NO: 26043 - DNA, 372 bp, synthetic construct
  source 1..372: mol_type = other DNA; note = Synthetic coding sequence
atgggcaccggcgacttcatctgcatcagcatgaccggcggcgccccatggggcttcagattgcagggcggcaaggagcagaagcagcccctgcaggtcgcgaagatacgaaaccagagcaaagcctcaggtagcgggttatgcgagggcgacgaggtggtttcgataaatggcaacccgtgtgccgatttgacttatccagaggttattaaactaatggaatcgatcacggactctctacaaatgttgatcaagcgacgagtgggggcgccattcctgtttttggaagatcagagccatcctcctttcctgcacctgttgggctacacctccctactcatcgttaccctggttaatcaacctatggactag

SEQ ID NO: 26044 - DNA, 1146 bp, synthetic construct
  source 1..1146: mol_type = other DNA; note = Synthetic coding sequence
atgcccctgcaggtgagcgactacagctggcagcagaccaagaccgcggtgtttctgtcactgcccctcaaaggcgtctgcgtacgtgataccgacgtattctgtacagagaattacctgaaggtgaacttcccccccttcctatttgaagcctttttgtacgccccaatagacgatgagtccagcaaagctaaaatcggcaacgacactatcgtgttcactctgtataagaaagaggctgccatgtgggaaacactatctgtaacaggtgtggacaaggagatgatgcagaggattagagaaaaatctatcctgcaggcgcaggagcgcgctaaggaggcaaccgaagctaaagccgccgccaagcgagaggatcagaaatacgcactaagcgtgatgatgaaaatcgaagaggaagagcgcaaaaagattgaggacatgaaggagaacgagcgaattaaagccacgaaggccctggaggcttggaaggagtaccagcggaaggccgaagagcagaagaaaatccagagggaagagaaattgtgtcagaaggaaaagcaaattaaggaagaacgtaaaaagatcaagtacaagagcctgacgagaaacttggcgtcgcggaaccttgcccccaagggtcgcaattctgagaatatttttacagaaaagttaaaggaggactccattccggctcctaggtcagtgggctccataaaaatcaattttactcccagagtgttcccaacagcgctacgggagagccaggtcgctgaggaagaggaatggttgcataaacaggccgaagcccgtcgggctatgaacactgacattgccgagttgtgtgatctgaaggaagaggaaaaaaatccagagtggctgaaagacaagggaaacaaattgtttgctaccgagaactacctggccgcaatcaatgcatacaacctagctattcgcctcaacaacaaaatgcccctgctttacctgaatcgggccgcatgtcatctgaagctgaagaacctgcacaaggctatcgaagacagcagcaaggaattttgttcactggagggcatcgaatgccaggcttctgaacccaaactttcccaccatatccctagtgatcttcacgtttacatccagatggcctag

SEQ ID NO: 26045 - DNA, 615 bp, synthetic construct
  source 1..615: mol_type = other DNA; note = Synthetic coding sequence
atggtgatggccgagggcaccgccgtgctgcggcggaaccggcccggtacgaaagcgcagtacatccaacagaatattagagcagattgctcgaatatagataagatcctggaacctccagaaggccaggacgaaggagtctggaagtacgaacacctaaggcagttctgtctcgagcttaacggtttggcagttaagctccaaagtgagtgtcaccctgacacctgtacccagatgaccgcgactgagcagtggatttttctttgcgccgcccacaagactccaaaagagtgcccagctatcgattacacccggcacaccctcgatggagcggcctgcctccttaacagtaacaaatattttcctagccgagtgtcaatcaaggagtctagcgtagctaagttagggagcgtctgcaggcgcatctaccgcatcttttctcacgcttactttcatcatcgccaaatattcgatgagtacgaaaatgaaactttcctatgtcataggtttacaaaatttgtgatgaaatacaacctgatgagcaaggacaacttaattgtgcctatcttggaggaggaggtgcagaatagtgtgagcggggaatctgaggcctag

SEQ ID NO: 26046 - DNA, 1293 bp, synthetic construct
  source 1..1293: mol_type = other DNA; note = Synthetic coding sequence
atggccgccaacctgagccggaacggccccgccctgcaggaggcctacgtgagagtggtgaccgagaaaagtccgaccgattgggcactgtttacatatgagggtaattctaacgacatccgcgtggccggaaccggggagggcggcttagaggagatggtggaggagctgaactccgggaaggtcatgtacgccttttgccgcgtgaaagatcccaactctggcctgcctaagttcgttcttattaattggacaggtgaaggtgtgaacgatgtacgcaaaggcgcttgtgcttcccatgtttccactatggctagcttcctgaagggagcacatgtgactatcaatgcaagagcagaagaagacgtggaacccgaatgtataatggaaaaagttgcaaaggcttctggcgcaaactattcgttccataaagagtctgggcggttccaggatgtgggtcctcaagcaccagtgggttccgtgtatcagaaaaccaatgcagtttctgagattaagagggtcggcaaagattctttctgggctaaggctgagaaagaggaggagaatagaagactcgaggagaaacgacgggcagaggaggcacagcggcaactcgagcaggagcgacgcgagagggagctgcgagaggctgccagaagagaacagcgataccaagaacaggggggcgaagcttcacctcaacggacttgggagcagcagcaagaagtcgtgtctaggaaccggaacgagcaggaaagcgctgtgcaccccagggaaatctttaagcaaaaggagcgtgccatgagtaccacctctatttctagcccgcagcccggaaagcttcgctctccttttttgcagaagcagctcacccagcccgaaacacatttcgggcgagagccagcagccgccatctcccgaccccgagctgatctgcctgctgaggaacccgcaccttctaccccgccatgcctggttcaagcggaagaggaggcagtgtacgaagaaccccccgagcaggagacattttatgagcaacctccgctcgtgcaacagcaaggcgccggatctgagcatatagaccaccatattcaagggcagggattgagcggtcagggcctctgtgctagggccttgtacgactatcaggccgcggacgataccgagatctcttttgatcccgagaatcttattacgggcatcgaggtgattgatgaggggtggtggagaggatacggaccagacgggcattttggtatgtttccggcgaattacgtggagctgattgaatag

SEQ ID NO: 26047 - DNA, 3189 bp, synthetic construct
  source 1..3189: mol_type = other DNA; note = Synthetic coding sequence
atggtgagcagcgcccagatgggcttcaacctgcaggccctgctggagcaactaagccaagacgaactgagtaaatttaaatacctgataacaaccttctctctcgctcatgaattgcagaaaatcccccacaaagaggtggataaggctgatgggaaacaactggtcgaaatactcaccacccactgcgactcctactgggtggaaatggctagcttgcaagtcttcgagaagatgcaccgtatggacctcagtgagcgagccaaagacgaagttcgcgaggcagcactgaaatcattcaataagcggaaaccactgtccctcggaattacccgtaaggagcggcctcccttggacgtggacgagatgctcgagaggttcaaaactgaagcccaagcatttactgagacgaaaggcaatgtgatttgtctggggaaggaggtcttcaagggaaagaagccagacaaggacaaccgctgcagatatattctaaagacgaaattccgcgagatgtggaagtcttggccaggcgactccaaggaggtacaagtaatggccgaaaggtacaagatgcttatcccattttctaatcctcgtgtgctccccggccctttttcgtatactgtggtattatatggtccagccggcctcggaaaaactacccttgcccagaagctgatgctagattgggccgaagacaatcttatacacaagtttaagtacgctttctatctctcttgccgagagctcagccgcctgggcccctgctctttcgctgagctggtattcagggattggcctgaactgcaggatgatattccccacattcttgctcaggccagaaagatccttttcgtaattgacggcttcgatgagctcggggcagcaccaggagccttgatcgaggatatttgcggcgactgggagaaaaaaaagccggtgcccgtactgcttggatctctgctgaacagggttatgctcccaaaagctgccttgctcgtgacaacccgcccccgcgctctgagggacctgcgcattttggcagaagagcctatttacatcagggtcgaggggtttctggaagaagatcgccgtgcatatttcctgcgccactttggtgatgaggatcaggccatgcgggcatttgagctgatgcggagtaatgcagcacttttccagttgggatccgctcctgcagtgtgctggatcgtttgtacaaccctgaagctgcaaatggaaaaaggcgaggatccggtccctacatgtcttacacggactgggctgttcctcaggttcctgtgttctaggtttccacagggagctcagttaagaggggccctgcggacactctccctgctcgccgcccagggtctgtgggcccagaccagtgtccttcaccgggaggacttggagaggttaggcgtgcaagagtctgacctgcgcctgtttctagatggcgacattctgcggcaggatcgagtctccaaaggatgctatagtttcattcatttatcttttcagcagttcctgacggctctcttctatactcttgagaaagaggaagaagaagaccgggacggccacacatgggacataggagacgtgcagaagctcttgtctggcgtggaacggctgcgaaaccctgacctgattcaagccggttactatagtttcggacttgcgaacgagaaacgggccaaggaactggaggcgacttttggctgcaggatgtcacccgacattaagcaagagcttctccgctgcgatattagttgtaagggtgggcactctacagtgactgatttgcaggagttgctcggctgcctgtatgagtctcaggaggaagagcttgtgaaagaggttatggcccagtttaaggagatctcactgcatctgaatgctgtggacgtggtcccctcaagcttttgtgtgaaacactgtcggaacctacagaaaatgtcactccaggttattaaagaaaacctgccagagaatgtgacagccagcgagagtgacgctgaggtcgagaggtctcaggatgaccagcacatgctccctttctggaccgacctgtgctcgattttcggcagcaataaggatttgatgggattggcgattaacgacagcttcctgagtgcttcgctggtcagaattctgtgcgaacaaatcgctagcgacacctgtcacttgcagcgggtagtgtttaaaaacatatcccctgcagatgcacatcgcaatttatgcctagccttgcggggtcataagacagtcacctacctgactctccagggaaacgatcaggacgacatgtttccagccctgtgtgaagttttgcgacacccagagtgtaatttgaggtaccttggacttgtatcttgctccgccacaacacagcaatgggctgatctgtcactagcacttgaggtgaatcagtctctcacctgcgttaacctgtcggacaatgagttgctagacgagggcgccaaattactgtacacgactctgaggcaccctaagtgtttcctgcaacggttatctttggaaaactgccatctgactgaggctaactgcaaggatctagcagcggtgctagtggtgtcccgagaacttacacatctatgcctggccaaaaaccccattggcaacaccggggtgaagttcttgtgcgaaggcctgaggtatccggaatgcaaattgcagactctcgtgctttggaactgcgatatcacaagcgacggatgctgtgatctgactaagcttcttcaggaaaaaagctccctcctgtgcttggatcttggcctcaatcacataggggtaaaaggcatgaaatttctttgtgaggccctacgcaaacctctgtgcaatctcagatgcctgtggctgtggggttgcagcattcctcctttctcatgcgaagatctctgcagcgctctgtcctgcaaccaatctctggtgacattagaccttggtcagaaccccttgggttcttccggggtgaaaatgctgtttgagacgctgacatgttcgagcgggaccctgcgtactctgcggctgaagatagatgattttaacgacgaacttaataagctcctggaagaaatagaggagaagaatccacaactgattattgatactgagaagcatcacccttgggcagagcgcccttcttctcacgactttatgatttag

SEQ ID NO: 26048 - DNA, 390 bp, synthetic construct
  source 1..390: mol_type = other DNA; note = Synthetic coding sequence
atggccgagctgatccagaagaagctgcagggcgaggtggagaagtatcaacagttacaaaaagatctatcaaaaagtatgtctgggaggcagaaactggaggcgcagctcaccgaaaataatatcgtgaaggaagagctcgccctgcttgatggctccaacgtagtctttaagctgctgggacccgttcttgtgaagcaagaattgggcgaggctagggctacggtgggaaagcgcctggattacatcacagccgagatcaagcgctacgagagtcagctacgagacctggaaaggcagtccgagcaacagagagagaccctggctcagttacagcaggagtttcaaagggcacaggctgcaaaggctggggcaccgggaaaagcctag

SEQ ID NO: 26049 - DNA, 516 bp, synthetic construct
  source 1..516: mol_type = other DNA; note = Synthetic coding sequence
atggaggtggccgagcccagcagccccaccgaggaggaggaggaggaggaagaacactcagcggagccacgacctcggacacggtctaatcccgagggagcagaggacagggctgtcggtgcccaagcctcggttggatccaggagtgaaggcgaaggcgaggctgcttctgccgacgatggttcactgaacaccagcggagctggccctaagagctggcaggtgccaccacctgctcccgaagtccaaattcggaccccgagggtgaattgtcccgagaaagtgattatttgcctcgacctatccgaggagatgtccctgcctaagctagagagcttcaacgggcagcagaaaaccgagctgccagtgactgaaaatgtacagacgattccaccaccatatgtggttaggactattttagtctattcccgtcctccttgccaaccacaattctctctcacagaacctatgaaggtcggagaggcatgggagagagaaggctgcctccagccttag

SEQ ID NO: 26050 - DNA, 1446 bp, synthetic construct
  source 1..1446: mol_type = other DNA; note = Synthetic coding sequence
atggccagcgccgccagcgtgaccagcctggccgacgaggtgaactgtcccatttgtcaaggaactctgcgagaaccggtgacgatagactgtggccacaacttctgtagagcgtgccttacaaggtactgtgagatccccggcccggacctcgaagagtcgccaacctgccctctgtgcaaagagccattccggccgggatcatttcgcccaaactggcagttagccaacgttgtggagaacatagaaagattacagctcgtttctaccttagggctgggggaagaggacgtctgtcaggagcacggagaaaagatttatttcttctgtgaagatgatgagatgcagttgtgcgtggtctgccgggaagccggcgagcatgccactcacacaatgcgtttcctggaggacgcagctgcgccttatagagaacagatccataagtgtctgaaatgtctgagaaaggaaagagaggaaatccaggaaatccagagtcgagaaaacaaacgcatgcaagtccttttaacccaggtaagtactaaaagacaacaggtgatcagcgagttcgctcacctgaggaaatttctggaagagcaacagtccattctgctggcccaactggagtcacaagatggggacattttgcggcagagggatgaattcgacttattagtggccggggagatctgcaggttttcggcccttatcgaggaactcgaggaaaagaatgagcgaccggcacgggaactgttgactgacataaggtcgaccctgatccgatgtgaaacaagaaaatgcagaaaaccggtggccgtgtcccccgagctgggtcagcggatccgggattttccgcaacaggctctgcctcttcagagggaaatgaagatgttcctggaaaagctgtgcttcgaattggactatgagcccgcacatatcagcctggacccacagactagccaccccaaactgctgctcagtgaggatcatcaaagggcccagttcagttataaatggcagaactcaccggacaatccccaacgattcgatagggcaacatgtgtcttggcacacaccggcatcacaggagggagacacacctgggtcgtgagcatcgacctggctcatggaggcagctgcactgtgggggtagtgagcgaggacgttcaacgtaagggtgagctgcgcttacgccccgaggagggggtctgggcagtgcgcttggcatgggggtttgtttctgccctgggatccttccccacacggcttacactaaaggagcagccgcgtcaggtgagggtgagcctggattatgaggtgggatgggttactttcacaaatgccgtcacccgggagcctatatacaccttcactgcctcattcacccgaaaagtgatccctttcttcgggctgtggggccggggcagcagtttctcccttagcagttag

SEQ ID NO: 26051 - DNA, 1986 bp, synthetic construct
  source 1..1986: mol_type = other DNA; note = Synthetic coding sequence
atgaacaccggccgggacagccagagccccgacagcgcctggcggtcctataacgatggaaaccaagaaacgctaaatggcgacgcaacctattcttccctggctgccaaaggcttcaggtccgtgcgccccaatctgcaggacaagaggtcacctacacagagtcaaatcacagtgaatggcaattctgggggagccgtgagtcctatgtcctactaccaaaggcccttcagtcccagtgcctactcacttcctgcctctctgaactcctccatcgttatgcagcatggcaccagcctggactccactgatacgtacccccagcacgcacagagcctggacgggactacttctagttccattcccctgtacaggagttccgaagaggagaagagagtgactgtaatcaaagcaccgcattatccggggatcggaccagtcgatgagagcgggatacccactgctatcagaacaactgtcgaccgtcccaaagattggtacaagacaatgttcaaacagatccacatggtgcataaacctgacgacgatacggatatgtataacaccccctatacctacaatgcgggtttgtacaacccaccgtatagcgctcagagtcaccctgccgcgaagactcagacctaccgccctctctctaagagtcattcagacaatagcccaaacgccttcaaagatgcaagctccccagtgccccctccccatgtgcctcctccagtccctccactgcgcccgcgggaccggtcgtccacagaaaagcacgactgggacccccctgacagaaaggtggataccagaaagttcagatctgagcccaggtccatctttgagtacgaaccaggtaagagtagcattctgcagcacgaacggcctccccccaaaaagcctctcgactacgtacaggatcattcctctggggtgttcaacgaggccagtctgtaccagagctccatcgacaggtccttagagagacccatgtcaagcgccagcatggcatctgacttcagaaaaaggcgcaagtcagagcccgctgttggtcctcccagagggttaggagatcagtccgcatcaaggacgtctccaggaagagttgacctacccggctccagtacaacacttactaaatcgttcactagttcatcacccagctctcctagccgggctaaagatcgcgaatccccccgcagctactcttccacccttacggatatggggcggtcagccccccgggagagaaggggcacgcccgagaaggaaaaattacccgccaaagctgtttatgactttaaagctcagacctccaaagagctgtctttcaagaagggagacaccgtgtacattctgcgcaaaatcgaccagaattggtatgaaggtgaacaccacggacgcgtgggcatatttcccatcagttacgtggagaagctgacccccccagaaaaagcccaacccgcgcgcccccctccacccgcacagcccggagaaattggggaagccatcgccaagtataattttaatgccgacaccaacgttgaactctctttgcggaagggagatagagtgatcctgctcaagcgtgttgaccagaattggtatgaaggaaagatccctggcaccaatagacagggtatctttccggtttcatacgtggaagttgtgaaaaagaataccaagggtgcagaagactatccagatcccccaatccctcacagttacagctccgatcggatacacagcctctcatcaaataagccacagaggcctgtgttcacccacgagaacatacaaggcggcggcgagcccttccaggccctctacaactatacgccccgaaatgaggatgagctggagctgagggagagtgatgtgatcgatgtgatggaaaagtgtgatgatggctggtttgtcggcacctcaaggcgcacaaaattcttcgggacctttcccggcaactatgtcaaacggttgtag

SEQ ID NO: 26052 - DNA, 483 bp, synthetic construct
  source 1..483: mol_type = other DNA; note = Synthetic coding sequence
atggaggccgagcggccccaggaggaggaggacggcgagcagggcccccctcaggacgaagaaggatggccaccacccaacagcaccactcgcccctggcgatccgcacctcctagcccccctccccctggtacacggcacaccgcactgggcccaaggtctgcttcactgttatccttgcagacagaactgcttctagatttggttgctgaagctcagtctcgccgcctcgaggaacagcgcgccactttctacaccccccagaacccgtcttccctcgctcccgcacccctccggccactggaagacagagagcaactctacagcacgattctctctcatcaatgccagcgaatggaagcacagagatctgagccacccctacctccaggaggccaggagctgttggagcttctccttagagtgcaagggggaggacggatggaagagcagcggtcccgtcctccaactcacacatgctag

SEQ ID NO: 26053 - DNA, 717 bp, synthetic construct
  source 1..717: mol_type = other DNA; note = Synthetic coding sequence
atggactgccgggagatggacctgtacgaggactaccagagccccttcgactttgatgccggtgttaacaagagttatttgtaccttagtccctctggtaattcgagtcccccagggtctccaaccctccagaagtttggattacttcggactgacccagtgcctgaggagggcgaggatgtcgctgccacaatcagtgctaccgaaactctgtccgaagaagaacaggaagagctacggcgagaactggctaaggttgaagaagaaatccagacgctctcacaggttctggccgcgaaagaaaagcacctcgccgagattaagcgcaagctgggcattaattctttacaggagttgaaacagaatatagccaagggatggcaggacgtcaccgctacctctgcttacaagaagacaagcgagactctgtcccaggctggtcagaaggccagtgcggccttctcctctgtaggatcagtcatcacaaagaaattggaggacgttaacattagatctattcagcattccatttccatgccggcaatgagaaactcgcccacttttaaaagcttcgaagagaaggtcgagaacctgaagtccaaagtgggcggtaccaagccagccgggggcgatttcggtgaggtgctaaattctgccgccaatgcttctgctaccactactgagccattacctgagaagacacaagagtcactgtag

SEQ ID NO: 26054 - DNA, 108 bp, synthetic construct
  source 1..108: mol_type = other DNA; note = Synthetic coding sequence
atgcagaccagcagcagccggagcgtgcacctgagcgagtggcagaaaaactatttcgccattacatccgggatctgtacgggccctaaagcggacgcttatcgctag

SEQ ID NO: 26055 - DNA, 327 bp, synthetic construct
  source 1..327: mol_type = other DNA; note = Synthetic coding sequence
atgacccggggcaaccagcgggagctggcccggcagaagaacatgaaaaaacagtccgacagcgtcaaaggcaagcggcgagatgatggattatctgcagccgccaggaagcagtccgccataacatctagccgaaatttcctttacccagcctatgtttacttcccttcgtctgtcccctccccccctcgaaaatatactcagacgtactatgcagcagttccggccgggtggtgggggagcggcggcgggcccgctacccagcccgcagcgggagggcgctggagatttctgcatatcctaggcacacagccacagagccactag

SEQ ID NO: 26056 - DNA, 846 bp, synthetic construct
  source 1..846: mol_type = other DNA; note = Synthetic coding sequence
atgggcgccggcaacctgccccccatcacccaggaggaggccctgcacatcctgggatttcaaccaccgttcgaggatataaggttcgggccctttactgggaataccacgcttatgcgatggtttagacagattaatgaccactttcatgttaaaggttgctcatatgttctgtataagccacacggcaagaataagacggccggcgaaacagccagtggagccctctcgaagttgactcggggacttaaggacgagagccttgcctatatctaccattgccagaaccactatttctgccctataggctttgaggctaccccagtgaaggcgaataaggcattttctcgcggacctctctccccacaggaggtggagtactggatcctgatcggcgaaagctctcgaaaacacccagctatacattgcaaaaagtgggctgatatcgtgacagatctgaacacacagaatccagagtatcttgacatccgccacctggagcgcggccttcagtatcgaaagaccaagaagcccacctttttttcctcgcaggtgggtggcaaccttcactgcatcatcgcatttcagagactgaactggcagagatttggcctgtggaacttcccgtttgggacgattcggcaggagagccagccacctactcatgctcaggggattgccaagtcagaaagcgaagataatatttcaaagaagcagcacgggagactgggcagatctttcagcgcatcgttccatcaggactcagcctggaagaagatgagcagtattcacgagagacgtaactccggctaccagggctactcggactacgatgggaatgactag

SEQ ID NO: 26057 - DNA, 213 bp, synthetic construct
  source 1..213: mol_type = other DNA; note = Synthetic coding sequence
atgcgggccctgaccgtgcagcgggtgaagttcgccatggacctgcctctgctgaaacgcgctggccaggacctagccgagaaaacaaagaacttcgttagtaggtcgctggtcatcggcgaagtcctttctatggccgacatggcaacaggcgtaaaatgcggcatcatttactggctcttcggcggagcgatccgaaatctgggaagctag

SEQ ID NO: 26058 - DNA, 1644 bp, synthetic construct
  source 1..1644: mol_type = other DNA; note = Synthetic coding sequence
atggccggcaccaagaacaagacccgggcccaggccaagaccgagaagaaggctgccattcaagccaaggcaggcgctgaaagagaggctacaggggtcgttcggccagttgcgaagaccagggcgaaagccaaggccaagaccggttccaaaaccgatgcggtggccgagatgaaggcagtatcaaagaacaaggtcgtggctgagaccaaggaaggcgcgctaagcgaaccaaaaactttgggcaaagcaatgggcgatttcactcccaaagcaggtaatgagtctacgagctccacatgtaagaatgaagccggaaccgacgcttggttttgggctggtgaggaagctactatcaactcctggttttggaacggcgaggaggctggcaattcattttctacgaaaaacgacaagccggaaatcggggcacaggtctgtgcggaggaattggaacctgctgccggcgccgactgtaaacccaggtctggcgccgaagaggaagaggaagagaatgtgatagggaactggttttgggagggtgacgataccagctttgaccctaaccctaaaccggtcagtagaattgtcaaacctcagcccgtctacgaaatcaacgagaaaaatcgtcctaaagactggagcgaagtgaccatctggcccaacgcgcctgccgttacccctgccgtgctgggattccgctcacaagccccttctgaagccagtccaccatcgtatatcgttttggcctctgccgaggagaacgcctgcagcctgccagtggctactgcatgccgccccagcagaaatacccgaagctgtagccagcctatccccgaatgtcggttcgactctgacccatgcatccaaaccatcgacgagatccgcagacaaatacggatccgcgaggtgaatggcattaaaccatttgcctgcccctgtaaaatggagtgctacatggacagcgaagaatttgaaaaactggtgagtcttctgaaatccaccaccgacccattgattcacaagattgctcgcatcgctatgggcgtccataatgtccacccatttgcccaggagtttattaatgaagtgggcgtggtaactctaatagagtcactgctgtccttcccttcaccagaaatgaggaaaaaaactgttattactcttaatcccccatctggagatgagagacagcgaaaaattgagctccatgtgaagcacatgtgcaaagagaccatgagttttcccttaaactcacctggacagcagtctgggctcaagattctggggcagcttaccactgactttgtgcaccactatatagtggctaactatttctctgaattgttccatcttctctcttccggcaattgcaaaaccaggaatctggtactcaaattgctactgaatatgtccgagaaccctacagccgcgcgggatatgatcaacatgaaggcactagccgcactgaagctaatcttcaaccagaaggaagccaaagctaacttggtgtcaggagtggctatttttataaatattaaagaacacatacggaagggttcaatagtggttgtcgaccatttgtcctataacactttgatggccattttcagagaggtgaaggaaattatagaaactatgtag

SEQ ID NO: 26059 - DNA, 489 bp, synthetic construct
  source 1..489: mol_type = other DNA; note = Synthetic coding sequence
atgagctacaactgctgcagccggaacttcagcagctgcagccacggcggatatctccactatcccggatcatcctgcggctccagctatccaagcaacctggtgtacagcactgacctctgttcaccaagcacgtgccaattaggttcgtcactttaccgggggtgccaggaaacctgttggcgccctaactcatgtcagacattttgctactaccctcggacccatatgctatgcaactcctgtctgactatgcatgttggcagtcggggattcggctcaaatagctgctgttctctgagctgcggctctcgaagttgtagctctctgggctgcggctctaacggctttagatatctcaactaccgcatacacacctctccatcccagagttaccggtctcgcttctgtcacccgatctattttccgccgagaagatggttccactcgtcctgttatcagcctttctgcagaagtggcttctattag

SEQ ID NO: 26060 - DNA, 495 bp, synthetic construct
  source 1..495: mol_type = other DNA; note = Synthetic coding sequence
atgttcatcagcttctacgacttcaagaacatcccccaggacagcagatgcgatggacaattatttatcaatgggagaaacaataaaaacaacagtattagcttatacttccagggcggccttcgccacgcaagtgcctctatcggcggcagtgaagcttatcggcacatgaagttcgaaggcggcgtgcatcgagtgcagagggttcctaaaaccgagaagcagggacgggtgcatacctccactatgaccgtggctatcttgcctcagcctactgaaatcaacctggttatcaaccccaaagacctgcggatcgacactaagagagcctcaggcgccggcggtcagcacgtgaacaccacggatagtgctgtgcgaatcgtgcacctcccaaccggggtcgtgtccgaatgtcagcaagagaggtctcaactgaaaaataaggaattagctatgacgaagctgagagcgaagctgtattcaatgcacttatag

SEQ ID NO: 26061 - DNA, 2166 bp, synthetic construct
  source 1..2166: mol_type = other DNA; note = Synthetic coding sequence
atggaggaggagctgaagtgccccgtgtgcggcagcctgttccgggaaccaatcatcttaccttgttcgcacaacgtctgccttccctgtgcccgtacgattgcagtgcagacccctgacgggggatccgctgccggcgggctggggggcggcgcagggggcgggggtgatcacgctgacaagctttctttgtacagtgagaccgacagtgggtatggcagctatacgccatctttgaagagccctaacggcgtgcgcgttctcccgatggttcctgccccacccggttcaagtgctgcagccgcgaggggagcggcatgcagctcacttagttcgtcaagctcatccatcacgtgcccgcagtgtcaccgatcggcatcactggaccatcgcggcctgcgggggttccagagaaacaggctgctggaagcaatcgtgcaaagataccagcagggacgtggagctgtgcctggaacatccgccgccgcagctgtggccatctgccagttatgtgacagaacaccacctgagcctgccgccaccctttgtgagcagtgcgatgtactctactgttcagcatgtcagctgaagtgccacccaagccgtgggcctttcgccaagcaccggttgggcgctccgagtggaggagggggctgcaagtccccaggaggtgccggagctggcgcaacggggggatctacggccagaaagtttccaacatgccccgaacatgagatggaaaattattctatgtactgcgtcagctgtcggacaccagtgtgctatctttgcctggaggagggaaggcatgccaagcatgaggtgaaaccactcggggcaatgtggaaacaacacaaagcacagcttagtcaggcactgaacggagtctccgacaaagccaaggaggcaaaggaattcctggttcagctcaaaaatatactccagcagatccaggaaaatggtctggattacgaagcatgcttagtggctcagtgtgatgctctggttgatgccttaaccagacagaaggcgaaattactcacaaaggtcacgaaagagagagagcacaaactgaagatggtatgggatcagataaatcactgtacacttaagttaaggcaaagtacaggcctcatggagtattgcctagaggtgattaaggaaaatgatccaagtggcttcctccaaatttctgatgccctcattaagagggttcaggtgtcacaggagcagtgggtgaagggggcgctggaacctaaagtctccgccgagttcgatctgaccctcgactctgagcctctgctacaagcaatccaccaactggatttcatccaaatgaaatgcagggtaccgcctgttccactcctgcagctggaaaagtgttgcactcggaataattctgtaaccctggcctggagaatgcccccttttacacactcacccgtagatggctacatcctagaactagatgatggcgcgggcggacagttccgtgaggtttatgtgggcaaggagacactttgtactattgatgggctgcacttcaattcaacctacaatgcacgggtgaaagcctttaatagttctggggtgggcccttacagtaaaacagtggtgctgcagacctctgacgtcgcatggtttacttttgatcccaatagtggacacagggatatcatcctttctaacgacaaccaaactgcaacttgcagctcctacgacgatcgtgtagtgttgggtacagcggccttctccaaaggcgtacactactgggagcttcatgtagatcgctacgataatcaccccgacccagcctttggcgttgcccgcgcttccgtggtaaaagacatgatgctgggcaaggatgataaagcatgggctatgtatgtggacaacaacaggtcatggttcatgcactgtaactctcacaccaatagaactgagggaggggtgtgtaagggggccactgtgggcgttctcctggacctgaacaagcatactctaactttctttatcaacggccaacaacaaggaccaacagcattcagccacgttgacggcgtatttatgccagcactctctctgaaccggaacgtgcaggtgaccctgcatacaggactggaggttcctaccaacttaggcaggccaaaactatccggcaattag

SEQ ID NO: 26062 - DNA, 1479 bp, synthetic construct
  source 1..1479: mol_type = other DNA; note = Synthetic coding sequence
atggacttcctgctgggcaaccccttcagcagccccgtgggccagcggatcgagaaagccacggacgggtctttacaatccgaagactgggcactcaacatggaaatttgtgacatcatcaacgaaactgaggaggggcctaaagatgctctcagggccgttaagaaaaggatcgtgggaaataaaaactttcacgaagttatgctggccctgactgtgctggagacctgcgtgaagaattgtggacacagattccatgtgctcgtggccagccaagacttcgtggaaagcgtcttggtacgcacaattttacccaagaataatcctcccactatagttcatgacaaggtcctcaaccttatccagtcttgggccgatgcctttaggagcagcccagacttaaccggagttgtgaccatatacgaagacctgagacggaaaggtctagagttcccgatgactgatctagacatgctgtcccctattcacacccctcagcgaacagtgttcaactccgaaacacaatccggccaggattctgtgggtaccgactcgtcccagcaagaggattcgggacagcacgcggcccctctgcctgctcctccaatactctccggagacacgcctatcgcaccgaccccggaacagatcggtaagcttaggagcgagctcgagatggtttccggcaacgtccgcgtgatgtccgagatgttaactgaactggttccgacgcaggccgagccggcagatctcgaactgttgcaggagttgaacaggacttgcagagctatgcagcagcgcgttctcgagctaattccacagatcgccaatgaacagctgacagaggaacttctgatcgtgaacgacaacctcaataacgtctttctccgccacgaaaggtttgagcgatttaggactggtcagacaacaaaggccccctccgaggctgagccggctgcggacctcattgacatgggacctgacccagctgccaccggcaacttgtctagccagctggccggcatgaatcttggctcaagcagcgttcgagcaggtctccagagcctggaagcttccggccggctggaggacgaatttgatatgttcgccttaactcgcggaagctccttagccgaccagagaaaggaagtgaagtacgaagccccacaagcgaccgatggcctcgctggagccctggacgccaggcagcagtcgaccggcgctataccggttacgcaggcttgtctcatggaggacattgagcaatggctttctacagacgtcggcaatgatgccgaggagccaaagggtgtgacatctgaagaattcgataagttcctggaggagcgggcaaaggctgccgataggttgccaaatctgtccagtccctctgcagagggcccccctggtcctcccagcggaccggccccccgcaaaaagacacaggagaaagacgacgacatgctttttgctctctag

SEQ ID NO: 26063 - DNA, 747 bp, synthetic construct
  source 1..747: mol_type = other DNA; note = Synthetic coding sequence
atggccaccagcgcccccctgcggagcctggaggaggaggtgacctgtagtatatgcttagactacttacgcgatcccgttaccattgactgcgggcacgttttttgtcgctcctgtaccacagacgttaggcctatctcagggagcagacccgtgtgccccctgtgtaagaaaccctttaaaaaggaaaatattagaccagtttggcagctggcgagtttagtagagaatatagagcgtttaaaggtcgataaagggagacagcccggggaagtgacccgggaacaacaggatgcaaaactttgcgagcggcaccgagaaaagttgcattactattgcgaggatgacggtaagttactgtgtgttatgtgtcgcgagagtcgcgaacacagaccccacactgcagttcttatggaaaaagccgcacagccccaccgggagaagatcctgaatcacttgtcaactttgaggcgcgaccgagataagattcaagggtttcaggctaagggcgaagccgatatcctggcagccttaaagaagctgcaagaccagagacagtatatcgtggcagaatttgaacagggacaccagttcttgcgtgagcgcgaggaacacctccttgaacagcttgccaagctggagcaagaactgacagagggccgggagaagtttaaatctaggggagtcggcgagctcgcacgacttgcccttgtgattagcgagctggaggggaaggctcagcaatag

SEQ ID NO: 26064 - DNA, 21 bp, synthetic construct
  source 1..21: mol_type = other DNA; note = Synthetic coding sequence
atgagccggcggcggttctag

SEQ ID NO: 26065 - DNA, 165 bp, synthetic construct
  source 1..165: mol_type = other DNA; note = Synthetic coding sequence
atgagcgagcagggcgacctgaaccaggccatcgccgaggagggcggtaccgagcaggagactgctacaccggagaacggcattgtgaagtctgaatcgttagatgaggaagagaagctcgagcttcagagacgccttgaagcacagaaccaggagcgccgctag

SEQ ID NO: 26066 - DNA, 1446 bp, synthetic construct
  source 1..1446: mol_type = other DNA; note = Synthetic coding sequence
atggccagcgccgccagcgtgaccagcctggccgacgaggtgaactgtcccatctgccaggggaccctgcgcgagcctgtgaccatcgactgtggtcacaacttctgtagagcctgcctgacaagatactgcgagatccccggacccgatctagaggaatccccaacttgccctctctgtaaggagccattcagacctggaagtttcagaccaaactggcagttagccaatgtcgttgagaacatcgaacgcctccagttagtgagcacccttggactgggagaggaggacgtgtgtcaggaacacggcgagaagatttactttttttgcgaagatgacgagatgcagctgtgtgttgtgtgccgtgaagctggggagcatgcgacccacacgatgcgctttctggaggatgcagctgccccttaccgggagcagattcacaaatgtctcaagtgtctgaggaaggagcgagaggagatccaagaaatccagtcacgggaaaacaagaggatgcaagtgcttctaacccaggtgtccacgaagaggcagcaagtcatcagtgagtttgcccatctccgcaagttcctagaggagcagcagtcaatcctcctcgctcagttagaaagccaggatggagacattctgcgccagagagacgagtttgacctgctggtggcaggtgagatttgtagattcagcgcactgattgaggaactagaagagaagaacgaaaggcccgcccgggagctcctgaccgatatacggagtaccctgatccgttgtgagactaggaagtgtaggaagcccgtcgctgtttctcccgaactgggtcaacgaatcagggatttcccccagcaggcgctgcctcttcaacgagagatgaaaatgtttctcgaaaagctgtgctttgaacttgattatgagcctgctcatattagcttggacccccagacgtcccacccgaagctcctcttgtctgaagaccatcagagagctcagtttagttataagtggcagaatagtcccgacaacccccagcggtttgaccgcgctacatgtgtgctggcccatactgggatcaccgggggtcgtcatacatgggtcgttagcattgacctagcccacggcggctcttgcactgtgggagtcgtgagcgaggatgtgcaacggaaaggagagctgcgactccggcctgaggagggggtttgggcagtgagacttgcatgggggtttgtgtccgccctgggcagcttccctactcggctgaccttgaaggagcagcccaggcaggtgcgggtctccctagactatgaagtggggtgggtcacctttaccaacgctgtgactagggaacctatctataccttcaccgcatctttcacccgcaaggttatccctttttttggcctttggggccgcggcagctcttttagcctgtcctcatag

SEQ ID NO: 26067 - DNA, 312 bp, synthetic construct
  source 1..312: mol_type = other DNA; note = Synthetic coding sequence
atgggccagcagagcagcgtgcggcggctgaagcggagcgtgccctgcgaatctaatgaggccaacgaggcgaacgaggccaataagacaatgccggagaccccaactggggacagcgacccacagcccgcacctaagaagatgaagacgtcggaaagcagcacgattcttgtggtgaggtatcgccgtaatgttaaacgcactagccccgaagaactcgtgaatgaccatgcgagggagaaccgcataaatcccgaccagatggaggaagaagagtttatcgaaattacaaccgaacggcctaagaaatag

SEQ ID NO: 26068 - DNA, 2919 bp, synthetic construct
  source 1..2919: mol_type = other DNA; note = Synthetic coding sequence
atggagcggatgaactggctgagccggctggccagccggggccccggtcatcggatcccgcagggtgccaatcttcaaaccccggtgatggccgatcctgagacctgcctgatggttttcaaaaatcactggtctcaagtcgtgcgtatcctcgagcgtcagggacccagggcagcccccggcggggcagacgatcttagcgccgtcagaaatcatacataccagatgctgacactgctcgccgaagatcgagccgttccatctgcacccacaggacctggcccgctcttagaattcgctttacatgaggatctcctcacaagagtcttgacttggcaactgcaatgggatgagctgggagacggcgttgaggaacggcgggccgaacagctcaagttatttgagatgcttgtgtccgaggcccgacagcccctcctgcgccacggcccagtgcgggaggcactgttgacactgttggatgcatgtggtagaccggttccctcctcccccgccctcgacgagggacttgtgctgctgctcagtcagctctgcgtgtgcgtggcccaagagccttctctgctggaatttttcttgcagcccccacctgagcccggtgctgcacctagactcctacttttcagcagattggttccctttgtgcacagagaaggtaccttgggccagcaggcccgggacgcactactcttactgatggccctcagcgccgggagtcccaccgtcgggcgctacatcgcagaccatagctacttctgtcctgttttagccaccggcctgagtgctctgtacagcagcctgcccaggaaaatagaagttccgggggacgactggcattgccttaggcgcgaagactggttgggtgtgcctgccctggcgctgttcatgtcatcccttgagttttgtaacgcagtaatacaagtggcgcatcccctcgttcaaaagcaactcgtggattatattcacaacggattcctggtgccagtgatggggccggcgctgcacaagaccagcgtggaggagatgattgcatctaccgcttacctagagctgttcctgaggtctataagcgagccagctctgctgcggaccttcctgagatttttactgttacaccggcatgatacacatactattctggatacactggtggcacgcattggttctaacagccgactgtgcatggtgtcactttccctctttagaactctgctgaatctgtcttgtgaggacgttttgcttcaactggtactgcgatatctggtaccctgcaatcacgtgatgctcagccaaaagcctgctgtgcgggacgtggatctgtatggaagagccgccgataaatttctcagtcttattcctcggtgctgtcggcaccatgcgccttctcccccgaggcctgagcacgcatcctgggcgcggggtccaggctcaccttcagtcgactcgtcaagcgttacaacagtgccacgtcctagtaccccatccagattggcattgtttctccgtcaacagagcctgggaggatccgagtcaccaggacctgccccctgtagccccggcttaagcgcctcaccagccagcagtcctggcagaagaccaacgccagccgaagaacccggagaactcgaggacaactatttggagtacttacgagaagcccgcaggggtgtagacaggtgcgtgagggcctgcaggacctggtcagcaccatatgacggagagagaccctcccctgaaccttcccctttcggaagccgaacgaagaagcggagcctactaccagaggaggatcggaacaatgtcggggagggggaggaagaggaactgggaagacgcgggcgcgctggaggggcgggtgaggggccaggccacctgccccccccccaattgaatggcgtgccaggcagctggcctgaaggggcaaagaaagtgcgactagttccaaaggaaggggccggagaacttttagaaggtatctcagaaggtatggccggcctcgaaggatttggacaggaactcagagaactggaggtagcactcagcaatgggggaactggttccgaaagcccgcttgagcctccgttaccactagaagaggaggaggcgtatgaatcttttacctgtccacccgagccaccaggcccttttttaagtagcccactgagaacacttaaccagctgcctagccaacccttcactggacccttcatggccgtcctattcgccaagctggagaacatgctacaaaatagcgtttatgtgaatttcctgctgaccgggttggtcgctcagcttgcttgccacccccaaccacttctaaggtctttcctgcttaacaccaacatggtgttccagccatctgttaagagcctgttgcaggtcctgggatctgttaaaaacaagattgagaattttgccgccagccaggaggattttcctgccctgctttccaaagccaagaagtacttgattgcgaggggtaaattggattgggcagaaggccccgccgctgggcctgcccctcgcaggtctgaccccctggtcaagtcacggagaccatctttaggcgaactactgctgcggcacgcccattcgcccacgcgcgcgaggcaagccgcccagctggttctgcagcctggtagagacggtgccggtcttggcttgagcggcggctcccctggggcaagcacacccgttctgctgacccggggcggggctccagagcgtcagggggaggccctgagagtgaaaaacgccgtttactgtgcggtcatttttcctgaattccttaaggaactcgcagctatatcacaggctcacgccgtgacctcaccattcctgctcgagactagtgaggagggatctggcccattgatttccggatgcggacctctgaacccttag

SEQ ID NO: 26069 - DNA, 1929 bp, synthetic construct
  source 1..1929: mol_type = other DNA; note = Synthetic coding sequence
atgaagatcttctgcagccgggccaaccccaccaccggcagcgtggaatggcttgaagaggatgagcactacgattaccatcaggagatcgctcgtagcagctacgccgatatgctgcacgataaagatcgggtgttcaagccaatggctgatgcagccgtgaagatcgtcgagaaaaacggcttcagcgataaaatcaaagtgatcaataagcactccacagaagttaccgtgggacctgagggagacatgccctgccgggctaacattttagtgaccgaactgtttgatactgagctgattggggagggggccctgccttcctacgaacacgcccacaggcacctagtggaggagaactgcgaggctgtaccacatcgggcaaccgtgtacgcccagctggtggagtccggaagaatgtggtcctggaacaagttatttcccattcatgtccaaacaagcctgggggaacaggtaatagtgccacccgtggatgtagagagctgcccaggagcccccagtgtgtgcgatatccagctcaatcaggtcagccccgccgactttactgtgctgtccgatgtgctccctatgttttcgatagacttttcgaagcaggtctcttcaagtgctgcgtgtcactcgagacggtttgagcccctgacctcagggcgggcccaagttgtgctctcgtggtgggatattgagatggaccccgaggggaagataaagtgtacgatggccccattctgggcccacagcgaccccgaggagatgcagtggagagatcattggatgcagtgcgtgtatttcttgccccaggaagagccagtggtgcaggggagcgccctgtatctagtcgcacatcacgacgactattgcgtttggtactccttgcagaggacttctcccgaaaagaatgagcgtgttagacagatgcgccctgtatgcgactgtcaggcgcacctcctgtggaaccgtccccgcttcggtgaaataaatgaccaggataggaccgatcgctacgtgcaggcactccgcacagttcttaaaccggactcagtttgtttgtgtgtctctgacggctccttgctttccgtgctggcccatcacctgggcgtggagcaagtgtttaccgtcgaaagcagcgcagcaagccacaaactgttgaggaagatttttaaagcaaatcacttagaagacaagatcaatattatcgaaaaacgccccgaattgctcacgaatgaggatcttcaggggcgcaaggtttcactgctcctgggcgaacctttctttacaacttctctgctgccctggcataatctgtatttttggtatgtgcggacagcggtggatcaacatctggggcccggtgccatggtgatgcctcaggccgcttccttacacgccgtggtcgtggaatttagagatctctggaggattcggtctccctgtggggactgtgaaggctttgatgtgcatatcatggatgacatgatcaagagggcactggacttcagggaaagcagagaggcggaaccccaccccctgtgggagtacccatgccggagcttatccgaaccatggcagatcttgacttttgattttcaacagcctgtgcccctccagcccctctgtgcggagggcaccgtggaactccggcggcctggccaatcgcacgctgccgtgctgtggatggaataccatctcacacctgaatgcacattatctactggactcctcgagcctgctgacccggagggcgggtgttgttggaacccccattgcaagcaagctgtgtacttctttagccccgccccagacccacgtgctttactgggaggtcccagaaccgtctcttacgctgtggagttccacccagatactggggacattattatggaatttcgccatgccgacactccagactag

SEQ ID NO: 26070 - DNA, 1935 bp, synthetic construct
  source 1..1935: mol_type = other DNA; note = Synthetic coding sequence
atgagcgtgaccctgaccagcgtgaagcgggtgcagagcagccccaacctgctggctgcaggcagggactcacaatcccctgactctgcgtggagatcatataatgatggcaatcaggagacactcaacggggatgctacgtactcctcacttgcagcaaaaggattcaggagcgtccggccaaacctgcaagataagcggtctccaactcaatcccagataacagtaaacggcaactcaggcggcgccgtgagtccgatgagctattaccagaggccctttagcccctcggcatattcacttcctgctagcttgaactcttctatcgtaatgcagcacggaacaagcctggacagcactgacacttacccgcagcatgcccagagcctggatggcacaaccagtagctccatccccctgtaccgcagctctgaggaagaaaaaagggtgaccgtcataaaagcgccccattatccaggcatcgggcccgtggatgagtcgggtatccccaccgccatcaggactacagtggatagaccgaaggattggtacaagaccatgttcaagcagatccatatggttcacaaacccggcctgtataacccaccttactctgcccagtcccaccctgcagctaaaacccaaacatacaggcctctgagtaaatctcatagcgataatagccccaacgcctttaaagacgctagcagtcccgtgcctcctccccacgtcccccctccggtgccccctctacgccctcgggataggtcgagcactgagaaacacgactgggacccccccgatagaaaagtcgacacccgcaagtttagatctgaacctagaagtatatttgaatacgagccaggtaagtcctcaatactacagcatgaaagaccagccagcttataccaaagctcaatcgaccgctccttggagagaccaatgagctcagcaagtatggcatccgacttccgcaagagacgaaagtcagagcctgccgtgggccctcccaggggcctgggcgaccaaagtgccagcagaaccagtcccggaagagtggatcttcccgggagtagcactaccctgaccaaatcttttaccagttcctctccgagctcaccctcacgagccaaagaccgagaatctcccagatcatactcaagtacgctgaccgacatgggccggagtgcacccagagagaggcggggcaccccagaaaaggaaaaactgcccgccaaagccgtgtacgattttaaggctcaaacctcaaaagaactatcctttaaaaaaggagacacggtctacattctgcgtaaaatcgaccagaattggtacgagggtgaacatcacgggagggtggggatctttccaatctcatatgtagaaaagctgactccgccagagaaggcccagccagctcgcccaccgccccctgctcagcccggagaaattggcgaggctattgcgaaatacaatttcaatgcggacacgaatgtggaactctctctacggaaaggggatagggtcatactgttaaagcgcgtggaccagaattggtacgagggcaaaatcccaggaaccaacagacaaggcattttccccgtatcatacgtcgaggtggtaaagaagaatacaaagggagctgaggactatcctgaccctcccatcccacatagctattcatctgataggattcacagtctgtccagcaacaaaccacagaggcccgtgttcacccatgagaatattcaaggcgggggagaaccctttcaagccctgtataactatacgccccgcaacgaggacgaactggagctgagggagtcagacgtgattgacgtcatggagaaatgcgacgatggttggttcgtggggacatctagacgaacgaagttttttggtacctttccaggtaactacgtgaagcgcctgtag

SEQ ID NO: 26071 - DNA, 294 bp, synthetic construct
  source 1..294: mol_type = other DNA; note = Synthetic coding sequence
atgggcaagagctgcaaggtggtggtgtgcggccaggccagcgtgggtaaaactagcatcctggaacagctcctgtatggcaaccatgtcgtcggctctgagatgatcgaaacacaggaagatatttacgttggcagtattgagacagatagaggcgtcagagaacagatagcagagtctctcttcagcgtctggtcttgttcccgtagaaggctaactaacccccgcacccggagaaggtctccgtcctggtcactcgccaccagcgtgacatacagaagcagcggagtttag

SEQ ID NO: 26072 - DNA, 915 bp, synthetic construct
  source 1..915: mol_type = other DNA; note = Synthetic coding sequence
atgagcaagacccacgaccaccagctggagagcagcctgagccccgtcgaggtgttcgcaaaaacctctgcctcccttgagatgaatcagggcgtctccgaggagcgaattcacctaggaagctcgcccaaaaaaggcggaaactgtgacctgtcacatcaggagagactgcagagcaaatcattgcacttgtccccccaagagcaatccgcgtcctaccaggacagacggcaaagctggcggagagcatcaatgaaggaaaccaaccggcgaaaatcactgcaccctatccaccagggaatcacagaactgtcaaggtccatatcagttgatctggcagagagcaagcggctcggatgcctcctactgtcctcttttcagttctcaattcagaaattggagccattcctgcgcgatacaaaggggttcagcctggaaagcttccgagctaaggcctcgagcctctcagaagaactgaaacactttgccgacggccttgagacagacggaactcttcagaaatgcttcgaagatagcaacggcaaagcaagcgatttctcactcgaggcctcagtggccgagatgaaggagtacattaccaagttctcgttagagcgccaaacctgggatcagctgttattacactaccaacaggaggctaaagagatcctgagtaggggctccacagaggccaagatcacggaggttaaagttgagccaatgacttacctgggatcctcacaaaacgaagtcctcaacacaaagccagattaccagaaaattctccaaaatcagagcaaagttttcgactgtatggaactggtgatggacgaacttcagggatccgtcaaacagctccaggcattcatggacgagtccacacagtgctttcagaaagtttcggtgcagctgtag

SEQ ID NO: 26073 - DNA, 1842 bp, synthetic construct
  source 1..1842: mol_type = other DNA; note = Synthetic coding sequence
atggccaccatccccgactggaagctgcagctgctggcccggcggagacaagaagaggcatccgtgagaggacgggagaaagcggagcgtgagcggctgtcgcaaatgcctgcatggaagcgaggtctcctcgagcgccggcgagcgaagctcgggctttcccctggtgagcccagccccgttctcggcactgttgaagcaggcccccctgatcctgatgaatccgctgttttactagaggcaatcggacctgtgcatcaaaatagatttataaggcaggagcgacagcagcaacagcagcagcagcagagaagcgaggagctgctggcagaacgaaagccgggccccctggaagcacgggaacggagaccctcaccaggtgagatgcgcgaccagagcccaaaaggaagagagagccgcgaggagagactcagtcctcgggaaacgcgagagcggagactcggcataggaggagctcaagaattgagtttacgccccctcgaagcccgggattggcgacaaagtcccggagaggtcggagacagatcgagcaggctaagtgaagcctggaagtggcggctgtctcctggggaaacacccgaacgcagccttcgactagcagagagccgcgagcagagccctcggcgcaaggaagtggaatccagattatcccctggggagagtgcgtaccaaaagcttggtttaacagaggcccacaagtggagacccgactctagggaaagtcaggagcagtcgctagttcagctggaggcaacagaatggaggctgcgttccggagaggagcgccaggattattcagaggaatgtggccgcaaggaggagtggcctgtgcctggagtcgctcccaaggaaactgctgaactgtctgagactttgacccgagaggcgcaaggaaattcaagtgctggagtggaggccgccgaacaacgccccgttgaggacggcgaaagaggcatgaagcctacggagggatggaagtggactctcaattcaggcaaggcccgcgagtggacaccccgcgacatcgaggctcaaacacaaaagcccgaaccgccagaatcggcagagaaactcttggagtctccgggagtagaagccggagaaggagaagctgaaaaggaggaagccggcgcccagggaagacccttaagggcgctgcagaattgctgtagcgttccctctccgctaccccctgaagacgctgggactggtggactgaggcagcaggaagaggaggccgttgaacttcagccaccccctcctgctcccttgtctccaccaccaccagcccccaccgcaccgcagcctcctggcgacccactgatgtcacgactgttttatggtgtcaaggctggtcccggtgttggtgcacccaggcgctcgggccacaccttcactgtcaatcctaggcgttctgtgcctccagccactcctgcaacccccacatcccctgcaaccgtggacgccgcagtcccaggtgcaggcaagaaacgctatccaacagccgaggaaatattagtgctgggagggtaccttaggctgagcaggtcttgcctggcaaaaggctctccggaacgacaccacaagcaactcaagatatcatttagtgaaaccgctctcgagacgacttatcaataccccagtgaatcttctgtgctagaggagcttgggccggagcccgaagtgccttctgcacctaaccctccggcagctcagcccgacgatgaagaggacgaggaagagctgctgctcctgcagcccgagttacaggggggtctgcgcacaaaagctctgatcgtggacgaatcttgcaggagatag

SEQ ID NO: 26074 - DNA, 1560 bp, synthetic construct
  source 1..1560: mol_type = other DNA; note = Synthetic coding sequence
atggagggcgtgctgtacaagtggaccaactacctgagcggctggcagcctcggtggtttctgttatgtggcggtatcttgagctattatgacagccctgaggatgcctggaagggctgtaagggttccatccagatggctgtgtgtgagatccaagtccactccgtggataatacacgaatggatctgattattcctggagagcagtacttctacctgaaagcaaggagcgtggcggagcgtcaacggtggcttgtggccttaggaagcgcgaaggcgtgtctcacggactcccggactcagaaggagaaagagtttgccgagaacaccgagaatctgaaaacaaagatgtccgaactgcgactgtactgcgacttactggtccagcaggtggataagaccaaggaggtgacgaccacaggtgttagcaattcggaggagggcattgacgtaggcaccttattgaagagtacatgcaataccttcctcaaaactttggaagagtgcatgcagatagccaacgccgccttcacttccgaactcctctaccgaacaccacccggtagcccccagcttgcaatgctgaaaagttctaaaatgaagcaccctattattcctatccacaacagcctggaacgccagatggagctgtccacctgcgaaaatggttccctgaacatggaaattaacggagaagaagagattttaatgaagaacaagaacagcctttatctgaagagcgctgagattgactgctccatctcaagcgaagagaacacagatgataatatcacagttcagggagagattcgaaaggaggacggcatggagaacctgaagaatcacgacaacaacctaactcagagtggctctgacagcagttgctctccggagtgtctctgggaagagggtaaggaggtgataccgacattcttcagcaccatgaacacaagcttttcagacatcgaacttttggaagacagtgggatccctaccgaggcattcctcgccagctgctacgccgtagttcccgtcctcgataaactgggaccaaccgtgtttgcccccgtgaagatggacctggtgggcaatattaagaaggttaaccagaagtacatcactaataaggaggaatttaccacgctgcaaaaaattgttctgcacgaagtggaagctgacgttgcccaggtacggaattccgctaccgaagcgttgctttggctgaaacgtggacttaaatttctgaaaggattcttaacagaagttaagaacggggagaaggacatccagactgccttaaacaatgcatacggaaaaaccctgaggcagcatcatggctgggtggtgaggggcgtattcgccctggccctacgggctgctcctagctacgaggactttgtggctgctctaaccgtgaaggaaggggatcaccagaaggaggctttctccatcggcatgcagagagacctctcattgtatctgcccgcaatggagaagcagttggccatcctggacaccctctatgaagttcatggactggagtctgatgaagtcgtctag

SEQ ID NO: 26075 - DNA, 1446 bp, synthetic construct
  source 1..1446: mol_type = other DNA; note = Synthetic coding sequence
atggccagcgccgccagcgtgaccagcctggccgacgaggtgaactgcccaatttgccaaggcaccttgagggaacctgtgactatcgattgcggacacaacttttgtcgggcatgcctgacacgatattgtgaaatccccggaccagacctggaagagtccccaacctgcccattgtgcaaggagccattcagacctggatctttccgccccaactggcaactcgctaacgtcgtcgagaatattgagcgcctccaactagtgtctactctaggtctgggcgaagaagatgtttgtcaggagcatggagaaaagatttatttcttctgcgaggatgacgagatgcaactgtgtgtggtttgcagggaggcaggcgaacatgccacacataccatgaggttccttgaagatgccgctgccccatatagggaacagatccataaatgcctgaagtgcctacggaaggagcgagaagagatccaggagatccagtccagagagaataaaaggatgcaggtacttttgacacaggtctcgacaaaacgccagcaggtgatcagtgagtttgcacatctccgaaaattcctggaggagcagcaatccatcttgctagcccagctggagagccaagacggggacattcttagacagcgcgacgaattcgacctgttggtcgccggcgaaatctgcaggttttcagcacttattgaagaactcgaggaaaaaaatgagaggcccgcccgcgaactgcttactgacatcagatctaccctaatcagatgtgagaccaggaaatgtagaaaaccagtggccgtgagcccggagttgggacagcgcatccgggacttcccacagcaggccctgcccctgcaacgcgaaatgaagatgttcctcgaaaaactgtgctttgaactggactacgaaccagctcatatctcactggacccacagacaagtcatcctaaactgctgttgagcgaggaccatcagagagcacagttctcttataaatggcaaaatagtcctgacaacccacagagatttgaccgggccacatgcgtgctcgcacacacgggtatcactggcggtcggcatacctgggtggtgagtattgacttggctcatggcgggtcctgcaccgtgggcgttgtatcggaggatgtgcagcggaaaggtgagctccggctgaggccggaagaaggagtgtgggccgtgcgcctagcttgggggttcgtgtccgcacttggcagctttcccacgaggctaacactaaaagaacaaccgaggcaggtgcgcgtgagcctcgactatgaagtgggatgggttaccttcaccaacgctgtcacacgggaaccaatctataccttcactgcaagcttcacgcgaaaggtgatccctttctttggtctctggggtagagggagctcattttcactgtcaagctag

SEQ ID NO: 26076 - DNA, 1173 bp, synthetic construct
  source 1..1173: mol_type = other DNA; note = Synthetic coding sequence
atgagcgccgccaaccccgagacccccaacagcaccatcagccgggaagcaagcacccaaagctccagcgcagctgctagccaggggtgggtgctgccggagggtaagatcgtccctaatacagtattcgtcggcggtattgacgctcgtatggatgaaaccgagataggttcctgcttcggaagatatggcagtgtgaaggaggtgaaaattatcacaaacaggactggtgtgtccaagggctacggctttgtgtctttcgtcaatgacgtcgacgttcagaaaatagttgggtctcagattcatttccatgggaaaaaactcaagctgggacccgccattaggaagcagaagctttgcgctaggcacgtgcagcctcggccactggtcgtgaatccccctccacccccacaatttcagaatgtgtggaggaatcctaacaccgaaacttatctgcagccccagattacgcctaacccagttacccagcacgtgcaagcatactcggcctacccgcactctcctggccaggtgatcaccggctgtcaattgctggtctataactatcaggagtaccccacttaccccgatagcgcctttcaagtgaccacgggttaccagctgcctgtgtacaactaccagccctttcccgcctaccccagatctcctttccaggttacggctggctaccagctgccggtgtacaactaccaggcctttcccgcttatcctaactccccatttcaggtcgctaccggttatcagttccctgtgtataattaccagcccttcccggcctacccctcatctcccttccaggtgactgctggttatcagctgcccgtctacaattatcaggcatttcccgcctaccccaactccccctttcaggtggctacaggttaccagtttcctgtctataattaccaggccttcccagcgtaccccaactcccccgtgcaagtgacaacaggctaccagctgccagtttacaattatcaagcttttcccgcataccctaatagcgcagtacaggtaaccacgggataccagtttcacgtgtacaactaccaaatgcctcctcagtgtcctgtgggcgagcagagacgaaatctctggacagaggcctataaatggtggtatctggtctgcctgatacagcgtagagattag

SEQ ID NO: 26077 - DNA, 1143 bp, synthetic construct
  source 1..1143: mol_type = other DNA; note = Synthetic coding sequence
atggagaagaagaagatggtgacccagggcaaccaggagcccaccacgacccccgatgcaatggtgcagccttttaccaccattccattcccccctcccccccagaacgggattcccaccgaatacggagtgccacatacccaggattatgccgggcagactggagagcataacctgaccctgtacggatctacacaggcccacggggagcagagcagcaattcacccagtacacagaacggatccttaaccaccgaaggaggtgcccagactgacggtcaacaatctcaaactcagtcgtccgaaaactctgaaagtaaatctacaccaaagcgtttacacgtcagcaacattccgtttcggttcagggaccctgaccttcgtcaaatgtttggtcagtttggcaagatcctagatgtggagatcatctttaacgaaagagggtctaagggctttgggtttgtgacatttgaaaactctgccgatgccgatagggctcgcgaaaagctgcacggaaccgtggtggaagggagaaagattgaggtgaataatgcaactgctcgagtgatgacgaacaagaaaatggtgacgccctatgcaaacggatggaaactatcgcccgtggtaggagcagtgtatggccctgagctgtacgccgccagtagcttccaggctgacgtctctctcggaaacgatgccgctgtgcctctgagtgggagaggcggtattaatacatacatccctctcatcagtctacccctggtccctgggttcccataccctacagctgcaacgacagccgcggcttttagaggagcccatctgcgtggtcggggtaggacagtctacggtgctgtgagggccgtcccacccactgctatacctgcgtatcctggggtggtctatcaagacggcttctacggagctgacctctatgggggatatgctgcataccgatatgcacaacctgcaactgccaccgccgccactgcggcagccgcagcagcggctgcctactccgacgggtacggtagagtgtatactgctgatccctaccatgcacttgcaccggctgcctcctatggcgttggcgccgtggcgagcctgtataggggagggtactcccggtttgctccatattag

SEQ ID NO: 26078 - DNA, 1614 bp, synthetic construct
  source 1..1614: mol_type = other DNA; note = Synthetic coding sequence
atggaccccggcgacgccgccatcctggagagcagcctgcggatcctttaccgactctttgaatccgtattgcctcctctccccgctgccctgcagagcaggatgaacgtgatcgaccatgtcagggacatggccgcagccggccttcatagcaacgtccggctgctatcaagtctgctgctcaccatgtctaataacaatcccgagctgttttctccccctcagaagtaccagctactggtgtatcacgccgattccctgttccacgataaggagtaccggaacgccgtttctaaatataccatggcgttacaacagaagaaggctctcagcaaaacctcaaaagtacgtccaagcacaggcaatagcgccagtacgccacagtcccagtgcctgccatccgagatcgaggttaagtacaagatggcagaatgctacacgatgctgaagcaggataaggacgctatagcaatcctggacggcataccatctcgtcagagaacccccaaaatcaatatgatgcttgcaaatctgtacaagaaggccggccaggagaggccttccgttactagctacaaagaggtcctgcgccagtgccctctggcgttagacgcaatcttggggctgctctcactgagcgtcaaaggcgcggaggtggccagcatgacaatgaacgtgattcagactgtcccaaatctggattggctgtctgtgtggattaaggcatacgcttttgtgcatacaggggacaacagcagggccatttccacgatttgtagtttggaaaagaagtcactgctgcgcgacaacgtagacctcttgggttctttggctgatctttattttcgagctggggataataaaaattcagtgctgaagttcgaacaggcccagatgctagacccatatctgatcaaagggatggatgtgtatgggtacctactagcgcgggaagggcggttagaggacgttgagaatttaggttgccgactttttaatatctctgatcagcacgccgagccctgggtagttagcggctgccattcattttattcaaagcggtacagtagagctctttacttaggcgctaaggcaattcagttgaactctaatagcgttcaggctttattactcaaaggagccgctttgagaaatatggggcgggtacaagaggctatcattcattttcgggaggctattcgattggccccctgtcggcttgactgctatgaaggtctcatagagtgctatctagcttcaaatagtattagggaagctatggttatggccaataatgtgtacaaaactttaggagctaacgcccagaccctgaccctgctcgcgacagtgtgcctcgaagatccagtgacccaggagaaggctaaaacactactggataaggctctgacacaacggccggactacattaaagccgtcgtgaaaaaggcggagctattaagtagggagcaaaagtatgaagatggaatcgcactgctgcgtaacgctctggccaaccagagtgattgtgtgctgcatagaatcctcggggactttcttgtggctgtcaacgaataccaggaggctatggatcagtatagcatcgccctgaggtag

SEQ ID NO: 26079 - DNA, 351 bp, synthetic construct
  source 1..351: mol_type = other DNA; note = Synthetic coding sequence
atggccttcatgacccggaagctgtgggacctggagcagcaggtgaaggcccaaactgacgagatcctttctaaggatcagaaaatagcagctttggaggatctggtccagaccctgagacctcatccagcagaagcaacacttcagagacaggaagagttggaaactatgtgtgtgcagctgcagaggcaagtccgcgagatggagagatttctgagcgactatggattgcagtgggtcggcgagcccatggaccaagaggacagtgagtccaagacagtcagtgagcacggcgaaagggactggatgactgccaaaaaattctggaagcccggtcgggccggtcggtag

SEQ ID NO: 26080 - DNA, 285 bp, synthetic construct
  source 1..285: mol_type = other DNA; note = Synthetic coding sequence
atgaccggcagccggaactggcgggccacccgggacatgtgccggtatcggcacaattatcctgatctggtcgagagagactgtaatggtgacactcctaatctctctttctatcggaacgaaatacggtttctgcccaacggatgctttatcgaggatattcttcagaattggacggataattatgacctcctagaggataaccatagctatatccagtggctattccctctgcgagagccaggtgtgaactggcatgcaaagcctttaacactgagggagtag

SEQ ID NO: 26081 - DNA, 1029 bp, synthetic construct
  source 1..1029: mol_type = other DNA; note = Synthetic coding sequence
atgcggttctgggccccctggggcagccggacccccagcggccggtctctctggacagatccagttacctattacacagctctccatatcgctgtgctccgcaatcagcctgacatggtggagcttcttgtacaccacggagccgacgtaaacaggcgcgaccgcatccacgagtctagtcctctggatctggccagtgaagaacctgaaaggctgccatgtctccagagactattggatctcggcgccgacgtaaatgccgcagacaagcatgggaaaaccgcgttgctgcacgccctggccagttccgatggtgtgcagattcataacacagaaaacatccggctgctcctcgaaggaggtgccgacgtcaaagccaccacaaaagacggagatacagtgttcacttgtattatcttcttgctgggcgaaaccgtcggaggggacaaagaggaggcccagatgatcaacaggttctgtttccaagtgacccgcctactgctggcgcatggagctgacccctcagaatgtccagcccacgaatctttaacgcacatctgcctgaagagctttaaactacatttccccttgctgaggtttcttttggagagcggagctgcctacaattgctccctgcacggcgccagttgctggagcggctttcacattatttttgaacggctctgtagtcaccccggatgtactgaagatgaatcccatgcggatttacttcgaaaggcggaaaccgtgctagacctgatggtgactaattcccagaaactgcagctccctgaaaatttcgacattcaccctgtggggtctctggccgagaagattcaggctttacatttctctctgcgacaattggagagttacccgccaccgctcaagcatctatgtagagtggccataagactgtaccttcaaccctggcccgtagacgttaaggtgaaggctctgccactgcccgacaggcttaaatggtatcttcttagtgagcactcaggctccgtggaggatgacatatag

SEQ ID NO: 26082 - DNA, 3192 bp, synthetic construct
  source 1..3192: mol_type = other DNA; note = Synthetic coding sequence
atgccccacctgcccctggccagcttccggccccccttctggggccttcgccactcccggggcctgccccggtttcactcagtctctactcagtccgaacctcacggatctcctatttccaggaggaatcgagaggctaagcagaaaagactgcgcgagaaacaggcaactctggaagcagaaatcgcaggagaatcaaaaagtcctgcagaatcaatcaaagcctggagaccaaaagagctcgtgttgtacgagatcccgacaaagcctggcgagaagaaggacgtttccgggccgttacctccagcctactcccctaggtacgtggaggctgcgtggtacccgtggtgggtgcgagaaggtttcttcaagcctgagtaccaggcccgccttccgcaggccaccggagagaccttctctatgtgcattccccctccaaacgtgacagggtccctgcatatcggccatgccctcacagtcgcgatacaggatgcgcttgtgcgttggcaccgaatgcgaggcgatcaggtgctgtgggtcccgggaagtgatcacgcaggcatcgcgacccaggccgtggtagagaaacagctctggaaggagagaggagtgcggagacacgagctgtcaagagaagcattcctgcgcgaggtgtggcagtggaaggaagccaagggtggggagatctgtgagcagctgcgggccttgggcgcctccctggactgggacagagagtgttttactatggatgtgggttcatcagtggcggtaactgaagcatttgtccggctgtataaagccggcctcctgtaccggaatcatcaactggtcaattggtcatgcgccttaagatcggctattagcgacatcgaggtcgaaaatcggcccctgccaggccatacccagctgcggctccctgggtgtcccaccccagtgagctttggactactcttttccgttgccttccccgtggacggcgagcccgacgccgaggttgtggtgggcactacccgccccgaaaccttgcccggcgacgtggccgtcgctgtgcaccctgatgattccaggtatacgcatttacacggtcgccagttgcgccacccactgatgggtcagcctctacctctcattaccgattacgcggtgcagcctcacgtgggtaccggcgctgtcaaagtgacccctgcgcactcacctgccgatgccgagatgggcgctagacatggactgagtcctctgaatgtgattgccgaggacggaaccatgacctccttatgcggcgattggctgcagggtctccaccgctttgtggcacgtgagaaaatcatgtctgtgctgagcgaacgagggctgtttcgtggtctgcagaaccatccaatggtcctgccaatttgctctcgatccggcgatgtgattgagtaccttctaaagaatcagtggtttgttagatgtcaggaaatgggcgcacgagccgctaaggccgttgaatctggagctctggaattgtccccatccttccaccagaagaactggcaacattggttcagtcacatcggcgactggtgcgtctctcggcagttgtggtggggccaccaaatccctgcatacctggtggtcgaggaccacgctcaaggcgaagaggactgctgggtggtgggcaggtctgaggctgaagctcgtgaagttgcagccgaactcactggccgccccggggcggaattgacacttgagagagacccggacgtcctggacacctggttctcttctgcactgtttcctttcagtgcgctgggttggcctcaggaaacgcctgacctagcacggttctacccattgagcctattggagaccggctccgatctgctgctcttttgggtggggcggatggtgatgctaggaacacagcttacaggccagctgcctttcagcaaagttctgctgcacccaatggtacgagacaggcaggggcgaaagatgagtaagagcttagggaacgtgcttgacccaagagatatcatcagcggggtcgaaatgcagttgctgcaggaaaagctgcggtctggcaatctagaccctgccgaactggcgatcgtggctgccgcacagaaaaaagatttccctcatggcatccctgagtgtgggacggatgctcttcggtttaccctctgtagccacggtgtccaggctggagatcttcatctatcagtgagcgaggtccagagctgccgccacttctgtaacaagatttggaacgcccttcgcttcatcctaaatgccctgggtgaaaaattcgtgccacagccagctgaggagctgagtcctagttccccaatggacgcatggatactctcccgcttggctctggccgcccaggagtgcgaaagaggcttcctgacaagggagttgagcttggtgacccatgctttgcaccacttctggcttcataatctgtgcgacgtctacctcgaggctgtgaaaccagtgttatggcactctcccaggcctctgggcccccctcaagtcctgttctcgtgcgctgacttgggccttcggctgctggctcctcttatgccttttttggctgaggaactctggcagcgactgccccctcgccccgggtgtcctccagccccaagcatctcagtggccccttacccgtctgcctgttccctggagcattggcgccaacctgagctcgaacggaggttttctagggttcaggaagtggtgcaggtgctaagagccctgcgcgcaacatatcagcttactaaggcgcgtccacgggtgctcttgcaatcatctgaaccgggcgatcaggggctcttcgaagcctttctggaaccattaggtacactcgggtactgcggcgccgtcgggcttctgccaccagggacggcggctccctcaggatgggcccaagcgcccctttcagatacagcccaagtctacatggaactgcaggggcttgtcgacccccaaatccagctgcctcttctagccgctaggcgatataagctccaaaaacagctggatagtctgacagctagaaccccctctgaaggtgaggcaggaactcaacgacagcagaaactgtcctctctgcaacttgaattgagcaagctggacaaggcggctagccatctgagacagttgatggatgaaccccccgcccccggatcccccgaactttag

SEQ ID NO: 26083 - DNA, 96 bp, synthetic construct
  source 1..96: mol_type = other DNA; note = Synthetic coding sequence
atgagcgacgaggtgttcagcaccaccctggcctacaccaagagccccaaagttactaagcgcactaccttccaggacgaactcatacgcgcgtag

SEQ ID NO: 26084 - DNA, 606 bp, synthetic construct
  source 1..606: mol_type = other DNA; note = Synthetic coding sequence
atgcccctgcagctgaagaacccccggctgcggcagaagagccggacgagatgcaataaatcccaaaaaaaagctgaactgctggataacgaaaaaccagctgccgtggtggcccctatcaccaccggatatacagtcaagatttcaaactacgggtgggatcagtccgataagttcgtgaaaatttatatcacactcaccggagtgcaccaggtgcctaccgagaatgtccaggtgcactttactgaaagatctttcgatctccttgttaagaaccttaacgggaaaagctactcaatgatcgtgaataacctgctaaaaccaatctccgtcgaagggagctccaagaaagtgaagacagataccgtgctcatcctctgccgcaagaaggtggagaatacaagatgggactatctcacccaagtggagaaggagtgtaaggagaaggagaaaccctcatacgacacagagactgatcccagcgaggggctgatgaatgtgctaaagaaaatatatgaagatggcgatgacgacatgaagcgcaccattaacaaagcctgggtggaatctcgcgagaagcaggcgaagggcgacacagagttttag

SEQ ID NO: 26085 - DNA, 480 bp, synthetic construct
  source 1..480: mol_type = other DNA; note = Synthetic coding sequence
atggccaccagcgcccccctgcggagcctggaggaggaggtgacctgctcaatttgcctcgattatctgcgggaccccgtgacaatcgattgcggacacgtgttctgccggtcttgcactactgacgtgagacctatatcaggctccagacccgtgtgtccattgtgtaagaagccattcaagaaggagaacattcgccccgtctggcaactcgaaaagattctgaatcacctttctacccttcgcagggatagagataagatccaaggttttcaggccaagggcgaggcagacatcctggcggccttaaagaaactgcaggatcagcgtcagtacatcgttgccgaattcgagcaggggcaccaatttcttcgggaaagggaagaacatctacttgagcagctcgctaaactggagcaggagctaaccgagggccgcgagaagttcaagagccgcggagtcggggaactggcccgctag

SEQ ID NO: 26086 - DNA, 4599 bp, synthetic construct
  source 1..4599: mol_type = other DNA; note = Synthetic coding sequence
atgcagcgggagctggtgtacgcccggggcgacggccccggcgcccctagaccaggctctacagctcatcccccccatgccatccccaacagtcctccatctaccccagtgcctcacagcatgcctccaagccccagcagaataccctatggtggaacacgtagtatggtggtgcctggtaacgctacaattccacgggatcggatttcaagcttgccagtgagccggcctatatccccttccccttccgcgatcctggagcgccgggatgtcaagcccgatgaggacatgagtggcaaaaacatcgcgatgtatcggaacgaaggcttctatgccgacccttatctgtaccacgagggaaggatgtctatagccagctcccatggtggccacccgctggacgtacctgaccacatcatcgcttaccatcggacagcaattagatccgcctctgcatactgcaacccatccatgcaggccgagatgcatatggagcagtcattgtaccggcaaaagtccaggaagtaccctgacagccacttacccacccttggctccaagacccctcctgcaagccctcacagagtctctgatctcagaatgatcgacatgcatgcccattacaatgctcatggacccccccacaccatgcagccagatagggcttcaccttcccgacaggccttcaagaaagagcctggcacccttgtctacatcgagaagcctcggagtgccgcaggactgtcctccctggtggacttggggccgccactaatggagaagcaagtgtttgcttattccacagcaactatccctaaggaccgcgagactagtgaaaaaatgatgaagaccacagcgaatcggaaccatacagacagtgctggcactccacatgtatcaggaggcaagatgctatcggcgcttgagtcaaccgtgccaccatctcagccaccccctgttgggacttccgccatccatatgtcacttctggaaatgagacgcagcgttgctgagctgcgcttacaactccagcagatgaggcagctgcagctacagaaccaggagctgcttagagcaatgatgaagaaggctgaactggagatttccggaaaagtcatggagaccatgaaacgccttgaagaccccgttcagcggcagcgtgtgctggtagaacaagagagacaaaagtacctgcacgaagaagagaagattgtcaagaagttatgcgagctggaggattttgtggaggacctgaagaaggattccacagcggcttctcgcctggtcactttgaaggacgtggaggacggagcgttccttcttaggcaggtgggcgaagccgtcgcgaccctcaaaggcgagttccctacactgcaaaacaagatgagagccatccttcgaatcgaggtcgaggccgtgaggtttctgaaagaagagccccacaagctggacagcctcctgaagcgggtgagatcaatgaccgatgttctcacgatgttgcgtagacacgtcacagatggactgctgaagggaaccgatgccgcccaagcggcccaatacatggctatggagaaggccaccgcagctgaagtgctaaagtcccaggaagaggcagcccatacatctggtcagccgttccactctaccggcgcgccgggggatgcaaagagtgaggtcgtacctctcagcggtatgatggttcggcacgcccaaagctctcccgttgtgatacagccttcccagcattctgtggccctcctgaatcctgcccaaaaccttccccacgtggcctcaagccctgctgtccctcaagaagcgacttcaacattacagatgagccaagcaccgcagtccccgcagattcccatgaatggctccgccatgcagtccttattcatcgaggaaattcactcagtgtccgctaaaaatagggccgtgtcaatcgagaaggccgagaaaaagtgggaggaaaaacgacagaatctcgaccactacaatggaaaggagtttgaaaaacttctggaggaagcccaggcaaatatcatgaagagcatccccaatctggaaatgccccctgcaacagggcctcttccccgaggagacgctcccgtcgacaaggtcgagctgtccgaggatagccccaactctgagcaggatctggaaaagctgggaggtaagtcaccgccacctccaccccctccacccaggcgcagttatctccctggatcagggctcaccacaacaagatctggggacgtcgtctacactgggcggaaagagaacatcaccgccaaagcctcttcagaagacgcaggcccttccccacagaccagagcgaccaagtacccagccgaagagccagccagcgcttggaccccctctccaccccccgtgactacaagcagctctaaagacgaggaagaagaagaggaggagggagacaaaatcatggcagaactccaggcttttcaaaagtgttcatttatggacgtgaactccaatagccacgctgaacccagccgcgccgacagtcacgtcaaggataccagatctggcgctacagtaccacccaaagagaagaagaacctggagttttttcatgaggacgtgcgcaagtccgatgtagagtatgagaatgggccgcagatggagtttcagaaagtgactacaggcgcagtgagaccttcagaccctcccaagtgggagaggggtatggagaattccatctccgatgcctcccgcacttcggagtataagactgaaattatcatgaaggagaattcaattagcaacatgtcactgcttcgcgatagccgcaattactcgcaggaaacagttccaaaggcgtcattcgggttttcaggcatttccccattagaagatgaaatcaataaaggaagcaagatctcaggcttgcagtactccataccagatactgagaaccagacccttaactacgggaagacaaaggagatggagaaacaaaacaccgacaagtgtcacgtatcatctcacacccgcttgaccgagtcctctgttcatgacttcaaaacagaggatcaagaggtgattacaacagatttcggccaggtagtgctgaggcccaaggaagcacgacacgcgaacgtgaacccgaacgaggacggcgaatcatccagctctagccctacagaggagaacgccgcgaccgacaatattgctttcatgatcactgagactaccgtacaggtgctgagtagcggtgaagtacatgatatcgttagccagaaaggcgaagatatccaaaccgttaacatagatgccagaaaagaaatgactccgcgccaggaagggacggacaatgaagatccggtggtttgcctagacaagaagccagttatcattattttcgatgaacccatggacatacgaagcgcttacaaacgcctgagcactatttttgaagagtgtgacgaagaactggagaggatgatgatggaggaaaaaatagaagaggaggaggaagaagagaatggtgactccgtggtccagaacaacaacaccagtcagatgagtcataaaaaagtcgctcccggcaacctcagaaccggtcagcaggttgagactaaatcgcaaccgcatagcctggccaccgagaccagaaaccctggtggccaggagatgaacaggactgaactgaataagtttagccacgtggatagtccaaacagtgagtgcaaaggtgaggatgccactgacgatcaattcgaatctcctaaaaagaaatttaagttcaagttcccaaagaaacagctggctgccctcacccaggccattcgaaccgggactaagacaggcaaaaagacattgcaggtggtcgtgtatgaagaggaagaagaggatggtacactaaagcagcacaaagaggccaaacgcttcgagatagcccgaagccagcccgaagatacaccaacgtctattcctagtgcctcccggaaagggagctccggagctccacagacgagcaggatgcccgtgcccatgagtgccaaaaacaggcctggtactctggataagcccggcaagcaaagcaagctgcaagatccgaggcagtatcgacaagcaaatggaagtgcgaaaaagtcaggaggggacttcaaaccaacctcaccctcgctcccagcttcaaagattcccgcactcagcccttcaagcggcaaaagctcatctctgccctcaagctcaggagatagttcaaatctcccaaacccgcccgccacaaaacctagtattgcatcaaacccactgtccccacagactggcccccctgctcacagcgcctctttaattccttctgtgtctaatgggagcctcaaatttcagtcgctgacccacaccgggaagggccatcatctttccttttccccccagagccagaacgggcgtgccccccctcctctgtcatttagctcgtcccctccaagtccagcatcctcagtttccctcaatcagggagccaagggtaccagaaccattcacactccatctttgacttcctacaaagctcagaacggctcgtcctcgaaggccacacctagtaccgcaaaagagacatcctag

SEQ ID NO: 26087 - DNA, 1566 bp, synthetic construct
  source 1..1566: mol_type = other DNA; note = Synthetic coding sequence
atgaccagcgccttcaagctggacttcctgcccgacatgatggtggagggcagattgctggtgccagataggatcaatggcactgccaataaaatgaacggggcgttggaccattccgatcagccagaccccgacgccattaagatgttcgtagggcaaatccctcggtcttggtccgagaaggagttgaaagagcttttcgagccttacggcgcagtctaccagatcaacgtgctgcgggaccggagccagaatcctcctcagtccaagggctgttgctttgtgacgttttacactagaaaagctgccctcgaggcacagaatgcattgcataacataaagacactgcccggaatgcaccaccctatccagatgaagcctgctgattctgagaagtctaatgccgtggaggaccgcaagttgttcatcggtatggtgagtaaaaagtgtaacgagaatgacatccgcgtaatgttcagcccatttggccaaattgaagaatgtcgcattctccgaggcccagacggcctaagcagggggtgcgcatttgttaccttctccacccgtgctatggctcagaacgctatcaaagctatgcatcagtcccagaccatggagggctgttcctctcccattgtggtgaagttcgctgacacacagaaggacaaagagcagcggcgcctacagcaacagttggcccagcagatgcagcagctgaacactgccacctggggaaatctaacaggtctcgggggactgacaccccaatatctcgcacttctgcagcaggcaacaagttcttccaatctcggcgcgttcagcggtatccaacagatggctggtatgaatgctttgcagctgcaaaatctggcaacattggcggctgcggcagcagccgcccagacctccgccacgtcgaccaatgccaaccctctcagcacaactagttctgcacttggagcacttacatcccccgtggctgcgagcaccccgaatagtaccgctggcgcagccatgaattcactaacaagcctgggaacactccagggattggccggcgccaccgtggggctgaataatatcaatgctctagcagtggcccagatgctctctggtatggcagcactgaatggggggctaggtgctaccgggctgaccaatgggaccgcaggaacaatggacgctctgacccaggcctatagcggtatccagcagtatgctgcagcggcacttccaactctgtatagccagagcctactccaacaacagtctgctgccgggtctcagaaggaggggcctgaaggcgccaacctttttatttaccacctgccccaggagttcggcgaccaggacattctgcagatgttcatgccgttcggcaatgtgatttcagctaaagtgttcattgacaagcaaactaacctgagcaagtgtttcggctttgtctcatacgataatcctgtgtcagcccaggcggcaattcaggcaatgaatggctttcagattgggatgaaacgcctgaaggtgcagctgaagaggtctaagaatgacagtaagccctactag

SEQ ID NO: 26088 - DNA, 315 bp, synthetic construct
  source 1..315: mol_type = other DNA; note = Synthetic coding sequence
atgagcgagcagggcgacctgaaccaggccatcgccgaggagggcggcacagaacaagaaaccgctacaccggaaaatggcatcgtgaagagtgagtccctagatgaagaggaaaagctggagctgcagaggcgcctcgaagcccagaaccaggagagacgcaaaagcaagagcggagcggggaaaggcaaactaacgagaagcttggccgtgtgtgaggagagtagtgccagaccggggggggaatcactgcaggaccaagaatcaattcatctccagctgtcctccttctcatccctgcaggaagaagactag

SEQ ID NO: 26089 - DNA, 1653 bp, synthetic construct
  source 1..1653: mol_type = other DNA; note = Synthetic coding sequence
atggagcccccccaggagaccaaccggcccttcagcaccctggacaatagatctggccaggtgcaggttcttagcgccacacccctcctgcagcgcaacccctacagctccccggacatcatgcatataaaaggctccgaagcttcaagtgtgccgtacgctctcaatcaggggaccaccgccttgccaaagaataagaatcaggaaggcaccgggcacagattactcaatatgctgagaaaaactctcaaagaatccgactctgaggagctggagatcacccaagagactccaaatctcgtgccatttggtgacgtagtcggatgtttaggaattcacatcaagaactgtaggcacttcatgcccaagattagtctgcagcactacgccaacctgtttatcagaatttcgatcaacaaggcagttaaatgcactaagatgtgctccctattgagtaagaacgacgagaagaatactgtaatcaagttcgacgaagtgaaatatttcagcgtgcaggtcccaaggaggtacgacgacaaaagaaataacatcttgctggaactcatacagtatgataacagggagaaaagagcctttctgctggggtccgtgcaaatccacctttatgaagtgattcagaagggatgttttattgaagaggttcaggtcctgcatggaaacattttcgtatgccgcctggaggtggagttcatgttctcctacggcaacttcggttatggcttctctcaccaactcaagccactccagaagattactgagccatccatgtttatgaacttggcccccccacccgaacggaccgaccccgttacaaaggtgattaccccgcagaccgttgagtatccagcattcctgtcccccgaccttaacgtcaccgtcgggacaccagccgtgcaatcaagtaatcagcctagcgtggttaggttggagaaactgcagcagcagccaagagaacgcctggaaaaaatgaagaaagaatatcggaacctgaatacatggattgataaggctaattatctcgaatctatactcatgccgaaactggaacataaggattccgaggagacaaacattgatgaagcgtccgaaaatacaaagtcaaatcacccagaagaggaattggaaaatattgtcggggtggatatcccactcgtgaacgaagaggcagaaaccaccgcgaacgaacttcttgacaacgactcggagaaaggcctgaccatacctacattgaatcagagcgatcaagataacagcaccgcagatgcatctaaaaacgatgagagtactccctcccctaccgaggtacacagtctctgtactattagtaaccaggaaacgatcaaggcgggcaggataccaccgctcggagaacgtcaaagcgagtctatgcccgatcgcaagatgaagaacgtgtttttcccccttgaggttaagctgaaagataactacccaagcatcctgaaggccgacagtagcctaagcgaggtaaatctaagaagcatctgtataaatccaaagtcacgcaacctagattcttcaccaactgagatcagttggcagaataataatttaaatctagcagaacgggaaaacaccggattggtgtcaacccgactgaagatcaagagatag

SEQ ID NO: 26090 - DNA, 363 bp, synthetic construct
  source 1..363: mol_type = other DNA; note = Synthetic coding sequence
atgagcatcagcagcgacgaggtgaacttcctggtgtaccggtacctccaggagtctggctttagtcattccgcattcaccttcggtattgagtctcatatctctcagtctaatattaatggtgcgcttgtcccccctgctgccctgatctctatcatccaaaaggggctacaatacgtggaagctgaagtttccatcaacgaagatggtaccctcttcgacgggaggcccatcgaatcgctttccttaattgacgccgtgatgccagatgtcgtccaaacacgccagcaggcttaccgcgataagctcgcacagcagcaggcagccgccgcagccgctgctgcggctgcggcgtctcaatag

SEQ ID NO: 26091 - DNA, 222 bp, synthetic construct
  source 1..222: mol_type = other DNA; note = Synthetic coding sequence
atgagctactaccagcggcccttcagccccagcgcctacagcctgccagcaagtctcaacagttccatcgtcatgcagcatggcacgtcgcttgactcgacagacacttacccccagcacgctcagtcacttgatggcacgacctctagctcaatcccactttaccgaagcagtgaagaggaaaaaagagtgacagtcatcaaggctccgcactatccttag

SEQ ID NO: 26092 - DNA, 717 bp, synthetic construct
  source 1..717: mol_type = other DNA; note = Synthetic coding sequence
atgaccgaggacagccagcggaacttccggagcgtgtactacgagaaggttggcttccgcggtgtggaggagaagaagagcctcgaaatactactgaaggacgatcggctgggaatccttccacctcaccatgaaagccacgcaaaagtaatgatgtaccggaaggaacaatacctcgacgtgctccatgccctgaaagtggtccgctttgtctccgatgctactcctcaagcagaggtttacctgaggatgtaccagctggaatctggcaagttacctcgctcgccgtcattcccactcgaacccgacgacgaagtcttcttggccatcgccaaggcgatggaggaaatggttgaggactctgtggattgttattggattaccaggcgatttgtgaatcagctgaacaccaaataccgtgactccttgcctcaactgcccaaggccttcgagcagtacttaaacctcgaggacggacggctgctcacccacctgcggatgtgcagtgcggcccccaagctcccttacgacctgtggttcaaacgttgcttcgccggctgcctccctgaaagcagtttacagagggtatgggataaggtggttagtggctcttgcaagatcctggttttcgtggcagtggagattctcctgacctttaagattaaagtgatggccctgaattccgctgaaaaaattaccaagtttttggagaattag

SEQ ID NO: 26093 - DNA, 1620 bp, synthetic construct
  source 1..1620: mol_type = other DNA; note = Synthetic coding sequence
atggccaccagcgcccccctgcggagcctggaggaggaggtgacctgttccatctgcctggattatcttcgtgaccctgtgacaatcgattgcggacatgtgttctgccggtcatgtacaactgatgtcaggcccatttcaggctcccgccccgtttgccccctgtgtaaaaaaccttttaagaaggagaatatccgccccgtgtggcaacttgcatctctggtggaaaacatcgagagactgaaagttgataagggaaggcaaccaggagaagtcactagggagcagcaggatgccaagctgtgcgaacgtcatcgagagaaacttcactattactgtgaagatgatgggaagctgctgtgtgtgatgtgtcgcgaatcacgagagcatcgaccacacacggctgtgctaatggaaaaggctgcccagcctcaccgggaaaagattttgaaccatttaagcacattacggcgagaccgggacaaaattcaggggtttcaggccaaaggagaggccgatatcctggctgctctgaagaagctgcaagaccagaggcagtatatcgtcgctgaattcgagcaggggcaccagttcctcagagagagagaagagcatttgctcgagcagctcgccaaactggagcaggagctgactgaagggagagagaagttcaagtcccggggcgtcggagagttggcaagactggcactggtcatttcagagcttgagggaaaggcccagcagcctgcagcggaactcatgcaggacactcgcgatttcctcaacagatacccccgtaaaaaattctgggtgggtaagcccatagcgagagtcgtgaagaagaagactggggagttctcagacaaactactcagcttgcagcggggcctgcgggaattccagggcaagctccttagagacctggagtacaagaccgtgagtgtgacgctggatccgcaatccgcctctggctacttgcagctcagcgaggactggaagtgcgtgacttacacctcgctttacaaatctgcctatctgcatcctcagcagtttgactgcgaacccggagtcttggggtccaaaggcttcacctggggtaaggtttattgggaggtggaggtggagagggaaggatggtccgaggacgaggaagagggcgacgaggaagaggagggtgaggaggaagaagaagaggaagaagccgggtacggagatggttacgacgattgggagaccgacgaggacgaggaaagcctgggggacgaggaggaggaagaggaagaagaggaggaggaggtgctcgagtcatgcatggtgggcgtggctagggacagcgtaaaaaggaagggagatctgtctctgagacctgaagatggcgtgtgggccctccggctttcgagttccgggatttgggctaacacatccccagaggcagagctcttccctgccctacgcccccgccgggtgggcatcgccctcgactatgagggtgggacggtcactttcaccaatgccgagagtcaggagttaatctacacattcactgcaacctttactcggcggctggtgccattcctgtggctcaagtggccgggtacgagacttcttctccggccgtag

SEQ ID NO: 26094 - DNA, 609 bp, synthetic construct
  source 1..609: mol_type = other DNA; note = Synthetic coding sequence
atgggccagaaggtgaccggcggcatcaagaccgtggacatgcgggacccaacttatcgacctctgaaacaagaactgcaagggctggactactgcaaacccacccgtctggatttactgctagatatgcctcccgtgagctacgatgtccagctactgcatagctggaataacaatgaccgatcactcaatgtatttgtcaaggaagatgacaagctgatcttccacagacaccctgtcgcccagagtacggatgctatcagaggtaaggtgggctacaccagagggcttcacgtctggcaaataacttgggccatgcgacagagagggacccatgccgtggttggcgtggcaaccgccgacgcaccactgcactccgtgggatacacaactttggtgggcaacaatcacgaatcttggggttgggacctgggacgcaacagactgtatcatgatggcaaaaatcagccatctaagacctaccccgctttcctggaaccggatgaaaccttcatcgtcccggatagctttcttgttgccctcgacatggacgacggaaccctttcttttattgttgatgggcagtacatgggcgtggccttcaggtag

SEQ ID NO: 26095 - DNA, 174 bp, synthetic construct
  source 1..174: mol_type = other DNA; note = Synthetic coding sequence
aacctgcccatctgcatggccaagacccacctgagcctgagccaccagccagacaaaaaaggggtgccaagggacttcatcctgcccatttccgatgtccgcgcctcgataggcgccggctttatttaccccctggtagggaccggcggaagggaagcaccactctggctctag

SEQ ID NO: 26096 - DNA, 468 bp, synthetic construct
  source 1..468: mol_type = other DNA; note = Synthetic coding sequence
atgaacaaccagaagcagcagaagcccaccctgagcggccagcggtttaaaaccaggaagcgggacgaaaaagaacgattcgaccccactcagttccaggactgtataatccagggactgactgaaactggcaccgacctggaagcagtggctaagtttcttgacgcatccggcgcaaaactcgattatagacggtatgccgaaaccttattcgatatattagttgccggaggaatgttggcccctggtgggacactggccgatgacatgatgagaacagatgtttgtgtgttcgcagcccaggaagatctggagaccatgcaggccttcgcccaggtcttcaacaagttaatccgtaggtataagtacttggagaaggggtttgaggacgaagtcaagaagctgctgttgtttctcaaaggcttctcggagtcagagcggaacaagctcgcgatgctgaccgggtag

SEQ ID NO: 26097 - DNA, 528 bp, synthetic construct
  source 1..528: mol_type = other DNA; note = Synthetic coding sequence
tgattcgacgaccagcggcggatgagcctgcacctgcacggcgccgactgtgacccaaaaactcaaaacgagatgaacatttgtgaggaagagttcgtcgagtacaagaatcgggatgctatatcagctctcatgccactgttttccgaggaagaaagttcagatggtagcaaacataataatggcttgccggatcatatatccgctcagctacagaacacttatactttaaaggcttttactgtcggctcaaagtgtgtggtctggtcatcactgcgtaatacatggtccaagtgcgagatcctcgaaactgctgaagaaggaacgagagtgctgaatttgtccaatgggatggaagagattgtgaacccagagaacgtgtggaacgggatacctaaacttgacaagagtcccccggaggccgtttctcagagagttggtaaggatctgtattttatgtctgttggggacactaccataaaggagaaaggctttggcggtgacggggacctgacagtagatctgtag

SEQ ID NO: 26098 - DNA, 2814 bp, synthetic construct
  source 1..2814: mol_type = other DNA; note = Synthetic coding sequence
tgactgcggagccagcccggctgcggctgcctgtggcaggaggccccaactcactccactggtccaagcgttgagggcgaagccccttccagtgaaactggtacaagcctggattccccgtctgcatatcctcagggtccactggtgcccgggtccagcctctctcccgatcattatgagcacacatctgtcggggcatacggactttattctggaccgccaggacagcaacagagaacccgtagacccaaactacagcatagcacttctatactgcgtaagcaggctgaggaagaggcaattaagcggtctaggtcactgagtgaaagttatgagctctcctccgacctgcaggataaacaagtggaaatgctggagaggaagtacgggggaaggcttgtcactaggcatgccgcccgtaccatacagaccgcgtttcggcagtaccagatgaataagaatttcgagaggctgagaagcagtatgtcagagaaccgcatgtccagacggatagttctgtcgaacatgaggatgcagttctcgttcgaggggccagaaaaagtgcactcatcttactttgaaggaaaacaggtatccgtcaccaatgacggcagtcaactcggagcccttgtatcgcccgaatgcggtgatctgagcgagcctactaccctgaaaagccccgctccgtcctctgatttcgccgatgctattaccgaacttgaggatgccttcagcaggcaggtaaaatccttggcagagtccatcgacgacgcactgaactgcaggagcctgcacaccgaagaggcccctgcattggatgcagccagagctcgcgataccgagccccaaaccgctcttcacggcatggatcacaggaagctagacgaaatgaccgcttcctacagcgacgtcacactgtatattgatgaagaggagctgtcccccccgttgccactgtctcaggctggagaccgcccctctagtacagagagcgacctccgactgcgggccggcggcgccgcccccgattattgggctctcgctcacaaggaggataaggctgacacagatacctcttgtcggtcaacgccaagcttagagcggcaggaacaaagactgagagtcgaacacttacccctgctgacaatcgaacccccttctgatagcagtgtggatttgtcagaccgctcggaacggggctcactgaaacggcagtcagcctacgagagatcattgggggggcagcagggcagtcccaagcacggaccgcattctggggcccccaaaagcttaccccgggaagagcctgagctgcggcctcggcctcctcgtccactggactcccacctcgcgataaacgggagcgctaacagacagagtaagagcgagtccgattacagcgacggcgataacgattctataaatagtacgtcaaactccaacgatactataaactgctcttctgaaagctcttctcgcgattctttgagagaacagacactgagcaagcagacttatcataaagaagcacgtaacagttgggactcaccagctttcagcaatgacgtgatccgcaagagacactatcggatcggcctgaatctttttaataagaagccagagaaaggcgtgcaatatctcattgaaagggggtttgtgccggacacacccgtgggagtagcccatttcttgctccagaggaaaggactgagtcggcagatgatcggcgaatttctcggtaaccggcagaagcagttcaaccgagacgtgcttgattgcgtggtggacgagatggatttctctacgatggaactggacgaggccttacgaaagtttcaggctcacatccgcgtccagggggaagctcagaaagtggaacggttaattgaggcctttagtcagagatattgcatttgtaaccctggggtagtacgacaatttaggaatcctgacaccatcttcatcttggcatttgccatcatcctgctgaacaccgatatgtatagtcccaacgtgaagcccgagaggaagatgaagcttgaggacttcatcaaaaacttgcgcggcgtggatgatggggaggatataccacgggagatgcttatgggaatctacgagcgtattaggaagcgagaactgaaaacaaatgaggatcacgtaagccaggtccagaaagtggagaagctcattgtggggaaaaagccaattggttctttgcaccctggacttggctgtgtcctgtccctccctcaccgaaggctagtctgttactgccggctgttcgaggtcccggaccctaataagccacagaagttgggactgcatcaaagggagattttcctatttaacgacctgctagtggtaacaaagatattccagaagaaaaaaaactctgttacctacagtttcaggcagtcattttctttgtatggcatgcaggtgctgctgttcgaaaaccaatattaccccaacggcattcgactgacctccagtgtaccgggcgctgacataaaggtgttaattaactttaacgccccaaatcctcaggacaggaaaaagtttaccgatgacttgagagagtctatcgccgaagtgcaggagatggagaagcaccggatcgaatcagagctggagaaacagaagggggttgtgcgccctagtatgtcccaatgctccagtctgaagaaggagagtggcaatggcacactgtcacgcgcttgtctcgacgattcttacgcttcaggagaggggctcaaacggtcagcattgtcctctagtctaagagatctcagtgaggcaggagtgcaccattag

SEQ ID NO: 26099 - DNA, 198 bp, synthetic construct
  source 1..198: mol_type = other DNA; note = Synthetic coding sequence
atggtggaggccgccgaccgggagaaggtggagctgctgaaccagctagaggaggaaaagaggaaggtagaggatctgcagttcagggttgaggaagaaagcattacaaaaggggacctggagcagaagtcccagatctctgaggatcctgaaaacgtggccaccgtctcagaaaaatcccgaataatggagttgtag

SEQ ID NO: 26100 - DNA, 630 bp, synthetic construct
  source 1..630: mol_type = other DNA; note = Synthetic coding sequence
atggacttcctgctgggcaaccccttcagcagccccgtgggccagcgcatcgagaaagctaccgatgggtctctacagtcagaagactgggccctgaacatggagatctgtgatataattaatgaaaccgaggaagggcccaaagacgcgttacgggctgttaagaagagaattgtggggaacaagaatttccacgaggtgatgcttgcactcaccgtgctcgagacatgtgtgaagaactgcgggcacagatttcacgttcttgtcgcttcacaagattttgtagaaagtgtgcttgtgaggaccatactcccaaaaaataacccaccaaccattgttcacgacaaagtacttaatttgatccagagctgggccgatgctttcagatcgagtccggatttgaccggcgtggtgactatttacgaggatttgcgccgcaaaggactcgaatttccaatgaccgacctcgatatgctttcccccatccacactccccggggaccctgctcaacacagaggcacaatcaagatagaattctatgggccctcactccggcctccaaacgaaccctggcttctatgctgccattgtgtcctccccggccctacagcccggtgactaggccatag

SEQ ID NO: 26101 - DNA, 255 bp, synthetic construct
  source 1..255: mol_type = other DNA; note = Synthetic coding sequence
atggccgacaccgacctgttcatggagtgcgaggaggaggagctggagccgtggcagaaaatatctgacgtgattgaggatagcgttgtggaagattacaattccgtggacaaaaccaccacagccggcaaccccctggtccagcaggggggtcaaccattgatcctgacccagaatccagcacccggattggggaccatggtaacacagcccgtgttgcgtccagtccaggtcatgcaaaacgccaatcattag

SEQ ID NO: 26102 - DNA, 618 bp, synthetic construct
  source 1..618: mol_type = other DNA; note = Synthetic coding sequence
atggccacccccctgggctggagcaaggccggcagcggcagcgtgtgcctggctttggatcaactgcgtgatgtaatcgaaagccaggaagagcttatccaccagctgagaaacgtgatggttcttcaggacgagaatttcgtgtccaaggaagagtttcaggccgtggaaaaaaagcttgtggaagagaaagcagcccacgctaagaccaaagtgctgctggcaaaagaagaagagaaattgcagtttgctctcggggaggtcgaggtactcagcaagcagcttgaaaaggaaaaacttgctttcgagaaggcactgtccagcgtgaaaagcaaggtacttcaggagagttcaaaaaaggaccagcttatcactaaatgtaacgaaattgagtcccacataataaagcaagaagatatactcaacggtaaagagaacgaaatcaaggagctgcagcaggtgatctcgcaacagaagcagattttcaggaatcacatgtctgatttccgcattcagaaacagcaagaaagttatatggctcaggtgcttgaccaaaaacacaagaaagcctctggcaccagacaggccaggagccaccaacatccaagggaaaagtag

SEQ ID NO: 26103 - DNA, 330 bp, synthetic construct
  source 1..330: mol_type = other DNA; note = Synthetic coding sequence
atggagcccagcgcccagcagctgcagctggccgccagcctgcccgcaaatttgtctaatttttgccagggaagcgaaatgcctactacatcaagacccgccttagacgtgaaagggggaacatcgcctgctaaagaggatgcaaaccaggagatgtcatctgtggcttattcaaatctcgctgttaaggacaggaaagccgtggcaatcttgcattatcccggggttgccagcaacggcacaaaggctagcggggcacctacaagtagttccggatcacccatcggcagccccactacaacccccccgacaaagccgccaagtttctag

SEQ ID NO: 26104 - DNA, 1737 bp, synthetic construct
  source 1..1737: mol_type = other DNA; note = Synthetic coding sequence
atgcccgagatccgggtgacccccctgggcgccggccaggacgtgggcagatcttgtattctggtgagcattgctggcaaaaacgtgatgctcgattgcggaatgcatatgggatttaacgatgatcgacggttcccagacttcagttacattacacagaacggcagattgaccgacttcctggattgtgtaatcatatcccatttccatctcgatcactgtggggcactgccctatttctctgagatggtgggatatgacggacctatttacatgacacaccccactcaggcgatatgccctatcctcctggaagactacaggaaaattgccgtcgataagaaaggcgaggcgaacttctttacctcccaaatgatcaaagattgtatgaaaaaggttgtggcggtccacttacaccaaactgtgcagatcaaagtgggctccgagtccgtggtctacactggcgactataatatgactcccgaccggcacctcggagcagcttggatcgataagtgtagaccaaatttgttaatcactgagtccacttacgccacaacaattagggacagcaaaaggtgcagagaacgagattttctgaaaaaggtgcatgagacagtcgagaggggcggaaaagtgctcattccagtgttcgctcttgggagagctcaggagctctgtatcctgctcgaaaccttttgggagcgcatgaatcttaaggtaccgatctactttagcaccggcttgacagagaaagctaatcattattataagctgtttatcccttggactaaccaaaaaattagaaaaacatttgtgcagcgcaacatgttcgaattcaagcatatcaaagcgtttgatagagcatttgccgacaatccaggacccatggtggtgtttgccactccgggaatgttgcacgctggccagagcctgcaaatctttcgtaagtgggctgggaacgagaagaatatggttattatgcccggctattgcgtacagggaactgtcggccacaagatcttgagcggacagagaaaattggaaatggaagggcgccaggttctggaggttaagatgcaggtggagtacatgagcttttccgctcatgcagatgcgaagggcattatgcagctagtagggcaggccgaacctgagtcagtgctgttggtgcacggtgaagcgaagaagatggagttcctgaaacagaagatcgagcaggagctacgtgttaactgctatatgcctgcaaacggcgaaactgtcacactcccaacgtcccctagcatccccgtgggtatctcattaggactcctgaaacgtgagatggcacaaggacttctgccagaagctaagaagcccagactgttgcatggaacattaatcatgaaagatagcaattttagactcgttagcagcgagcaggccttgaaggaacttggattagcagaacaccaacttcggttcacttgccgcgtacatttgcatgatacccgtaaagagcaagagacggctctgagggtgtatagccatttaaagagcgtgctgaaggaccactgcgtccagcacctgcctgacggctcagtgaccgtggaatctgtccttctgcaggctgctgcaccatcagaggaccctggaactaaggtcctcctcgtctcttggacttatcaggacgaggagctcggcagcttcctgacgtctctgctaaaaaaaggactgccccaagcgcccagttag

SEQ ID NO: 26105 - DNA, 570 bp, synthetic construct
  source 1..570: mol_type = other DNA; note = Synthetic coding sequence
atgcagcccatgagcttcggctgggaccacagcctgcacaagcggaagaggctgccccccgtgaagagatctctggtttattacctgaagaacagggaggtgcgactgcagaatgaaacatcctatagccgggtgctccacggctatgccgctcagcaactgccttcgcttttaaaggaacgagagtttcacttaggcactttgaacaaggtgtttgcaagccagtggttgaaccatcggcaggtagtttgcggcacgaagtgcaataccctgttcgtggtggatgttcaaacatcccagatcaccaagattccaattctcaaggatagagaacctgggggggtgactcagcagggttgtggtatccacgccattgagctgaaccccagcaggacgttactcgcaaccggcggggacaatcccaattccttagccatttatagactccctacgctggatccagtttgtgtgggcgacgacggccataaagattggattttctctattgcgtggatttccgacactatggctgtgtctggctccagggacggaagcatgggtttgtggtag

SEQ ID NO: 26106 - DNA, 2289 bp, synthetic construct
  source 1..2289: mol_type = other DNA; note = Synthetic coding sequence
atggccagcctgctgcaggaccagctgaccaccgaccaggacctgctgctgatgcaggagggtatgcccatgcgaaaggtccgcagtaagtcatggaaaaagctgagatatttccgcttgcagaatgacgggatgactgtttggcacgcaaggcaagcccggggcagcgccaagccttcgttctccatctcagacgtggaaacgatcaggaatggacacgactcagagcttctccgctcccttgccgaagaactccccttagagcaggggtttactatcgtgtttcatgggcgccgcagtaatctggacctcatggcaaacagtgtggaggaggcgcagatttggatgcgggggcttcagctcctcgtcgatctcgtgacttctatggaccaccaggagaggcttgatcagtggttgtcagattggttccaaagaggtgataaaaaccaggacggcaaaatgtcattccaggaggtccagcgcctcctccatctgatgaatgttgaaatggaccaggaatatgcattttctctcttccaagccgctgatacttctcagagcggcaccctggagggtgaagagtttgtgcaattctataaagcgcttaccaagagggccgaagtccaagagttgttcgaatccttttcggctgacggccagaagctcactctgctcgagttcctcgacttcttgcaggaggagcagaaagaaagagattgtacatctgaactggcactggaactcattgaccggtatgaaccgtcagatagtggaaaactcaggcatgtgctttccatggatggctttttgagttacctatgcagtaaggacggcgatattttcaatcctgcatgcctcccaatctaccaggatatgacccagcctctgaaccactattttatctgttcttcccataacacctacctcgtcggcgaccaactgtgtggtcagtcctccgtggagggctacatcagagctctgaagcgcggttgtaggtgcgttgaagtggacgtgtgggatggccccagcggggaaccagtagtctaccatggacatacacttacaagccgcattctgtttaaagacgtcgtcgctaccgtggctcaatacgcttttcagacctcagactaccccgtgattctatcactggaaacacattgctcatgggagcagcagcagacaatggccaggcacctgaccgagatcctgggcgaacagctgctgtctactacacttgacggtgtcttacctacccagcttccaagtcccgaggaactccgacggaagattctagtgaaggggaagaagttgaccctggaggaggatctcgaatacgaagaggaagaggcagagccggagttggaggagtccgagctggcactggagagccagtttgagacggagcccgagccccaggaacaaaacctgcagaataaggacaagaagaaaaagtctaagccaatcctctgccccgctctctcaagtcttgtgatttatctcaaaagcgttagttttagatcgttcacccacagcaaagaacattaccacttctacgagatcagcagctttagcgaaacaaaagcaaaaagacttatcaaagaagcaggtaatgaatttgtgcagcataacacgtggcagttgtctcgagtgtacccatctggtctcagaaccgactcatctaattataatccacaggaactctggaatgccggttgtcaaatggtcgcaatgaatatgcagacagcgggactggaaatggacatctgcgacggccacttccgacagaacggaggctgcggctacgttctgaagccagatttccttcgcgacatacagtcatccttccatcccgaaaagcctattagcccgtttaaggctcagacactgttgattcaagtgatctccggtcaacagctgcccaaggttgataaaactaaagagggctccatcgtcgatcccctcgtcaaggtgcagatattcggtgtcaggctggacacggcacgtcaggaaaccaattatgtagagaacaatgggttcaatccctactggggccaaaccctttgctttagggtgctcgtgcccgagctggcgatgttgcgctttgtggtgatggattatgactggaaaagccgcaatgactttattggtcagtacacccttccctggacctgcatgcagcaaggttacagacatattcacctgctaagcaaagacggcatcagcctcaggcctgccagtatattcgtgtacatctgcatccaggaaggccttgaaggcgatgagtcctag

SEQ ID NO: 26107 - DNA, 1362 bp, synthetic construct
  source 1..1362: mol_type = other DNA; note = Synthetic coding sequence
atggccggcgccgccggccgggtgcaggaccgggccctgcggcggtttcccataacactccctgttggagatctctctaatctccacctgaaagaagagaagataaaaccagacaccaatggcgcagtggtgaagacaaacgccaacgctgagaaaaccgacgaggaagaaaaggaggatagggcagctcagtccctcctcaacaaactcatcaggtccaacctcgtagataatacaaaccaggtcgaggtactgcagagagaccccaatagcccactgtactcagtcaagagctttgaggagttgaggctgccccaaaatctcatcgcacaatcacagtccggtacaggaaagacggctgcgtttgtgctcgctatgctgagccaggtcgagccagccaacaagtatccccaatgtctttgcctgtccccaacatatgaactcgcgcttcagaccggcaaggtgatcgagcagatgggaaagttttaccccgaactgaaactcgcgtatgctgttcgaggtaacaaactcgaaaggggacagaagatttccgagcagatcgtgatcggtacaccagggacagtgctggattggtgctcaaagctgaagtttatcgatcccaagaaaattaaggtgttcgtgctggacgaggccgacgtcatgatagccacacagggccaccaggaccagtccattaggatacagcggatgctgccaagaaactgccagatgttgctcttctccgccacatttgaggactcggtttggaaatttgcacaaaaggtcgttccagacccgaacgtaataaaattgaagagagaggaagagactctggatacaatcaaacagtattacgtgctgtgtagctctagagatgagaaatttcaggcattgtgcaatctgtacggggccatcacaatcgctcaggcgatgatcttctgtcatacccgaaaaacagcttcttggttagcggctgaacttagcaaggagggccaccaggtggcactcctctcaggtgagatgatggttgaacagagagctgcagtcatagaaagattcagagaaggaaaggagaaagtccttgtgacaactaatgtgtgcgctcgtgggattgacgtggagcaggtatcggtggtgattaatttcgatctccctgtggacaaagacgggaacccagacaacgagacctacctgcacaggataggaagaactggcagatttgggaaacgggggctcgcggtgaatatggtggacagtaaacatagcatgaatattctcaaccggattcaggagcattttaataagaaaatcgagcgcctggataccgacgatttggatgaaattgagaaaatcgccaattag

SEQ ID NO: 26108 - DNA, 921 bp, synthetic construct
  source 1..921: mol_type = other DNA; note = Synthetic coding sequence
atggcccgggtgcccctgggccggagcctgaccctgagcccccggctcgaacataacgggatgacctccgcgcatcacaattttcgccttcccggctcccgagactcaccggctagtgccagccaggtggctgaaatcatagacctcgaatggtacgagaaatccgaggagacccatgcatctcagatagaactgctggaaactagctcaactcaggaaccattaaacgcctcagaagcattttgccccagagactgcatggttccagtagtcttccctggccccgttagccaggagggatgttgtcagtttacatgcgaacttctaaagcacatcatgtaccagcgtcagcagctccctttaccctacgagcaactgaagcatttctacaggaagccctcaccccaagctgaggagatgctgaaaaagaaaccgcgggctactaccgaggtgtcatcgcggaagtgccagcaggccctggccgaattggaatccgtactgtcccacctggaagatttctttgcaaggacccttgtgccacgtgtactcattctcctgggtggtaatgccctttcacctaaggagttttatgagctggacttatcactactggccccatatagcgtggaccagtctctctctaccgcggcctgtcttagacggctttttagagccatctttatggccgacgccttttcagagctgcaagctccaccacttatgggcaccgtcgttatggcccaaggtcacagaaactgcggggaggattggttcagaccaaaattgaactatcgggtcccctcccgaggtcacaagttgaccgtgactctgtcatgtgggcgccccagtatcaggaccacagcatgggaagattacatctggttccaggctcctgtcaccttcaaaggctttcgggagtag

SEQ ID NO: 26109 - DNA, 426 bp, synthetic construct
  source 1..426: mol_type = other DNA; note = Synthetic coding sequence
atgccccagctgctgcagaacatcaacggcatcatcgaggccttccgcaggtatgcccggacggagggtaattgcaccgcccttacccgaggggagctgaagcggctcctggaacaagagttcgccgatgtcatcgtgaaaccccacgaccccgctacagtagacgaagtgcttcgtctgctcgacgaagaccacaccggaacagtggaatttaaagagttcctcgtactcgtgtttaaagtcgcacaagcctgctttaagacgctatccgaaagcgccgagggggcatgcggatcccaggagtcaggatcccttcattccggcgccagtcaggagctcggcttcagaccacgggtgcggccactggctctccggggctcagccgcaatgactggaaaactgagcccccgggctaggaaagagtag

SEQ ID NO: 26110 - DNA, 480 bp, synthetic construct
  source 1..480: mol_type = other DNA; note = Synthetic coding sequence
atggccaccagcgcccccctgcggagcctggaggaggaggtgacctgctccatttgcctggattacctaagggatcccgtgaccatcgattgtggacacgtgttttgcagaagttgcacgacagacgtgagacccatctccggcagccggccagtctgcccactgtgtaagaagcctttcaagaaggaaaatattcgacctgtgtggcaactggaaaagatattaaatcatttgagcacactgcggagggacagagataaaatacaagggtttcaggcaaaaggcgaggcagacattcttgcggcgctgaaaaagctgcaggaccagagacagtacattgtggccgaattcgagcaaggacaccagtttctgcgcgagagagaggagcacttgctggagcagctggccaagcttgaacaggaattgacagaaggccgcgaaaagtttaagagcaggggcgtaggcgagcttgcaagatag

SEQ ID NO: 26111 - DNA, 1506 bp, synthetic construct
  source 1..1506: mol_type = other DNA; note = Synthetic coding sequence
atggacttcctgctgggcaaccccttcagcagccccgtgggccagagaatcgaaaaggcaacggatggctcattacagagcgaggactgggcgctgaacatggaaatctgtgatattattaacgaaacagaagaaggacctaaggacgccctgcgcgccgtgaaaaagcgtatcgtggggaataaaaactttcatgaagtgatgttagcccactctgcccggagacacctaagtgctctccaagtgctggagacctgtgtgaaaaactgcggccacaggtttcacgtgttggttgccagccaggactttgtggagtccgtcttagtgcgcacaatcctaccaaagaataacccccctacgattgtgcacgacaaggtactgaatcttatacagtcgtgggccgacgcatttcggagcagtcccgaccttaccggcgtggtcaccatttacgaagatttgagaaggaagggcttggagtttcctatgaccgacctagacatgcttagccctattcatactccacagcgcactgtgtttaacagtgagacacaaagcggtcaggactctgtggggactgatagttcccagcaggaagatagcgggcaacatgcggcccctttaccggcacctcccattctgagtggagatactcccattgccccaacacctgagcaaatcggtaaactgcgctccgagctagaaatggtttctggtaacgtgagagtgatgtccgaaatgctgacagagctcgtgcctacccaggcagagccggccgacctcgagctgctacaggaactgaatcgaacctgcagggccatgcagcagcgcgtgctcgagttgataccacagattgctaacgagcagctcaccgaggaactgcttatagttaatgataacctgaacaacgtatttctgcgccacgagagatttgaaagattccgtaccggccagacaacaaaggccccgtcggaggcagaaccagctgccgacctcatagatatgggccctgatccagctgccactggaaacctgtcatctcagctggccggaatgaacctcggctcgagctccgtccgcgcgggcctgcagagcctcgaagcttctgggagacttgaagatgaatttgatatgttcgctctcactcgtgggtccagtttagctgatcagcgaaaggaagtgaaatatgaggccccacaagccacagacgggttggctggagctctcgacgctcggcagcagagcacgggagctatacctgtcacacaagcctgcctcatggaggatatcgaacagtggctctccaccgacgtggggaacgatgccgaggaacctaaaggcgtcacctctgaggagtttgataaatttctggaggaaagggcaaaagccgcggaccggcttcctaacctctctagccccagcgccgaaggtcccccagggccaccttccgggcccgcgccacgaaaaaaaactcaggagaaagacgacgatatgcttttcgcgctgtag

SEQ ID NO: 26112 - DNA, 117 bp, synthetic construct
  source 1..117: mol_type = other DNA; note = Synthetic coding sequence
gagcccgtgtacttcgccgagaaggtgatgagcctgggccggaactggcatcgcccttgtctgagatgtcagaggtgccataagactttgacggccggttctcatgcagaagtctag

SEQ ID NO: 26113 - DNA, 1122 bp, synthetic construct
  source 1..1122: mol_type = other DNA; note = Synthetic coding sequence
atggcccaggagagccccaagaacagcgccgccgagatccccgtgacaagcaatggggaagtcgatgattcacgcgaacactcttttaacagggacctcaaacatagcctgccaagtggcctgggactctctgaaacacagatcaccagccatggctttgacaatacaaaggaaggcgtgattgaggcaggcgctttccagggctctcccgcaccacccctccccagcgtgatgtccccttcaagggtcgccgccagtaggttggcccaacaaggctctgacctcatcgtacccgcgggggggcagagaactcagactaagtcagggccggtgattcttgctgacgagattaaaaacccagccatggagaaactcgagctggttcggaaatggtcacttaatacatacaagtgcaccaggcagattattagcgaaaagcttggcagagggagcagaaccgtggacctcgaactggaagcccagattgacatccttagggacaacaagaaaaaatatgagaacatcctgaaacttgcccagactctcagtactcaattgtttcagatggtccatactcaacggcagctgggcgatgcttttgcggacctgtcactaaaatctctcgagctgcatgaggaattcgggtacaatgcagatacacagaagcttctggccaagaatggcgaaacattgctcggagctatcaacttcttcatcgcctcagtgaatacattagtaaacaagacaatcgaggacaccctgatgacagttaaacaatatgaaagcgctcggattgagtatgacgcttataggacagatttagaggaactgaatttaggccctagggatgccaacacccttccaaaaattgagcagtcccagcatctgttccaggctcacaaagaaaagtacgataaaatgagaaatgatgtgagtgtgaagctcaaattcttggaggagaataaagttaaggtgctgcacaaccaactcgtacttttccataacgccatcgccgcatatttcgccggtaatcagaagcaactggagcagacgctgaaacagtttcatatcaaactgaagactcccggtgtggacgctccttcatggctcgaagagcagtag

SEQ ID NO: 26114 - DNA, 453 bp, synthetic construct
  source 1..453: mol_type = other DNA; note = Synthetic coding sequence
atgcacaccggcgaccccaagcaggacctggcctacgagcggcagtatgaacagcagacatatcaggtgattcctgaagtgatcaaaaactttatccagtacttccataagaccgtgtccgatcttatcgatcagaaggtgtacgaactgcaggcaagtcgcgtgagctctgatgtcatcgatcagaaggtgtacgagatccaggacatctacgagaacagctggactaaattaaccgagcgattctttaagaacactccctggccagaggccgaggcaatagcgccacaagttggtaatgacgcagtttttcttattctgtacaaagagctgtactatcggcacatttacgctaaggtttcgggcggaccatctctggaacagagattcgagtcctactataattactgcaacttgtttaattacatactcaacgccgatggccctgcatag

SEQ ID NO: 26115 - DNA, 2136 bp, synthetic construct
  source 1..2136: mol_type = other DNA; note = Synthetic coding sequence
atggccatgcaggagaagtaccccaccgagggcatcagccacgtgaccagcccaaatttctgtagcagtagcgggagccctccgttccagcccattaaatcccacgtgaccatacccacagcccatgttatgccgtctacccttggtacatcacccgccaagcccaactctacccctgtcggcccatcatcatcaaagcttccactctctggcctggctgagtccgtcggtatgacacgcaacggcgatctgggcgccatgaagcactcaccggggctatctcgcgatcttatgtactttagcggcgcgaccggtgaaaacgggatcgagcagtcatggttcccggctgtgggtcacgagcggcaggaggaagcccggaagtttgacattccttccatggagtctacgttgaaccagagcgctatgatggaaacactttacagcgaccctcatcatagggtccgtttccataacccacgaacgagcacatccaaggagctctatagagtgctgcctgaagctaaaaaggcacccggtagcggggccgtatttgagcgaaatggtccccactctaacagctcaggggtcttgcctctgggattgcagcccgcccccgggttgtcaaagcctctcccttcccaggtgtggcagccatcgcccgatacgtggcacccccgcgagcaaagttgtgaactctcaacctgtagacaacagctggagctcatacgcctccagatggaacagatgcagctgcagaacggagctatctgccaccaccctgccgcttttggaccatctctgcccatcctcgagccagcccagtggatcagtatcctgaacagcaatgagcacctgctgaaggaaaaagaactgctgatcgacaaacaaaggaagcatatttcccagcttgaacagaaagttcgagagtcggaacttcaggtgcattctgctcttttgggtaggcccgccccatttggggacgtgtgcctgttgcgtttgcaagagcttcagcgtgagaatacatttctgcgggcccagtttgctcagaagacggaggctttgtcacgagagaaaatagacttagagaagaaattgagcgccagtgaggttgaggtgcagctaatcagggaatctctcaaggtggccttacaaaaacactcagaggaagtgaaaaagcaggaagagcgggtaaaggggagagataagcacatcaacaatctgaaaaagaagtgtcaaaaggagtctgaacagaaccgagaaaaacagcagcgaatagaaaccttggagcgctacctggccgacttacccaccttggaagaccaccagaaacagagccagcaactcaaggactctgagctgaaaagcacagagctccaggagaaagtcaccgagctggaatcgttattggaagaaacacaggcaatctgtagggaaaaggagattcaactggagtcgctgaggcagcgcgaggctgaattctcgtcagccggccacagcctccaggataagcagtctgttgaagagacttccggagaagggcctgaggttgagatggagagctggcaaaagcgatatgattctttgcagaagatcgtggagaagcaacagcagaaaatggaccagctccggtctcaggttcagagtctcgaacaggaggttgcccaggaggaaggcacttctcaagccctccgggaagaggctcagagacgagacagcgccctgcagcagttacggaccgccgttaaggaattgtctgtgcagaaccaagatttaatcgagaagaatctgacactgcaagagcatttgcgccaagcacagcccggcagccctccgtcccctgacacagcccaactagcgctagaactgcaccaggagttggcttcatgcctccaagatctgcaggccgtttgcagtattgtgacacaacgggcccagggtcatgatccaaacctgagcctgctgctcgggattcatagtgctcagcaccccgaaacccaattggacttgcagaagccggatgtgatcaagcgtaagttggaggaagtgcagcagcttcgcagggacattgaggacctccggacaaccatgtccgatagatacgcccaggatatgggggagaattgcgtcacccagtag

SEQ ID NO: 26116 - DNA, 531 bp, synthetic construct
  source 1..531: mol_type = other DNA; note = Synthetic coding sequence
atggccgccgccaccggcgaccccggcctgagcaagctgcagttcgccccctttagttctgcactggacgttgggttttggcatgaactcactcaaaagaagctcaacgagtatagacttgacgaagctccaaaagatattaaggggtattactacaacggggatagtgccggtcttccagccaggctaacactggaattctcagcttttgatatgagcgctcctaccccagcgcggtgctgtccagcaattggaaccctctacaacaccaatacgcttgagtctttcaagacagcggataagaaactcctcctggaacaagctgcgaacgaaatctgggagagtataaagagcggcacagccctcgagaatccagtgctactgaataagttcttgcttctgacattcgccgatcttaagaagtaccacttttattattggttctgttacccggctctttgccttccggaatcactgcctctcatccaagggccagtcggtttggaccaaaggttctccctcaaacagtag

SEQ ID NO: 26117 - DNA, 1443 bp, synthetic construct
  source 1..1443: mol_type = other DNA; note = Synthetic coding sequence
atgaagctgaaggagctggagcggcccgccgtgcaggcctggagcccagcaagccagtaccccctttacctggctacgggcacgtccgcccagcaattagactccagtttcagtacaaatggcactttagagatttttgaagtggatttcagggacccaagccttgacttgaagcatcgtggtgtcctaagcgctttgagtcgctttcataaactcgtttgggggagcttcggtagcgggctgctggagagcagcggtgtaatagtgggcggcggcgacaacggaatgctgatcttgtacaatgtgactcatatattatcttctggaaaagagccagtcattgcccaaaaacaaaagcacacaggtgcagttcgagcactggatctgaatccattccagggaaacctgctggccagcggagccagtgatagtgaaatcttcatctgggatctgaataatctcaatgtgccgatgaccttgggctcgaagtctcagcaaccccccgaggacatcaaagctctgtcgtggaacaggcaggcccagcacattctgagctccgctcaccccagtggcaaggccgtggtgtgggacttgagaaaaaatgagcccattattaaggtgagcgaccattctaatcgaatgcactgcagcggtttggcttggcaccctgatatcgccacccagttggtactttgctccgaagacgatcggttgcccgttatccagctgtgggatttgaggtttgccagcagccctctgaaggtcctcgagtcacacagccgcggcatcttgtcagtctcctggtcacaggccgatgcagagctgctgctgaccagcgctaaagacagccagattctttgtcggaacctcggctccagcgaagtggtatacaaactaccaactcagagttcctggtgcttcgatgtacaatggtgccccagggatccctctgtatttagcgccgctagcttcaacggttggatcagcctctattccgtcatgggccgcagttgggaagtacagcatatgcggcaggccgataagatctcatcaagtttttctaaagggcagcccttgccacctcttcaagtccccgagcaggtggcccaagctcctctcatcccacctttgaagaagcctcctaaatggattagacgacctacaggtgtgtccttcgcctttggaggcaagctggtcacattcggcctgccatccacccccgcgcatctcgtacctcagccctgccctcgtctagtcttcatctcccaagttaccacagaatcagagttcttaatgcgttcagctgagctgcaagaggccctggggtccggcaacctgctcaattattgccagaataagagccaacaggccctattgcaatccgaaaaaatgttgtggcagtttctcaagccagccagggacagcagtggggcccgtagatag

SEQ ID NO: 26118 - DNA, 1842 bp, synthetic construct
  source 1..1842: mol_type = other DNA; note = Synthetic coding sequence
atggccaccatccccgactggaagctgcagctgctggcccggcggaggcaggaagaggccagcgtgcggggacgggagaaggccgagagagagcgattatcccagatgccagcgtggaagcgcggccttctcgagcggaggagagccaagctgggtctcagcccaggggagccatcaccggttctggggaccgtggaggcaggtccccctgacccagacgaatcagccgtgctgcttgaggccataggccctgtgcaccaaaacagattcatcaggcaagagcgacagcaacagcagcagcagcaacagcgttccgaagagctcttggctgagcgcaagccagggccattggaggcacgggagaggagacccagccccggggaaatgagggatcagtcccctaaggggcgggagtcccgcgaagagagactgagtcccagagagacaagggagcgcagactgggaatagggggagcccaggagctgagtctccggccccttgaggcacgagactggcggcagtcgcctggcgaggttggcgataggagcagtcgattgtcagaggcttggaaatggagactttcacccggggagactcccgagagaagccttcgtttagccgagagtagagagcagtctccaaggcgcaaggaggtggagtctcggctctcacccggcgagagtgcctatcaaaagctcggactgactgaagcgcacaagtggaggccagatagccgggagtctcaggaacaaagtctggtccagctcgaagccaccgaatggcggttacggagcggcgaggaacgccaggattattccgaggagtgcggtcgcaaggaggaatggcctgtgccaggggtagcacctaaggagaccgccgagctcagcgagaccttgaccagagaagcccaggggaattctagcgcaggagtagaggctgcagaacaacgtcctgtggaagacggagagcgcggcatgaagcctacggaaggctggaaatggactttgaattctggtaaggcacgggagtggacaccaagggatatcgaagcacagactcagaaaccagaacccccagagtccgccgaaaagttgctagaaagtccaggggttgaagccggagagggcgaggcggagaaggaagaggctggcgcccagggaagacccttgagagctcttcaaaactgttgttctgtaccgtccccgctccctcccgaggacgctggaacaggtggactcaggcagcaggaagaggaagctgtcgagctgcagccacctcccccggcacccctgtcaccaccgccacctgcccccacagcaccgcagccaccaggagatccactgatgagtcgcctcttttacggcgtcaaggctggacccggggtcggggcaccccggcgttccggacacacgttcaccgtgaatcctagaaggagcgttcctcctgcaactcctgcgaccccgacctctccagctaccgttgacgcagccgtgcctggcgctggcaagaagcgctatcccacagccgaggaaatactggttctgggaggttacctcagactctccaggtcatgcttagcaaagggaagccccgagcgtcaccacaaacagctgaagatttccttcagtgagactgccttagaaacaacctaccagtacccctcagaaagctctgtattggaagagttggggcccgagcccgaggtgccttcagcacccaatcccccagccgcccaacccgacgacgaagaggacgaggaggagctcttacttcttcagccggaactgcagggcggcctgcgcaccaaagccctgattgtggacgagtcatgcagaaggtag

SEQ ID NO: 26119 - DNA, 1446 bp, synthetic construct
  source 1..1446: mol_type = other DNA; note = Synthetic coding sequence
atggccagcgccgccagcgtgaccagcctggccgacgaggtgaactgtcctatctgccagggaaccttgagggaacctgttacaatcgattgcggccacaacttctgtcgcgcatgcttaacacgctattgcgaaattccaggccccgatttagaggaaagcccaacttgcccactgtgcaaagagccatttcgtcccggtagctttcgcccaaactggcaactggccaacgtggtggaaaatatcgagagacttcaacttgtgtctacgctgggactgggcgaagaggatgtatgtcaggaacacggagagaagatttatttcttttgtgaagatgatgagatgcagctgtgtgtcgtgtgtcgggaagccggcgagcacgcaacacacacgatgaggttcctagaggacgccgccgcaccttatcgcgaacagattcataagtgcctcaagtgcctgcggaaagaaagagaggagatccaggaaattcaaagtcgagagaataagcgaatgcaggtcctccttacccaggtttccactaagcgccagcaagtcattagcgaatttgcccacctccggaagttcctcgaagagcagcaatcgatactgcttgctcagctggagtctcaggatggagatatcctgcggcagcgggacgaatttgacttattggtagcaggcgaaatttgtaggttctcagcccttatcgaggagctcgaggaaaaaaacgagcggccggcaagagaactattaacagatataaggtctaccctcattcgttgtgagactcgcaaatgtcggaaaccggtggccgtatcccctgagctcggccaaaggatccgggacttcccccagcaggcgctgcccctgcaaagagaaatgaagatgttcttggagaagctatgctttgaactggattacgagccagctcacatctcactggaccctcagaccagtcacccgaaacttctgctgagcgaagaccatcagagggcccaattcagctacaaatggcagaattcccctgacaatcctcagcgatttgacagagcaacttgcgtcctggcccatacaggcattaccggagggagacatacctgggtggtctctattgatttggcgcacgggggatcatgcacagtcggcgttgtcagcgaggacgtacagaggaaaggggagctgcgactcagacctgaggagggagtgtgggccgtccggctggcctggggattcgtatctgccttggggagctttcccactcgactgacgctgaaagagcagcctagacaagtgagggtgtcactggattacgaggtggggtgggtcactttcacaaatgcagtcaccagggaacctatatacacgtttacagcttcctttaccagaaaagtgatcccgtttttcggactctggggccgcggctcaagcttctctctgagcagctag

SEQ ID NO: 26120 - DNA, 537 bp, synthetic construct
  source 1..537: mol_type = other DNA; note = Synthetic coding sequence
atgagcagcaacgagtgcttcaagtgcggccggagcggccactgggcccgcgagtgtccaactgggggaggaaggggtcgcggtatgcgcagtcggggtagagggggctttacatcagaccggggatttcagtttgtgtcaagttctctgcccgatatatgctacaggtgtggagaatcaggacatctggccaaggattgtgaccttcaagaagatgaggcctgttacaactgtggtcggggaggacacatcgccaaggactgcaaagaacctaaacgggagcgagagcagtgttgttataattgtgggaagcctggccacctggccagggactgtgatcatgccgacgaacagaagtgttatagctgcggtgagttcggtcatatacaaaaggactgcacaaaggtgaaatgctatcgctgcggcgaaactggacacgtggcaatcaattgctcaaaaactagcgaggtgaattgttatcgctgcggagaatcaggacatctcgcccgcgaatgcacgatagaagcgaccgcttag

SEQ ID NO: 26121 - DNA, 87 bp, synthetic construct
  source 1..87: mol_type = other DNA; note = Synthetic coding sequence
atggccatggcccccagccccagcctggtgcaggtgtacaccagcccggcggcagtcgctgtgtgggaatggcaggatggcctctag

SEQ ID NO: 26122 - DNA, 603 bp, synthetic construct
  source 1..603: mol_type = other DNA; note = Synthetic coding sequence
atggccgccaccgcccgggaggacggcgccagcggccaggagcggggccagcggggttgcgaacactatgacaggggatgcctgctcaaagccccttgttgtgataaactgtacacatgcaggctctgccacgataataacgaggatcatcaacttgaccgattcaaggtgaaggaagttcaatgtatcaattgcgaaaagatacagcacgcacagcaaacctgtgaggagtgctcaactctgtttggggagtactattgcgatatctgtcacttgtttgataaagacaagaaacaataccattgtgaaaactgtgggatctgtcgaattgggcctaaggaggacttctttcactgcttgaaatgtaacctctgtcttgccatgaacctgcaaggcaggcataaatgtatcgagaacgtatccagacagaactgccccatctgcttagaagatattcatacctccagagtggtcgcgcacgttctcccctgcggccacctgctgcacagaacgtgttatgaagaaatgctcaaagagctacaaatgtccataatgtacgcgctttgcttccgatatgatcaggttcttgaaaccgccggatag

SEQ ID NO: 26123 - DNA, 567 bp, synthetic construct
  source 1..567: mol_type = other DNA; note = Synthetic coding sequence
atggccacccccctgggctggagcaaggccggcagcggcagcgtgtgcctagccttggatcagctccgggacgtgatcgagtcacaggaggagttgatccatcagctgaggaatgtcatggtgctgcaggatgaaaactttgtcagtaaggaagagtttcaagctgtggagaaaaaactggtggaggaaaaggctgcccacgccaaaacaaaggtgctgcttgccaaggaggaagaaaagcttcagttcgcactgggggaggtcgaggtcctgagtaagcagctggaaaaggaaaaactggcctttgaaaaggctctgtctagcgtcaaaagcaaagtcctgcaggaatcaagcaagaaagatcagttgattactaaatgtaatggccggagagaggcccgtgccctgcaccacggttatatcaacggactatttcctaaccatccagtgccagtgagcaaagctggtttccatagtaatacgtgcccccagctgcggattcaggctggccctggtgggccgcacctgagaaaaggcctgaaaggcccaggcaggcctcgtaaatag

SEQ ID NO: 26124 - DNA, 381 bp, synthetic construct
  source 1..381: mol_type = other DNA; note = Synthetic coding sequence
atggaccggagcaagcggaacagcatcgccggcttccccccccgggttgaaagactggaagaatttgaaggcgggggggggggagaaggaaatgtgtcacaagtgggccgggtctggccctcttcctaccgtgcgctgatatcggcctttagcaggctgacccggctggacgatttcacctgcgaaaagataggttccggcttcttctccgaagtgtttaaggttcggcaccgggcgtcaggtcaagtcatggccctcaagatgaacaccctcagctcgaatagggcaaatatgctcaaggaggtccagctgatgaatcgactgtctcatcccaatattctacgctgtaggtcaatgaaccagaattttagcccgaattag

SEQ ID NO: 26125 - DNA, 1443 bp, synthetic construct
  source 1..1443: mol_type = other DNA; note = Synthetic coding sequence
atggagaccgacctgaacagccaggaccggaaggacctggacaagttcattaagttttttgcattgaaaacggtccaggtgattgttcaagcgcggctcggggagaaaatctgcacacgatccagcagttcgcccaccggtagtgactggttcaacctggccattaaagatatacctgaagtcacacacgaggccaaaaaagccttggcaggccaattacccgccgtcggacggtccatgtgtgttgagatcagtctgaaaacatcagagggggactcgatggagctcgagatctggtgtctggaaatgaatgagaaatgcgataaggagattaaagtttcctatactgtctacaatcgactaagcctgctactgaagtctctgctggctatcactcgcgtgacgccagcctatcgcctatccagaaagcagggccatgagtacgttatcctatatcggatctattttggagaagtccagctgtccggcctgggcgaaggcttccagacagtgcgagtggggaccgtgggcacgcctgttggcactataactctttcttgcgcttacaggatcaacctggcattcatgagcacaaggcagttcgaaaggacaccccccataatggggataatcattgaccactttgtggataggccatatccttcatcaagtcctatgcacccatgtaattacagaacggctggcgaggacaccggggtaatatatccttctgtggaggactctcaggaagtgtgtaccacctcatttagtacttctccaccctcacagcttatggttcccgggaaggagggaggcgtgcctctcgcacctaaccagcccgttcacggaactcaggctgatcaggagcgattggcaacttgcacaccatcagataggacacactgcgcagctacaccctctagttcagaggacactgaaacagtgtcgaacagctcagaggggcgcgcatctccacacgacgtcctggagacaatctttgtgcggaaagtgggagcatttgtgaataagcccattaaccaggtgactttaacgagcttggacattccctttgcaatgttcgctcccaagaaccttgaactggaagatacagacccgatggtcaacccacctgatagtcccgaaacagagtccccactgcaggggagcctgcactcagacggatctagtggcggatcttcaggaaacactcatgatgacttcgtcatgatcgacttcaagcctgctttcagtaaggacgacatcctgccaatggacttgggcaccttttatcgggagtttcagaacccacctcaactgtcaagcctgtctattgacattggggcgcaatccatggctgaggatctagattcactaccagagaaactggccgtgcacgagaagaacgttcgcgagtttgacgcgtttgtggaaacactgcagtag

SEQ ID NO: 26126 - DNA, 390 bp, synthetic construct
  source 1..390: mol_type = other DNA; note = Synthetic coding sequence
atggccgagctgatccagaagaagctgcagggcgaggtggagaagtatcagcagctgcagaaggacttgtctaagtccatgtcaggacggcagaagctcgaagcccaactcaccgaaaataacatcgtaaaagaagagttagctctgctcgatgggtcgaatgttgtgttcaaactcctgggtcctgtgttggttaaacaggaactcggcgaggctagagctacagtaggaaagaggctagactatatcacagccgaaattaaacgctatgaaagccagcttagagacctggaaaggcaatcagaacagcagagagagaccctggcccagctgcagcaagaattccaaagagcccaggccgcgaaggcaggagccccaggtaaagcatag

SEQ ID NO: 26127 - DNA, 348 bp, synthetic construct
  source 1..348: mol_type = other DNA; note = Synthetic coding sequence
atggtggaggacgagctggccctgttcgacaagagcatcaacgagttctggaacaagtttaagagtaccgacacctcctgccagatggcaggtctgcgtgatacctataaagactccatcaaagccttcgctgaaaagctctctgttaagttgaaagaagaggaaagaatggtcgagatgttcttagaataccagaatcagatcagcagacagaacaaactgatacaggagaagaaggacaacctgctgaagttgatcgccgaagtaaaagggaaaaagcaggaactggaggtcctgaccgccaatattcaagatttaaaggaggaatattcccggaagaaggaatag

SEQ ID NO: 26128 - DNA, 402 bp, synthetic construct
  source 1..402: mol_type = other DNA; note = Synthetic coding sequence
atggccagcagcgcccgggagcacctgctgttcgtgcggcggcggaatccccagatgagatacactttatctccagagaaccttcagtcgttggccgcccagagctcaatgcccgagaatatgaccctgcagcgggctaactcagacaccgacctggtgacctccgagtccagaagctccctaaccgcgagtatgtatgagtacactctgggccaggcccagaatctgattatcttctgggacatcaaggaagaagtggatccttcagattggatcggattatatcacatcgacgagaacagccccgccaatttttgggacagcaagaatcggggcgtgacaggtactcagaagggacagatcgtctggcgcatcgagcctggtccgtatttcatggaatag

SEQ ID NO: 26129 - DNA, 264 bp, synthetic construct
  source 1..264: mol_type = other DNA; note = Synthetic coding sequence
atgagcctgttcggcaccaccagcggcttcggcaccagcggcacctctatgttcggctccgccacaactgacaaccacaaccccatgaaggacatcgaagttaccagttcccccgacgactccataggctgcctgtcattctctcctcccactttgcctggcaattttctgattgcaggtagctgggcgaacgatgtaaggtgctgggaagttcaggattcagggcagactattcccaaggcacagcagatgcacaccgggtag

SEQ ID NO: 26130 - DNA, 1329 bp, synthetic construct
  source 1..1329: mol_type = other DNA; note = Synthetic coding sequence
atggccaacagcttcgccgcccggatcttcaccaccctgagcgaccttcagactaatatggcgaatctcaaagtgataggcatcgtgattgggaagaccgacgtaaagggctttcctgatcggaagagtattggatccgagagatacaccttttcttttactattcgcgattcacctgctcactttgtaaatgcggcttcgtgggggaacgaggattatatcaaatctctttctgatagcttccgggtcggagattgcgtgatcatcgagaatccccttatccaacgaaaagagatagaacgcgaggagaagttcagtcctgcaacaccctctaactgtaaactgcttctctcagaaaaccatagcacagtgaaggtttgtagttcctatgaggtggatacaaagctgctaagcctaattcatctgccggttaaggaatctcatgactactacagcctgggcgacatcgtagccaatggacactcccttaacgggaggatcataaacgttctggccgcagtgaaaagcgtcggagagccaaagtacttcacaacctctgacagaagaaagggacagcgatgtgaggtccgcttgtacgacgagacagagagttctttcgctatgacttgttgggacaatgagtccattctgttagcacagtcatggatgccccgtgagaccgtgatcttcgcatccgacgtcaggataaattttgacaaattcagaaactgcatgacagcaactgtgataagcaagacaatcatcaccactaacccagatattccagaggctaatattctgctgaacttcattagggaaaacaaagaaacaaacgttctcgacgacgaaattgactcctatttcaaggaatctatcaacttgagcacaatcgtcgacgtctatacagtggaacagctcaaaggaaaagctctcaagaatgaaggtaaagctgacccaagttatggaattctatacgcctatatcagtaccctgaacattgacgatgaaactacaaaggtcgtaaggaacaggtgttctagctgtggatacatagtgaatgaagcttccaatatgtgtacgacctgtaacaagaacagccttgactttaaaagcgtcttccttagtttccatgttttaattgatctgacagaccacactgggactctgcatagttgctctctgacggggagcgtggccgaagagaccctaggctgtacttttgtgctatcccacagggcaaggtccggcctcaagattagcgtgctttcatgcaaactagctgacccaaccgaagcaagccgaaacctgagtggacaaaagcatgtctag

SEQ ID NO: 26131 - DNA, 651 bp, synthetic construct
  source 1..651: mol_type = other DNA; note = Synthetic coding sequence
atgaacaaccagaagcagcagaagcccaccctgagcggccagcggttcaaaacaagaaagagggatgaaaaggagcggtttgatccaacccagtttcaggattgtattatccagggcttgaccgaaaccgggaccgacctggaggccgtcgcaaagtttctggatgcctccggcgccaaactcgactataggcgctatgcagagaccctgttcgacatcctcgtggcaggtggaatgctggcgccgggcggtacccttgcagacgatatgatgcggactgatgtgtgtgtgtttgccgctcaggaagatctcgagactatgcaagcttttgcccaggtcttcaataaattgatacgtcggtacaagtacctagagaagggattcgaggacgaagtgaagaaactcctcctgtttctaaagggctttagcgagtcggagcgaaataaattggcaatgcttacgggagtcctcctggccaatgggaccctgaacgcaagcatcttgaactcattatataacgaaaatttagttaaggaaggagtcagcgctgcctttgctgtgaaactgttcaaaagttggatcaacgagaaggatatcaacgctgtcgcggcctctctgagaaaagtctcaatggataaccgcctcatgtag

SEQ ID NO: 26132 - DNA, 429 bp, synthetic construct
  source 1..429: mol_type = other DNA; note = Synthetic coding sequence
atgaacgaggtggtgcacaccagccccaccatcggcagcaacgtggaggagatcgtgataaacaacacaaggtttctgatgtgggacattggggggcaggagagcctccgctctagctggaacacatattacaccaacactgaattcgtcattgtagtcgtggactctaccgacagagagcggatttccgtgacccgggaagaattatacaagatgctcgcccacgaggatctacgtaaggctggtctgttaatttttgccaacaagcaagatgtcaaggagtgcatgaccgtggccgaaatttcccagtttctgaaactgacctcgatcaaggatcatcagtggcacatccaggcctgttgtgctctcacgggcgaaggattgtgccagggactcgaatggatgatgtctcggctgaaaattaggtag

SEQ ID NO: 26133 - DNA, 447 bp, synthetic construct
  source 1..447: mol_type = other DNA; note = Synthetic coding sequence
gccatccacatcctggacgtgctggtgctgaacggcaccgacgtgagggagcagcatttcaaccagcggatccagctcgcagaaaaatttgtgaaggctgtgagcaagccatcccggcctgacatgaatcctattagggttaaagaggtataccgcctggaggaaatggagaaaatatttgtgaggttagagatgaaaattatcaaagggagcagtggcacgcctaaactctcatacacgggcagggatgaccggcacttcgtgcccatgggactgtatatcgtacggacggttaatgagccatggacaatgggattctccaagtccttcaaaaagaagtttttttataacaagaagactaaagactcgacttttgatctaccatattaccctttcccttctttctttttccccaatcgtcgatataacctgctgctgttcgtgtag

SEQ ID NO: 26134 - DNA, 300 bp, synthetic construct
  source 1..300: mol_type = other DNA; note = Synthetic coding sequence
atggaggagatccccgcccaggaggccgccggcagcccccgggtgcaattccagtcactggaaacacaatccgaatgtctgtctcctgagccccagtttgtgcaagacactgacatggaacaaggactgactggggggatcttgctgcggctgccaactactagaatacactccgtgaactcttgtcctgccctgtcgcatacccaagcctctgctttctccggcgagacccttgctgtgctgacagccggtatcagcaagagatggcctaaataccgattgcccatcgacatcgcatag

SEQ ID NO: 26135 - DNA, 2493 bp, synthetic construct
  source 1..2493: mol_type = other DNA; note = Synthetic coding sequence
atgaagcggggccggctgcccagcagcagcgaggacagcgacgacaacggatctctctccactacctggagccagaactcacgaagtcagcatagaaggtcatcctgtagccgccatgaggatcgtaagcctagtgaggtattccgaaccgacctcattacggctatgaagctacacgattcataccagctgaatccagacgagtattatgttctagccgatccttggcgccaggagtgggaaaaaggagttcaggtccccgtctcacccggcactatccctcagcctgtggctagaccaaagaaatatatcgtgtcatctggtagcgaaccacctgagcttggttacgtggatatccgaaccttagccgatagtgtttgccgatacgatcttaacgacatggacgctgcctggttggagcttaccaacgaagagtttaaggagatgggcatgcctgaactcgacgagtacaccatggaacgggtgctggaagagttcgagcaaagatgctacgataacatgaaccacgctattgagacggaagaaggactcggtatcgaatacgatgaggacgtcgtgtgtgacgtgtgccagtccccagacggagaggatggtaatgagatggtgttttgcgataagtgtaatatttgtgtgcatcaggcttgctacggcatcctgaaggtgcccgaaggaagctggttatgcagaacatgcgctctgggtgtgcagccgaagtgtctcctgtgccccaagaaagggggtgccatgaagcctacacgctccggcacaaaatgggtgcatgttagttgcgcactttggatccctgaggttagtattggttcacctgaaaagatggagcctattaccaaggtgagtcatattcctagcagccggtgggccctggtctgcagcttgtgcaatgagaagttcggcgcgtccatacagtgttccgtaaagaactgcagaactgctttccatgtcacctgtgcgttcgaccgtggtctggagatgaaaacaattctagcggaaaatgatgaagtcaaattcaagagttactgtcctaagcatagctcgcatcgaaagcctgaggagagccttggcaaaggagctgcccaggagaacggagcacctgaatgctctccccgcaatccacttgaaccatttgcatccctcgaacagaaccgggaggaggcccatagggtcagtgtgaggaaacaaaaactccaacagttggaggacgaattctatacctttgtgaatttactggacgttgcgcgagctctgcgcctgccagaagaggtcgtcgattttctgtatcaatactggaaattaaaacggaaggttaacttcaataagccattaattactcccaaaaaggacgaggaagataacctagctaagcgcgagcaggacgttttatttcggagactgcagctgtttacgcatcttcgccaggacctggaacgggtaagaaacttgacatacatggtcacgagacgcgagaaaatcaaacgttctgtgtgcaaagtccaggaacagattttcaatttgtataccaaactgctggaacaggaacgcgtcagcggtgtccccagcagttgctcctcctcctcacttgaaaatatgctgctctttaattctcccagcgtcggcccagacgcgcccaagatcgaagatctaaagtggcactccgcctttttccggaagcaaatgggaaccagcctggttcattctttaaagaaacctcacaagagggatccattgcagaatagtcccggctctgaagggaaaactctgctgaagcagccagacctgtgcggaaggcgtgagggtatggttgtgcctgaatcattcctgggactggagaagacattcgctgaggctcgcctcatatcggcacaacagaagaacggcgtggttatgcctgaccacgggaagagaagggacaatcggtttcattgtgatttaattaagggtgatctgaaggataaatccttcaagcagtctcacaaaccgttacgcagcaccgatgttagccagaggcatctggacaataccagagccgccacgagtcccggagtgggccaaagcgcccccggaactagaaaagaaattgtacctaagtgtaatggctccctgatcaaagtcaactataaccagacagctgtcaaagtgcccacaacgccggcgagtcctgtcaagaattggggaggtttccggatacctaagaaaggtgaacgccaacagcaaggagaagctcacgacggggcctgtcatcagcacagtgactacccttaccttggactgggccgcgtccccgcaaaggagagggctaagtcaaagctcaagtcggacaacgaaaatgacggctacgtgcctgacgtcgaaatgagtgattccgaaagcgaagcttccgaaaagaaatgtattcatactagttctacgatttcccgccggaccgatatcatacgtagaagcatccttgcttcatag

SEQ ID NO: 26136 - DNA, 402 bp, synthetic construct
  source 1..402: mol_type = other DNA; note = Synthetic coding sequence
atggccagcgaggacatcgccaagctggccgagaccctggccaagacacaggtggccgggggccaactcagtttcaagggaaagtctctgaagctcaataccgccgaggacgcaaaagacgtaattaaagaaatcgaagactttgacagcttagaggcattgagactggagggaaacactgttggcgtggaggcagcccgggtaatcgctaaagcccttgagaaaaaatcggagctgaagaggtgtcactggagcgacatgttcaccggtcggttgaggactgagatccctccagctctgatcagcctgggcgagggcctcatcaccgcaggggcacaactggtggagctggacctctccgacaatgcttttggtcccgatggcgtccaaggcttcgaatag

SEQ ID NO: 26137 - DNA, 390 bp, synthetic construct
  source 1..390: mol_type = other DNA; note = Synthetic coding sequence
atgagccccggcagcggcgtgaagagcgagtacatgaagcggtaccaggagccacgctgggaggaatatggcccctgttaccgggagcttctgcattataggcttggacgccggctcctggagcaggcccatgctccatggctgtgggacgattgggggcccgcgggaagcagcgaggattcagcgagcagcgaaagcagtggggccggggggcccgctccccgctgcgcaccacccagcccacctcctccggtggagcctgcaacccaggaagaagccgagaggcgcgcacgcggagccccggaggaacaggacgcagaagccggcgacgctgaagctgaggatgcggaagacgctgccctgcccggcaacgcatggcttcgaacctag

SEQ ID NO: 26138 - DNA, 390 bp, synthetic construct
  source 1..390: mol_type = other DNA; note = Synthetic coding sequence
atggccgagctgatccagaagaagctgcagggcgaggtggagaagtaccagcagttgcagaaggacctgtctaagtctatgagcggccgccagaagctggaagcacagctgaccgagaacaacatagtaaaagaagagctggccctgctcgatggctctaacgttgtatttaagctcctggggccagtgcttgtaaaacaggaattgggggaggcccgcgccactgtgggtaagcgactggattatatcactgccgagataaagaggtacgaatcacagctacgggatttggaacgacaaagtgagcagcagcgtgagacccttgcccagcttcagcaagaatttcaaagggcgcaagcggcgaaggctggggcccctggaaaagcctag

SEQ ID NO: 26139 - DNA, 402 bp, synthetic construct
  source 1..402: mol_type = other DNA; note = Synthetic coding sequence
atggccgagaagctgatcacccagaccttcagccaccacaaccagctggctcagaaaacgagaagagagaagcgggcacgccaggaagcagagagacgggaaaaggctgaaagggctgctcggctcgctaaagaggctaaatcagagacgtccggcccccagatcaaagaactgaccgatgaggaagcggagagactgcagttggagattgaccagaagaaagatgccgaaaatcatgaggcacaacttaaaaatggtagcctggacagtccagggaaacaggatacagaggaagatgaggaagaagacgaaaaggataagggaaagctgaagccaaatctcggtaacggagcggatctgccaaattaccgttggacccagacactttccgagctggactag

SEQ ID NO: 26140 - DNA, 2373 bp, synthetic construct
  source 1..2373: mol_type = other DNA; note = Synthetic coding sequence
atgggcacccggaagaaggtgcacgccttcgtgcgggtgaagcccaccgatgatttcgcgcacgagatgatacggtatggcgatgataagagaagtatagacattcatctcaagaaagatatccgccgcggcgtggttaacaatcaacagaccgattggagttttaaactggacggcgttctacatgacgcttcacaggatctggtttacgaaaccgtggctaaagacgtggtatcacaagccctggacggctacaatggaactataatgtgttatggtcaaacaggggcggggaaaacatatactatgatgggtgccactgagaactataaacatagaggaattcttcctcgggctctccagcaggtcttccgaatgattgaagagcgccctacccatgccatcaccgtccgcgtgtcgtatctcgagatctataacgaatctcttttcgacttacttagtaccctgccatacgttgggccaagtgtaactccaatgactatcgtagagaatccccagggcgtatttatcaaaggcctatctgttcaccttacctcacaagaggaggacgccttctctttactattcgaaggggaaacaaaccgcataatagcctctcatacgatgaataagaattcctcaaggtcccactgtatcttcactatctacctcgaggcacatagtagaactctatctgaagaaaagtacatcacctctaagataaacctcgtcgatcttgcaggatcagaaagactcggaaaatctgggagcgaagggcaagtactcaaggaggcaacctatatcaacaagagcctttcattcctggaacaggccattatcgctcttggcgatcagaagagggaccacatcccattccggcagtgcaagctcacccatgcacttaaagactctttaggcggcaattgtaatatggtcttggtgacgaatatctacggggaggcagcacagctcgaggaaaccctctcctccctgcgattcgcaagtagaatgaagctggtaactaccgagcccgctataaacgaaaagtacgatgcggagcggatggtcaagaatctggaaaaggaactcgctttgcttaagcaagagctggccatccacgattcactaacgaatagaacatttgttacatatgaccccatggatgagatccaaatcgccgagatcaactctcaggtgaggcgatatctcgaaggcactctcgatgagatagacattatctctcttaggcagataaaagaagtgttcaaccaatttagggttgtacttagtcagcaagaacaggaggtggaaagtaccctcagacgaaaatacacgcttattgacaggaatgactttgcggctatttccgccatccagaaggccgggttagttgacgtcgacggacacctcgttggggagcctgaggggcagaatttcgggctcggagttgctcccttctccacaaaacctgggaagaaggcaaaaagcaagaagacatttaaggaaccactctctagcctggctcggaaggagggagcttctagccctgtgaacggtaaggatctggactacgttagcaccagtaagacgcagctcgtgcctagttctaaagacggggatgtcaaagacatgctctcgagagacagagaaacaagctccatcgaaccactgccgtctgatagtccaaaggaggagctcaggcctatccgcccagataccccccccagcaagcctgtggccttcgaagagttcaagaacgagcaggggtccgagattaacaggatctttaaggagaacaaaagtatcctaaacgaacggcgtaaaagggcttccgaaactacccagcatatcaacgcaatcaagcgagaaatagacgtgaccaaagaagccctaaacttccagaaaagtctgcgtgaaaagcagggtaaatacgaaaacaagggtctcatgatcatagatgaggaggagtttctactgatcctgaaattaaaagatctcaaaaagcagtaccgttccgagtatcaagacctgagagatcttcgcgctgagattcagtattgtcagcatttagtggatcaatgcaggcacagattactgatggaatttgatatttggtataatgagtctttcgtgattccggaagacatgcagatggcgctgaagcccggcggaagcattagaccaggaatggttccagttaacaggattgtcagtctgggtgaggacgatcaggacaagttctcccagctgcagcagcgcgtgctcccggagggaccggatagcatttctttttataacgccaaggtgaaaatcgagcaaaaacacaattacctgaagacgatgatgggcttacagcaggcccacaggaaatag

SEQ ID NO: 26141 - DNA, 1356 bp, synthetic construct
  source 1..1356: mol_type = other DNA; note = Synthetic coding sequence
atgtacggcgcccccggcgcccccgcccagagcgccagcgtgaccgtggtcaggtctctgaggcgccccccaccacaagccacaggcgtctcatttatgaataatcagaaacaacagaaaccaaccctgtctggccagaggttcaagactcggaagcgggacgagaaggagcggttcgatcccactcagtttcaagattgtatcatccaagggttgactgagaccggtactgacctcgaggcggtggccaaattcctggacgcctccggcgctaagcttgactaccgcagatacgccgaaaccctgttcgatattcttgtggccggcggcatgctcgcccctggggggactctggctgacgacatgatgagaactgacgtttgcgtcttcgccgcacaggaagacctggagacaatgcaggcattcgctcaggtgttcaataagttgataaggcgatataagtatttagaaaagggctttgaagacgaagtcaaaaagctcctccttttccttaaaggattctccgagtccgagcgcaacaagctcgctatgttgaccggcgtgcttctggcaaatggaacgctgaacgcctcgatccttaattccctgtataacgagaacctggtcaaggagggggtgtccgccgctttcgccgtgaagctctttaaatcctggatcaacgagaaggatattaatgctgtggccgccagcttaagaaaggtgtctatggataaccgtctaatggaattgttccccgctaacaagcagtctgtcgaacattttacgaagtactttaccgaggccgggctcaaggagctgagcgagtatgtgagaaatcagcaaacgatcggggcccgcaaggaactgcagaaggaacttcaggagcagatgagccgaggcgacccgttcaaggatattatcctgtatgtaaaagaagaaatgaagaaaaataatattccggagccggtggttatcggaatcgtatggtcttcagtgatgtccaccgtagagtggaataaaaaagaggaactggtggctgaacaagcgattaagcacctgaaacagtatagtccactgttagccgctttcacaactcaggggcagagcgagctgacccttctcttgaaaatccaggagtattgttatgataatatccatttcatgaaggcgttccagaagatcgtcgtcctgttttataaagccgaggtcttaagcgaagagcctatcctgaaatggtacaaagacgcccacgtagccaaaggcaaaagcgtctttctggaacagatgaagaagttcgtagaatggctgaaaaatgctgaggaggagtccgagagtgaggccgaggaaggagattag

SEQ ID NO: 26142 - DNA, 948 bp, synthetic construct
  source 1..948: mol_type = other DNA; note = Synthetic coding sequence
atggccggcggcgcccgggaggtgctgaccctgcagctgggccacttcgcgggttttgttggcgctcactggtggaatcagcaagacgctgctttaggccgcgcaactgactccaaggaaccacctggggagttgtgtccggacgtgctgtaccgtactgggcgtacattgcacggacaagaaacatacacacctcgtcttatactgatggatctgaaaggatccctgtcttctctcaaggaagaggggggcctgtatcgcgacaaacagctggatgcggccatcgcttggcagggtaagctcactacccacaaagaggagttgtatccgaaaaacccctacctgcaggacttcctcagtgccgagggcgtcctgtcgtcagatggagtgtggcgtgtcaagagcatacccaatggaaagggctcaagcccactgccgaccgctactaccccaaagcccctgatccccaccgaggctagtataagagtgtggtctgactttcttagagtccatctacaccctcgaagcatttgcatgatccagaaatataatcatgatggtgaggccggaaggttggaagctttcggacagggagagagcgttctcaaggaaccgaaataccaagaggagcttgaagaccgattacatttttacgtggaggaatgtgattatctgcaggtggtggcatggcagtgtgcactgcaagggggatcttccagccatcctgctaattatctctcgtcgctaaccccagctcagggcttccagatactgtgcgatcttcacgacggcttctctggcgttggtgctaaggccgctgagctgctacaagacgagtattccgggcggggcatcatcacatggggcttgttgcctgggccctatcatagaggagtaagcgggacatggaggtccaagcacagtaatcctatcggaagagtggcctag

SEQ ID NO: 26143 - DNA, 285 bp, synthetic construct
  source 1..285: mol_type = other DNA; note = Synthetic coding sequence
tgcaccagcagctgcacccccagctgctgccagcagagcagctgccaaccggcatgttgcactagcagtccctgccaacaggcatgttgtgtgcctgtgtgctgcaaaacggtgtgctgcaaaccgtcgtcctgccagccagcatgctgtatctcgagcccttgtcagcagtcatgctgcgtccccgtgtgttgtaagccaatatgttgcgtcccacctgcatgttgcacgacaagctgctgtaggcccagttcatctgttagtctgctctgcaggcccgtctag

SEQ ID NO: 26144 - DNA, 1221 bp, synthetic construct
  source 1..1221: mol_type = other DNA; note = Synthetic coding sequence
atggccgccaacctgagccggaacggccccgccctgcaggaggcctatgttagagtagtgactgaaaagagtccaaccgactgggcattgttcacatacgaaggaaacagcaacgacatccgtgtggcaggaactggcgaaggcggcttggaagaaatggtggaggagctgaatagtgggaaggtcatgtacgccttctgtcgtgtgaaggacccaaatagcggcctccccaagttcgtgctgatcaactggggcgcacacgtgaccatcaatgcccgtgccgaagaggatgtggagccagagtgcattatggagaaggttgcaaaggcctcaggggccaactacagcttccataaggagagcggcaggtttcaggatgtgggccctcaggctccggtggggtcagtctatcagaaaaccaacgccgtctccgagatcaagagggtaggcaaagacagcttttgggcaaaagccgagaaggaggaagagaataggagattggaggagaagaggagagctgaggaagcacagaggcagctagagcaggaaagaagagagcgcgaactgagagaggccgcacgaagagagcaacggtaccaagagcagggaggggaggctagccctcagtcgcggacttgggaacagcagcaggaggttgtttcaaggaacagaaatgaacaggaaagcgcagtacatccccgcgagatattcaagcagaaagagcgtgctatgtcaacaaccagtattagttcaccacagccaggcaaacttagaagtccttttcttcagaagcagctaactcagcccgaaacacacttcggacgcgaacctgccgccgccatcagtcggccacgggctgatctgccggccgaagaacctgctcccagcacccccccttgtctggtgcaggccgaggaggaggcagtatacgaggaaccccctgagcaagaaaccttctacgagcaacccccgctggttcagcaacaaggggctggatccgaacatattgaccaccacattcagggtcagggactgtcgggacagggcctgtgcgctcgtgcgctctacgactaccaggccgccgacgataccgagatctcattcgacccagagaacttgattacagggattgaggtaattgacgaggggtggtggcggggctacgggcctgacggccacttcggaatgttcccagccaattatgtcgagttgatagagtag

SEQ ID NO: 26145 - DNA, 981 bp, synthetic construct
  source 1..981: mol_type = other DNA; note = Synthetic coding sequence
atgccccacctgcccctggccagcttccggccccccttctggggcctccgtcatagtcgcggactcccgagattccattccgtttccactcaatctgagccgcatggaagcccaatttccaggcgtaaccgagaagctaagcaaaagcggctgcgtgagaaacaggcgacactcgaagccgaaatcgcgggagaaagcaagtcacctgccgaaagcattaaggcatggaggcccaaggagcttgtcctctacgagatccctacgaagcccggggaaaagaaagatgtgagcggccccctgccccccgcttatagccccaggtatgtcgaggccgcctggtacccttggtgggtgcgcgagggattctttaagccagaatatcaggcgcgactgccacaggcaactggcgaaaccttcagtatgtgtattccccctccaaacgtgacgggcagtcttcacataggccacgccctgacagttgcaatccaggacgccctcgtgcgctggcacaggatgcgcggagaccaggtactttgggtgccgggttccgatcacgctggtattgcgactcaggctgtagtcgagaagcagctgtggaaggaacgcggcgtacgcagacatgaactctcacgcgaagcatttctcagagaggtatggcagtggaaggaggccaagggaggcgaaatctgcgaacagctgagggcccttggagctagtctggactgggatcgggagtgttttactatggatgtggggagcagtgtcgccgtgacggaagccttcgtccggctgtacaaagccggactactgtatagaaatcatcagctggtgaactggtcctgcgcccttcgctctgcaatttcagatatcgaggtggagaaccggcccctgcccgggcacacacaattacgcctacccgggtgtcccaccccagtgagttttggtctgctattctcagtggcctttccagtggatggctag

SEQ ID NO: 26146 - DNA, 684 bp, synthetic construct
  source 1..684: mol_type = other DNA; note = Synthetic coding sequence
atgctgtgctggggctactggagcctgggccagcccggcatcagcacaaacttacaggggatagtagccgagcctcaggtgtgcgggtttatttctgatcggtctgtaaaggaggtagcctgcgggggtaaccactcagtttttctgctggaggatggcgaagtctatacctgcgggctaaacacaaaagggcagctcgggcacgagcgagagggcaataaacctgaacagattggggccttagcagatcagcacatcattcacgttgcatgtggggagtcccacagcctggccctgtctgacaggggccaactgttcagctggggagccggctccgacggacagctcgggctgatgactaccgaagatagcgtcgcagtgcctaggctcatacagaaactcaatcaacagacaatcctgcaggtgagttgtggcaactggcattgcctggccttggccgctgacggccagttcttcacgtggggtaaaaattcacacgggcagcttgggctagggaaagagtttccttcacaagcttcaccccagagggtccggtccctggagggcattcctctcgctcaagtcgccgctggcggggctcattctttcgccctgagcctaagcggcgctgtgtttggctggggcatgaataatgctggtcagcttgggctgtccgacgagtag

SEQ ID NO: 26147 - DNA, 624 bp, synthetic construct
  source 1..624: mol_type = other DNA; note = Synthetic coding sequence
atgagcagccccctggccagcctgagcaagacccggaaggtgccccttcccagcgagccaatgaatcccggccgacgtggtatacgaatctacggcgatgtgccagcctcacatgattcggaactcatggcttttatgacaaggaagctttgggatctcgagcagcaggttaaggcacagactgacgagatcctctcgaaggaccaaaaaatcgccgctcttgaagatctcgtacaaacacttcggccacaccccgcagaggcgactctccagagacaggaggagctagagacaatgtgtgtgcagctacagaggcaagttcgcgagatggaacgatttctgagcgattatgggttgcagtgggtcggcgagccgatggaccaagaggacagcgaaagcaagacagtgtctgaacacggcgagagggattggatgacggccaagaagttctggaaacccggcgatagcctggctcccccagaggtggactttgaccgtctgctggcctccctgcaggacttatctgaactcgtagtcgagggagatacccaagtgacccccgtacctgggggtgcacggctgcggactctggaacccatccccctcaagctgtatcgcaattag

SEQ ID NO: 26148 - DNA, 717 bp, synthetic construct
  source 1..717: mol_type = other DNA; note = Synthetic coding sequence
atgaccgaggacagccagcggaacttccggagcgtgtactacgagaaggtcggctttagaggggtggaggaaaaaaaaagcctggaaatactgctgaaggatgaccgactggggattcttcccccccaccacgagtcacatgccaaggtgatgatgtataggaaagagcagtatctggatgtcctccacgcacttaaagttgtcaggtttgtctctgacgcgacaccacaggccgaggtgtacctgcgtatgtaccaactcgaatcaggaaaacttcctcggtcaccttccttccctctagaaccagatgatgaggtgttcctagcgatagccaaagccatggaagaaatggttgaggatagcgttgattgctactggattacaagacgctttgtgaaccaacttaataccaaatatagggatagtctgcctcagctgccaaaggccttcgaacagtatctgaacttggaagatgggcggctcctgacacatctcagaatgtgtagtgctgcaccaaagttaccctatgatctatggttcaagaggtgtttcgcggggtgtttgcctgagagctctctgcagagagtctgggataaggtggtttctggctcatgcaagattctggtgtttgttgcggttgagattctcctcaccttcaaaatcaaggtaatggccctgaattctgccgagaagatcaccaaatttctggagaattag

SEQ ID NO: 26149 - DNA, 369 bp, synthetic construct
  source 1..369: mol_type = other DNA; note = Synthetic coding sequence
gtgcgggagctggaggccgagctggacgccgagcagaagaagcacgctgaggctctcaagggggtgcgtaagcatgagcgaagggtgaaagaacttgcctaccaggccgaggaggatagaaaaaatctagcgaggatgcaggacctggtcgacaaactgcagagtaaagtgaagagctacaaacggcagttcgaagaagccgaacagcaagcaaacactaatttggccaagtaccgcaaggcccagcacgaacttgacgacgccgaggaaagagctgacatggccgaaacgcaggctaacaagctccgggctaggactagggacgccttgggccccaagttaagcctgtcaccacagcataaggagtag

SEQ ID NO: 26150 - DNA, 483 bp, synthetic construct
  source 1..483: mol_type = other DNA; note = Synthetic coding sequence
tgagagagcctggtgggcctgcaggagggcaagagcaccgagcagggtaatcacgatcaattgaaagagctttatagcgccggtaatctgaccgtactcgccaccgacccactactgcaccaggatccagtgcagctggacttccattttagactgacaagccaaacctccgcccattggcatgggttactatgtgatcgcaggttgttcctggatataccctaccaggcgctcgaccagggcaatcgggaatcactaacagccacactggaatacgtcgaggagaagacaaacgttgacagcgtgttcgttaacttccagaacgacagaaatgacaggggggcactcctgcgggccttctcttatatggggttcgaggtcgtaaggccagatcaccccgctctgcccccactggacaacgtcatcttcatggtctacccgctggaacgggatgtggggcacctcccttctgaacctccttag

SEQ ID NO: 26151 - DNA, 102 bp, synthetic construct
  source 1..102: mol_type = other DNA; note = Synthetic coding sequence
atgagcgtgacctacgacgacagcgtgggcgtggaggtgagcagcgattccttttgggaggtggggaactacaaacggacagtcaagcgcatcgacgactag

SEQ ID NO: 26152 - DNA, 402 bp, synthetic construct
  source 1..402: mol_type = other DNA; note = Synthetic coding sequence
atgtggagcctgaccgccagcgagggcgagagcaccaccgcccactttttcctaggggccggggacgaagggctggggacccgggggattgggatgcgccccgaggagtccgactcagagctcctggaggatgaagaggatgaggtgccaccggaaccgcagatcattgtgggaatttgcgcaatgacaaaaaaatctaagtcaaagccaatgacccagattttggaacggttatgcaggttcgattatcttactgttgtgattctcggggaggatgtcattctgaacgagccagttgagaattggccttcctgtcactgcctgatctcttttcattctaagggctttcccctagacaaggccgtggcctattctaagttgcgaaatccgttcctgatttag

SEQ ID NO: 26153 - DNA, 939 bp, synthetic construct
  source 1..939: mol_type = other DNA; note = Synthetic coding sequence
atggcccagccctacccccccgcccagtaccccccccccccccagaatgggataccagctgagtacgcaccgccaccgccacatcccactcaagactatagcggacagacgccagttcctacagagcacggaatgaccctctataccccagctcagacccacccagagcaacccggatctgaggcgagtacccagcctattgcaggaacacagactgtgccacagacggacgaagccgcccagactgatagccagcccttgcatccctctgatcctaccgagaagcagcagcctaagcggcttcacgtgtcgaacatcccatttcggttcagggatcccgatcttcgacagatgtttgggcagtttggcaaaatactagacgtggagatcatattcaacgaacgggggagtaaaggcttcggtttcgtgaccttcgagacgagttctgacgccgatcgcgcgcgcgagaagttgaacggaacaattgtggagggccggaagattgaggtgaacaacgctactgctcgcgtgatgactaacaagaagaccggtaacccctacacaaacgggtggaaactgaatcccgtggttggagccgtgtatgggcctgaattctacgccgtcacgggctttccctatcccaccactggaactgctgtggcctatcgcggtgcacatctcagaggtcggggaagagccgtgtacaacacattcagagccgctcctcctcctccgccaatcccaacttacggggctgttgtgtatcaggatggcttttacggagccgaaatttatggcggttatgccgcctaccgctacgcacaacccgccgctgccgcagccgcttatagtgacagctatggccgggtatatgcggctgccgatccatatcaccacacgataggccctgccgccacctattcgataggaacgatgtag

SEQ ID NO: 26154 - DNA, 1308 bp, synthetic construct
  source 1..1308: mol_type = other DNA; note = Synthetic coding sequence
tgaagcatcctgaacagcaacgagcacctgctgaaggagaaggagctattaatcgataagcaaagaaaacatattagccaacttgagcagaaagtgagggaaagcgagctgcaagtccacagcgccctcttgggcagacccgcccctttcggagatgtttgccttctgcggctccaggagttgcagagggaaaacacttttcttcgcgcccaattcgcccagaagaccgaggcactgagtcgtgagaagattgatctcgagaaaaagttgtcggctagcgaagttgaggtgcaactgattcgcgaatcactgaaggttgcacttcagaagcactccgaagaggtgaagaaacaggaagaaagggtcaaaggcagagacaagcacatcaataacctgaaaaagaaatgccagaaagagagcgagcaaaatcgagagaagcagcagaggattgagacattggaaagatatctcgctgacttacctacccttgaagaccaccagaagcagtctcagcagttgaaggacagcgaactgaagtctacagagcttcaggaaaaggtgacagagttggagtcccttctcgaggaaacacaggccatctgccgagagaaagagatccagctagagtctcttagacagcgcgaagccgagttctctagcgccgggcattcattacaggacaagcagagtgttgaagagacaagtggtgagggacccgaggtagagatggaatcatggcaaaagcggtatgattccctgcagaagatagtggaaaaacaacagcagaaaatggaccagttgcgctcccaggtgcagtcattggaacaggaggttgcacaggaagaggggacctcacaggcccttcgagaggaggcccagagaagggactccgcacttcagcaactccgcaccgcagttaaggaactctctgtgcagaatcaggatctaatcgagaagaatcttacccttcaggaacatctgaggcaggcacagcctggaagtccccccagcccggatactgcccaactggccctggagttgcaccaggaattggcttcctgcctccaagatttgcaagctgtgtgcagtattgtgactcagcgagctcaaggccatgaccctaatctgtctctgctgctgggcattcactctcaacaccccgaaacccagctcgatcttcagaaaccagacgtgattaaacggaagctggaagaggtccagcaactccggcgcgatattgaggatttacgcaccacaatgagtgaccggtatgcgcaagacatgggagagaactgcgtgacacagtag

SEQ ID NO: 26155 - DNA, 474 bp, synthetic construct
  source 1..474: mol_type = other DNA; note = Synthetic coding sequence
atggagctgcggtgcggcggcctgctgttcagcagccggttcgactctggcaatctggcgcatgtggagaaggtggaaagcctatcctcagatggcgagggcgtgggtggcggcgcctcagccttaacctcaggaatcgctagctcgcccgattacgagttcaacgtttggacaagacctgactgcgcggagacagaattcgagaatggcaatagatcttggttttacttcagcgtgcgaggaggcatgcccggaaaactgataaagataaacatcatgaatatgaataaacaaagtaaactatacagccaggggatggccccattcgtgaggacgctgcctacacgccctaggtgggagcgcattcgggacagacccacttttgagatgacggaaacccagttcgtgctgtccttcgtgcatcgtttcgtcgagggtagaggggccaccactttttttgctttctgctattag

SEQ ID NO: 26156 - DNA, 1620 bp, synthetic construct
  source 1..1620: mol_type = other DNA; note = Synthetic coding sequence
atggccaccagcgcccccctgcggagcctggaggaggaggtgacctgcagcatttgtctagactatctccgagacccggtaactatcgattgtggccacgtgttttgtcgctcttgcaccactgacgtccggcctatcagcggaagcagacccgtctgccccctgtgcaaaaaaccattcaaaaaggagaatatccgacctgtgtggcagctggcctccttagttgaaaatattgagagactaaaagtggataaaggacgccagccaggagaagtgacacgtgaacaacaggatgcaaagctctgcgaacgtcatcgggagaagctgcactactattgtgaagacgacgggaagctgctatgcgtgatgtgtcgcgagtccagggagcaccgcccccatacagccgtgctcatggagaaggcagcgcagcctcatagagaaaaaattctcaatcacctcagcacactgcgaagagatagagacaaaattcagggctttcaagcaaagggcgaggccgacatcttggctgctctgaagaaactccaggaccagagacagtacatagtggcggagtttgagcagggtcaccagtttctgcgggagcgggaggagcacctccttgagcagttggcgaaactggaacaggagctcaccgagggaagagaaaagttcaaatcgagaggtgtcggcgagctggcacggctggctctagttatctccgagctcgagggaaaggctcaacaacctgcggccgaacttatgcaagatacgcgcgattttctcaaccgctacccaagaaagaagttttgggtggggaagccgatcgcaagagtcgtgaagaaaaagactggagaattcagcgataaactcctttccctccagcggggactgcgcgaatttcagggtaaactgttgcgagatctggagtataaaaccgtgagtgtaacattggacccacaatctgcctcaggctacctccaactttcagaagattggaaatgtgtgacatatacttcattatataagtccgcatatctccatccccagcaattcgattgtgagcctggcgtgctgggcagtaaggggtttacttggggtaaagtgtactgggaggtagaagttgagagagaaggctggagtgaagacgaggaagaaggggacgaggaggaggaaggtgaagaggaggaggaggaagaagaggcagggtatggggacggctacgatgattgggagactgacgaggacgaagagagtctcggtgacgaagaggaggaggaggaagaagaagaggaggaggtgctggagagttgtatggtcggcgtcgccagggatagcgtgaaaaggaagggggacttatcattgcgccctgaagatggcgtatgggctctgcgattaagtagtagcggaatctgggcaaacacatcccccgaagccgagctgttcccagcactccgaccacggcgggttgggatagccttggactatgaggggggaacagttacctttaccaatgcagagtctcaagagctcatatacacctttacagctacgttcacccggcggcttgtgcctttcctgtggctgaagtggcctggaactaggctgctcttacgtccatag

SEQ ID NO: 26157 - DNA, 6141 bp, synthetic construct
  source 1..6141: mol_type = other DNA; note = Synthetic coding sequence
atggacgaggtggagcaggaccagcacgaggcccggctgaaggagttgttcgatagctttgacacaacggggactggatccttaggtcaggaagaactgacagacctatgtcacatgctgtcactcgaggaagtggcacccgtgcttcagcagacactgcttcaggataacctgctggggagagttcatttcgaccaattcaaggaggctctgattctgatcctgtcccgtactctcagcaacgaagagcacttccaggaaccagactgtagcttggaggcacagcccaaatatgtgcgcggcggcaagaggtatggtcggaggagcttaccagaatttcaggagagtgttgaagagtttcctgaggttactgtgattgaaccgttggacgaggaggcacggccctcacacatccccgccggcgattgcagtgagcactggaaaactcagcggtccgaggagtatgaggcggagggacaattgcgcttctggaatcccgatgacctcaatgcgagtcagagtggcagttcgccacctcaggattggattgaagaaaagctgcaggaagtgtgtgaggatctaggaattactcgggatggccacttgaatcgcaaaaagcttgtgtcgatttgcgaacagtacgggttgcaaaacgtggacggggagatgttagaagaggttttccacaatcttgaccccgacggcactatgtccgtcgaggattttttctacggacttttcaagaatggaaaatcactcacgccaagtgcatctacaccctaccgacaactcaagcgccacctgtcaatgcagtctttcgatgagtcagggaggcggaccacgacctcatctgccatgacatccacgattggttttcgcgtgttctcttgtctggacgacgggatggggcacgccagtgtggagagaatcctggatacatggcaggaggagggcatcgaaaactctcaggagatcctgaaggcattggatttcagcttggatggtaacattaatctgaccgagcttactttggccctggagaatgagctgcttgtaacaaaaaattctatccaccaggcagccctcgcgagtttcaaagctgaaattaggcacctgttggagcgcgttgaccaggtggtgcgcgagaaagaaaaactccggagtgacctggacaaagctgaaaagcttaagtctctcatggccagtgaggtggatgaccatcacgcagctattgaacgccggaatgagtacaatctccggaaattggacgaggaatataaggaacggattgctgcactaaaaaacgagctgagaaaagagagggagcagatcctacagcaggctggaaagcagaggctcgagctggagcaggagattgagaaggcaaagaccgaggaaaattatatcagagacagacttgcactgtctctgaaggaaaactccagattggagaacgagctacttgagaatgcagaaaagcttgctgagtatgaaaaccttaccaacaagctccagcgcaacttagagaatgttttagcagagaaatttggagatttggatccctcatctgctgaattcttcctccaggaggaacgcctgacccagatgcgtaatgagtatgaacgtcagtgcagggttctgcaggatcaggtggacgagctgcagagtgagctagaggaataccgggctcaaggacgcgtccttcgactccctctaaagaattcaccctctgaggaagtcgaagctaacagcgggggcattgaacctgaacacgggctcgggagcgaggagtgcaatcctctgaatatgtctattgaagcggagttagtcattgaacagatgaaagagcagcatcacagggatatctgctgtctgaggctggaactggaagataaagtaaggcactatgaaaagcagctggatgagaccgtggtgtcatgtaagaaagcacaggagaatatgaagcagaggcacgagaatgaaactcacactctggagaaacaaatcagcgaccttaagaacgaaattgccgaactgcaaggtcaggcagccgtgctaaaggaggctcatcacgaggcaacgtgccggcacgaagaggagaaaaagcagctgcaggtgaagttggaagaggaaaagactcacctacaggagaagctcagactgcagcacgaaatggagctcaaagccagactgacccaggctcaggcttcattcgagagagaaagagaagggctacaatcatctgcatggactgaagagaaggtgcgtgggctgactcaggagttggaacagttccatcaggagcagctcacttcgcttgtagaaaagcatacactggaaaaggaggagctgagaaaggaacttctggaaaagcaccagcgcgagctgcaggagggtagggaaaaaatggagacggagtgtaatcgtcggacctcgcaaatcgaagcccagtttcagtctgactgtcagaaagtgaccgaacgttgtgagagtgctctacagtcgctcgagggtagatacaggcaagagctgaaggatctgcaggagcagcaacgagaggagaagagtcaatgggagttcgagaaggatgaattgactcaagaatgtgcggaagctcaggagttgttgaaggaaaccctaaaacgtgaaaaaaccacgagtctcgtgctgacacaggagcgggagatgttagagaaaacatataaagaacatctaaacagtatggtcgtggagaggcaacagctgctgcaggatctggaggatttaagaaatgtctctgagacgcagcagtcactgctgtctgatcaaatactggagctgaaaagttcccacaagcgcgaactgagggagcgggaagaagtgctctgtcaagcaggagccagcgaacagcttgcgtcacagcgcctagagcggttggagatggagcacgatcaagagagacaggaaatgatgagtaagcttctagcaatggaaaacatacacaaagccacttgtgaaaccgccgatagagagcgggcagagatgtcaacagaaatatccagactgcagtcaaaaatcaaggaaatgcagcaggctacgagccccttaagcatgctgcagagtggttgtcaagtgataggcgaagaggaggtggaaggagatggggctctatcactcctccagcagggcgaacagctgctggaggaaaatggggacgtgctgctcagtctgcagagagcccatgagcaagctgtgaaggaaaacgttaaaatggcaaccgaaatctctcgactccagcagcgattgcagaaactcgaacccggcttggtgatgagcagctgccttgacgaacccgcgactgaattcttcggaaacacagcggagcagactgaacagttcctgcagcagaacaggaccaaacaggttgagggtgttacccgcagacatgtgctttcagatctggaagatgatgaggttagagacctaggtagcaccggcacatcgtccgtgcaaagacaggaggttaagattgaggaaagtgaagcctctgttgaaggtttcagcgaactagagaacagtgaagagacgcgaaccgaaagctgggagctcaaaaaccaaatctcccaactccaggagcagctgatgatgctatgtgcggattgtgaccgggccagcgagaaaaaacaggacctgctattcgatgtaagtgtgctgaaaaagaaattgaaaatgttagagcgtatacccgaggcttcacctaagtacaaactcctgtatgaagatgtgtctcgcgagaacgactgtttgcaggaggagctcaggatgatggagaccagatatgacgaggcattagaaaacaataaggagctgacagccgaggtctttcggctccaggatgagctcaagaagatggaggaggtaacagaaacgttcctgtccctggagaagtcgtatgacgaagtcaagatcgaaaacgaagggttgaacgttttggttctgcgccttcagggcaaaattgaaaagctccaggaatctgtggtacagcgatgcgactgctgtctatgggaggcatccttagaaaatctggagatcgagcctgatggaaacattctgcaactgaaccaaacactggaagaatgtgtccccagagttagatccgtgcatcatgtgatagaggagtgtaaacaggagaaccagtacctcgaggggaacactcaactactggagaaggtgaaggcgcacgaaattgcgtggctgcacggcaccatccaaactcaccaggaacggccaagggtccagaatcaggtgatcctggaggagaacaccaccttgctgggatttcaggataagcatttccagcaccaagctactatcgctgagctggagctggaaaaaaccaaactgcaggagctgacacggaaactcaaggagagggttaccattctagtcaagcagaaggatgtcctctctcatggtgagaaggaggaggagttgaaggccatgatgcatgatctgcagataacatgctctgagatgcagcaaaaggtggagctcctgcggtatgagtctgaaaagcttcagcaagaaaacagtatccttaggaacgaaattacgaccctgaacgaggaagattcgatttcgaatttgaaacttggaaccctgaacggctctcaagaggagatgtggcagaaaacagagaccgtgaaacaggagaatgctgccgtccagaaaatggtggagaatctgaaaaagcagataagtgaacttaagatcaaaaaccagcaactggacctagagaatacagaactttcacagaaaaacagccaaaatcaggagaaactccaggaactgaatcagaggctgacagaaatgttgtgccagaaagagaaagagccaggtaactccgctctggaggaacgtgagcaggagaaattcaatctcaaggaagagttggagagatgtaaggtgcagtcctcaacactggtgagcagcctggaagctgagttaagcgaagttaaaattcagacacacatcgtccagcaagagaaccacctgctaaaagacgaactggagaagatgaagcagctccataggtgccccgacttgtcagattttcagcagaagatatcatcagtgctgtcctacaacgagaagcttctgaaggaaaaagaggctctctcagaagagctaaactcttgtgtcgacaagctagcaaagtcctcgctgctggagcatagaattgctaccatgaaacaggaacagaagagttgggagcatcagtctgcatccttaaagtcccagctggtggcaagccaggaaaaagtgcagaatctagaggatacagtgcagaatgttaacctgcagatgagccgcatgaagagcgatctgcgggttacgcagcaggaaaaggaagccctaaaacaggaggtcatgagcctccataaacagttgcagaacgcaggcgggaaatcctgggcccctgagattgccacccacccaagcggtctacataaccaacagaagcggctcagctgggataaattggatcaccttatgaatgaagagcagcaactgctgtggcaggaaaacgagcggctgcagacaatggttcaaaacactaaggcagaactgacacattcccgcgagaaggtcaggcagctcgagagcaacttgctgcccaaacatcagaagcatctgaacccatccggcaccatgaaccctactgaacaggaaaagctgtccctaaagagagagtgcgaccagtttcaaaaagagcagtcgcccgctaatcgtaaggtgtctcaaatgaacagcctggaacaggagctcgagaccatacacctggagaacgaaggcctgaagaagaaacaagtgaagcttgatgagcagctgatggagatgcagcacttaaggtcaacagccacaccgagtccttctcctcatgcatgggatctccagctgctgcaacagcaggcctgccctatggtacccagggaacagttcctgcagctgcagcgccaactgctccaggcggaaagaattaaccagcacttgcaggaggagctggagaatcgaactagtgagaccaatacccctcaagccctgcttcccgaacagcgggccgttcatgccgattcgtacagaaggatcgggcatctgtag

SEQ ID NO: 26158 - DNA, 1203 bp, synthetic construct
  source 1..1203: mol_type = other DNA; note = Synthetic coding sequence
atggccggcgagaaccaccagtggcagggcagcatcctgtacaacatgttaatgtcagcaaagcaaactcgggctgcacccgaagcgcccgagacccgattggtggaccagtgctggggctgcagttgtggcgacgaacctggtgtaggtagagaagggcttctcggcggtcggaatgtggctctgctgtaccgctgttgtttttgtggaaaggaccatccaagacaaggatctattctctactcaatgctaacatctgcgaaacagacctacgcggccccaaaggctccggaggccactctgggcccttgctggggttgcagttgcggctcagaccctggcgtggggagggccgggttgcctggtggtcggccagtagcgcttctgtatcggtgctgtttctgcggtgaggaccacccaaggcagggttctatcctctattcactcttgacatcttccaaacagacacatgtcgctccagccgcacctgaagccagaccaggcggggcttggtgggaccgcagctatttcgcacagaggccgggcggtaaggaagcccttcccggagggcgggctacggcactgctgtaccgctgttgtttttgcggggaggatcatcctcagcagggtagcactctatactgcgtcccaacctcgaccaaccaggcacaggcagcccctgaggaacgtcccagggcgccttggtgggatacatcatcaggagcattgcgccccgtcgccttgaagagccctcaggtagtgtgcgaggccgcctcagccgggttactgaagacattgcgttttgttaagtacctgccttgctttcaggtcttaccactagaccagcagctagttctggtaaggaattgttgggcttctctgctgatgctggaacttgcgcaagatcgcctgcaatttgaaacggtggaggtaagcgagccttccatgttacaaaaaattctgacgaccagacgccgagaaactggcggaaacgagccattgccggttcctacgctacagcaccatttggcaccgcccgccgaagccaggaaagtcccttccgcgtcacaggtccaagcgatcaaatgctttttgtccaagtgctggagcctgaatatcagtaccaaggagtatgcatatctgaagggaacagttctttttaatcccggcaaaggtaaagaaaacgactgcaaccatcattag

SEQ ID NO: 26159 - DNA, 627 bp, synthetic construct
  source 1..627: mol_type = other DNA; note = Synthetic coding sequence
atgaagcagctggaggaccacgaggccttcgagaccagcagcctgatcgggcattccgcccgagtttacgctctctactacaaagatgggctgctgtgcactggatccgatgacctgtccgcgaaattgtgggatgtctctacaggccagtgtgtctacggtattcagacacacacatgtgctgctgtcaagttcgacgaacagaagctggttacagggtcgtttgataataccgtcgcatgctgggaatggtccagcggggccagaacccagcattttagaggccatactggggcggtgttttcggttgactacaatgacgaactagatattttggtgagcgggagcgcagattttactgttaaagtctgggccttgagcgccggaacgtgtctgaacacactcactggccacaccgagtgggtaacaaaagtggtgctccagaaatgcaaggtcaagtccctattgcacagtccaggggactacatcctgctaagcgcagacaagtacgagattaaaatttggcctatcggtcgcgagattaactgcaagtgccttaagacactgtcagtctccgaagatagatccatttgcttacagccacgccttcatttcgacggaaagtag

SEQ ID NO: 26160 - DNA, 639 bp, synthetic construct
  source 1..639: mol_type = other DNA; note = Synthetic coding sequence
atgttcggcgtgaccaagttcggcgacaacatcgaggacgagtggtttatcgtatatgtcatcaaacagatcactaaggagtttcccgagttggtggccaggatagaggataacgacggggaatttctgttgattgaagcggcggatttccttcccaagtggttggatccagaaaacagcacaaatcgagtcttcttttgccacggcgagctgtgtatcatcccggctccgcgaaagtctggcgcagagagctggctcccaacaaccccgcctaccatacctcaagcgctgaacattatcactgcacatagcgagaagatccttgcatcagagagcataagagccgctgtgaaccggcgcatcaggggataccccgaaaagatccaggcaagcctgcatcgggcccactgcttcctgcccgctggaatcgtagctgtgctgaaacaacgccctagactcgttgcagcagctgtgcaggcattttacttgcgggaccctatcgatcttcgcgcttgtagggtttttaaaacctttctacccgagaccaggatcatgacatcagtcacgttcaccaaatgtttgtacgcacagctggtgcagcagcgtttcgtgccagatcgaagaagtggttatcggtag

SEQ ID NO: 26161 - DNA, 474 bp, synthetic construct
  source 1..474: mol_type = other DNA; note = Synthetic coding sequence
atggccaccagcgcccccctgcggagcctggaggaggaggtgacctgctccatctgtttggactatttaagggaccctgtcacaatcgactgcgggcatgtcttttgcagaagctgcaccaccgatgttcggcccatcagcggctcgcgcccagtgtgccccttgtgtaagaagccgttcaagaaggaaaacattaggcctgtttggcagctcgcctcacttgttgagaatatcgaacggctgaaggtggacaagggcagacagcctggcgaggtgacacgcgagcaacaggatgctaagctgtgtgagcggcatcgggagaaactccactattattgcgaggatgatgggaaactactctgtgttatgtgtcgggaaagtcgtgaacacagaccacataccgcagttctaatggaaaaagccgcacagcctcatcgggaaaagatactgaaccatctctcgactctgcggtag

SEQ ID NO: 26162 - DNA, 4773 bp, synthetic construct
  source 1..4773: mol_type = other DNA; note = Synthetic coding sequence
atgagcgccaccagctggttcctggtgagcagcagcggcgcccggcaccgcctccccagagagttaatcttcgtgggcagagaagagtgcgagctgatgctgcagtcccgcagcgtggacaagcagcatgccgtcatcaattacgatcaagatcgagatgagcactgggtgaaagacttggggtctctcaacggcacatttgtcaatgacatgaggatccccgatcagaagtatgttacactgaagcttaatgatgtgattaggttcggttacgactctaatatgtacgtactggaaagggtgcagcatcgcgtacctgaggaagcattgaagcatgagaaatacacttctcaactccaagtttctgtgaagggcctcgcccccaagcgttccgaggcactccccgagcatacaccatactgcgaggccagtaacccccgaccagagaagggagatcgcagaccgggtacggaggcagcctcctacaggactcccctctacggacagcccagttggtggggggaggacgatggaagtactctgcccgacgcacagcgtcagggtgagccctatccagccgagaggcctaaaggaccggtccaacaggacggggagcttcatggattcagagcccctgcggagccccagggctgctcatttcgtagagagccatcatacttcgaaattcccactaaggagaccccacagccctcgcaacctccagaagtcccagcccatgaaatgcctacaaaagatgcagaggccggagggggaggggccgcccctgtggtacagtctcatgcgagctttacaatagagtttgacgactgcagccccgggaaaatgaaaatcaaggatcatatcacgaaattctctctgagacagcgccggccccctggtaaggaggccactcccggagagatggtgtctgccgaaaccaaggtggcagattggctggtgcaaaatgatccttcactccttcatcgagtaggccctggtgacgatagacattctactaaatcagacctccccgttcacaccagaactctgaagggccataaacacgaggatggcacccagagcgactcggaggacccgcttgccaaggctgcgtctgctgctggcgtaccattagaggccagcggcgaacaagtgcgactgcagcgccagatcaaacgcgatccccaggaactgctccataatcagcaggcattcgtaatcgagtttttcgacgaggatacgccaagaaagaagaggagccaatcttttacacactccccctccggggatcctaaagctgataagagacggggacccaccccggccgatcgggaccggcctagcgtgcccgcgcctgttcaagcaggagggagatcatcagggcctcagcgggctggttctttaaagcgcgagaagacggaggagcgactaggtagccccagccccgcctctagaacccctgccagaccttttggatcggttggcagacgaagcaggcttgctcaagatttcatggctcagtgtctgcgtgaaagttccccagctgccaggccttctcccgaaaaggtcccccctgtgctgcctgcccccctgactccccacggcacgagtcccgttgggcctcccacaccgccaccagcacccactgacccgcagctgacaaaagctcgaaaacaggaggaagacgattccctgagcgatgcaggcacctatacaatcgagacagaagcacaggatactgaggtggaagaggccagaaagatgatcgaccaggttttcggagtattagagagtcctgaacttagccgcgcttcctctgcaacctttcgacccgtgatccggggagaccgggacgagtcagatgatgggggggtcgcacagaggatggccttgttgcaggagttcgcaagtcggcccctgggcgccgcaccccaggccgagcaccagggcctaccggtcccaggaagtccgggcggtcagaagtgggtttctagatgggcctctttggctgattcatactccgatccgggactaaccgaagatggccttggccggcgcggaggagagcccgaaggctccttgcccgtcaggatgaggagacggctccctcagctgcccagtgaacgcgcagatagccccgcgggccccgagtcaagcagacggagtggccctggcccaccagagctggatagcgaacaaccatcacgactgtttgggcaggaagagttagatcccgatagtctctctgacgcatctggatcagacggtggccggggacccgaacctggagtggaaccacaggactcccgacgtcggagcccacaggagggccccacgtggtcccgcgggcggcggtcccccagggcaccgggagaaccgaccccggcaagttttttcatcggtgatcaaaacggtgacgccgttttgagccggaagcccctggccgcccccggcgatggtgaaggactcggtcagactgcccagccttcccccccagccagggacggggtgtacgtgagcgccaatggacgcatggtgatccagctgcggcccggcaggtccccagagcctgatgggcctgctcccgctttcctccgccaagaatcctttaccaaagaacccgcctccggcccaccggccccaggcaagccaccccacatctcttctcatccactgctgcaggatctggccgctacccgcgcagctagaatggatttccactcacaggacacacatctgattctgaaagagacagaaactgccttagcagccttggaagctaggctcttgtccaacagcgtggacgccgagtgcgagggcgggtcaacgccacggcccccagaagacgccctgagtggtgactctgatgtggacacagcatccactgtgagcctaagatcaggaaagtcgggtccatctccaacgaccccccagccgctgcgggcgcagaaggagatgtccccttcgcctcccgctgcccaggaccctggcgggacagcgctggtgtcagcccgcgagcaaagtagtgagaggcagcaccatccactgggcccgaccgacatggggcgcggggaaccggtgaggagatccgccatccggcgggggcatcgcccgcggggatccttggactggccatcggaggaacgcggacccgtgcttgcacacctgcccagttccgatgtgatggcatctaatcatgagacaccggaagctactggcgctggccgcctaggaagtcggcgcaaacctgccgctcctcctccctctcctgctgctagagaagaacagtctcgatcctccgcttcctcacaaaagggcccacaagccctgacccgaagcaactccctatctactccaagacctactcgggccagtcgcctgaggagagcgaggcttggcgacgctagcgatacggaggctgcagacggtgagcgtgggtcactgggaaatccggagccagtgggacggcctgcagcagagcaagccaaaaagctgtctcggttagacattttggccatgcccagaaagagagccggttccttcacaggtacaagcgatcccgaggcagcccccgcgaggaccagcttttctggcagatcggtcgaactgtgttgtgcttcacgaaaacctactatggccgaagctagggcagtctcgcgtaaggccgccaatacagcgaccaccacaggccctcgtcagcctttttcccgcgccaggagtgggtccgcccgttatacttcaaacactcgaagaagacagcagggctccgactacacctcaaccagcgaggaagaatacgggtcgcgacacggcagcccaaagcataccagatctcatacctccactgcgacacagacaccccgggccggttcctctagtcgagctagatcccgcgctccaggccctagagacaccgacgacgatgaggaggagcccgacccgtatggctttatcgtgcagaccgctgaaatcgctgaaatcgcacggttatcccagacacttgtgaaagatgtcgctattcttgcccaggagatccacgatgttgccggggacggggacaccttgggttcttcagaaccagcccacagcgcaagtctaagtaacatgcccagtactccagccagtaccatcagcgcaagagaggaactcgttcagaggatccccgaggcgagtctgaactttcagaaggtgccccccggttccctcaactcgcgcgacttcgaccaaaacatgaatgacagctgtgaggatgccttggccaataagacccggccaaggaatagagaggaggttatcttcgataacctcatgctcaatcccgttagtcagctgtctcaggcaattcgggaaaacactgagcatctcgccgagaagatgaagatattgtttcagaacaccgggagggcctgggaggatctggaagcacgcatcaatgcagagaacgaagttcccattttaaaaacgtcaaacaaagagatttcatctattctgaaggaactgcggagggtgcagaagcagttggaggtgatcaacgctatcgtcgatccctccggctcactggatctgctgacaggcaacagatccctggccagtagcgcacagcccggcctcgggaagggacgtgtagcggcccagtcgccacccagtccagcaagcgcggaggcccttcttccagcccttccactccgcaacttcccgcaaagggcttcctgcgggccccccagtttgcctgatccaacattccttcctgatgccgagagattcctcatttag

SEQ ID NO: 26163 - DNA, 1452 bp, synthetic construct
  source 1..1452: mol_type = other DNA; note = Synthetic coding sequence
atgagcggcggcggccccagcggcggcggccccggcggcagcggccgggcacggaccagttctttcgcagagccaggcggtgggggagggggaggtggcgggggccctgggggttctgcttcgggacctggagggactgggggtgggaaagcttctgtgggagctatgggcgggggcgtgggggcctcgagttccggtggtggccccggcggctctggcggtggaggatccggtggacccggagcgggtacgagctttcctccacctggtgttaaactgggccgagactcggggaaagtcacgaccgttgtggccactctcggccaaggaccagaacgtagccaggaagtggcatatacagacatcaaggtgatcgggaacggctcatttggagtcgtgtaccaagcaagactggctgaaacaagagaacttgttgcaattaaaaaagtgttgcaagataaacgatttaagaaccgcgagctgcagatcatgcgaaaactagatcattgcaacatcgtccggctccgatattttttttattcttccggagaaaaaaaagatgagctgtaccttaacttagtacttgagtacgtgccggaaactgtgtatcgagtggcgagacacttcactaaagccaaattgactattccaattttgtatgtgaaagtgtatatgtatcagctgttccgtagtctagcatacatccatagccagggagtgtgccatcgcgatatcaagccacagaacctgttagtcgatccagacactgctgtgttaaagctttgtgactttggaagcgcgaagcaactggtaaggggtgaacctaacgtttcctacatttgctccagatattatagggccccagaactgatttttggcgcaactgactacacatccagcatcgacgtgtggtccgcgggttgtgtgctggcagaattgctcctggggcagcctatctttcctggagactccggcgtggaccagctggttgaaatcattaaggtcttggggacacccacaagagaacagatccgggagatgaatcctaactataccgagttcaagtttcctcagatcaaggcacacccatggacgaaagtgtttaaatcccgcacccccccagaggcgatagccttgtgcagctcgcttcttgagtatacaccatcctctcgacttagcccgttggaggcttgcgcacattcttttttcgatgagttgcgatgccttgggacccaactgcccaacaatcgcccactcccgccactctttaatttcagtgcaggcgaactgagcatccaaccaagcttgaacgcaattctcatccccccgcacttacgctcaccagctgggacgactactctgactccctcatctcaagcccttaccgagacccccacaagttcagactggcagtcaaccgacgcaactcctactcttaccaattcctcctag

SEQ ID NO: 26164 - DNA, 1389 bp, synthetic construct
  source 1..1389: mol_type = other DNA; note = Synthetic coding sequence
atgggcggcgccgaggccgagccctggggccgggcccccggccccgctattggcggccggagggctggtgactcttgccccgggtggcggcgtcgaagtagaagcagaggaaggggacagcggctgtctcacgggccccgcaggaggcctcagttgctcaccgctgcaccgcctctgcaggctagaggggcctttcggtcatttccccactcatggggggaggactttctcgctagcctcatgttcaagatccagctggagccgctcaagttgcgagcttggaccctcaacggatttgttaaatttcgcaataaggaaacaagcgccgggcccgttgccgtgatgggaaaagactactacaagatcctgggcatccccagcggcgccaatgaggatgaaattaagaaggcctacagaaaaatggccctgaagtaccatcctgataaaaacaaagaacctaacgctgaggaaaagtttaaggaaatcgccgaagcctacgatgtattgtcggatcctaagaagcggggcctgtacgaccagtatggcgaggaaggactgaaaactggaggcggcaccagcggagggagttccggctcttttcactatacctttcacggggatcctcatgctacatttgcaagcttcttcgggggaagcaacccctttgatattttcttcgcttccagtcggtcaaccagaccgttctccggcttcgatccagatgacatggacgtagatgaagatgaagacccttttggggcgttcgggcgattcgggttcaatggcctgagtagaggaccccggagagccccagagcccctgtatcctagaagaaaagtgcaagacccacccgttgtacacgagctcagggtctctctggaagagatttaccatggctctaccaaaaggatgaaaatcactcgacggcggctcaaccccgatggaagaacggttcgcacagaggacaagatattgcacattgtcataaagagaggatggaaagagggaactaagatcacctttccaaaggaaggggacgctactccagataatatacctgctgatatcgtgtttgtgctgaaagacaagccacacgcgcatttcagacgagatgggacgaatgtactctacagcgccctgatcagtctgaaagaggccctgtgtggctgcactgtgaatattcccacaatagacggcagggttatacccctgccgtgcaacgacgtgatcaagcccgggacagtgaagcgcttaaggggggagggtctccccttccctaaagtgccaactcagcgcggcgatctgatcgtggagttcaaagtgaggttccctgatagactaactccccagactcgccagattctcaaacagcacctgccctgttcatag

SEQ ID NO: 26165 - DNA, 279 bp, synthetic construct
  source 1..279: mol_type = other DNA; note = Synthetic coding sequence
gtgtacggcgccaaggacatcgagctgagccccgaggcccaggccaagattgataggtacacacaacaaggctttggcaacctcccaatctgtatggcaaaaacccacttgagcctgagccaccagccagataagaaaggtgttccacgggacttcatccttccaatcagtgacgtgagagccagcattggggccgggttcatttaccccctcgtaggaacccgctctagtcctctagccctcgtaggtgagagtcagcccaagcaggtgcatccttag

SEQ ID NO: 26166 - DNA, 468 bp, synthetic construct
  source 1..468: mol_type = other DNA; note = Synthetic coding sequence
atgagcgtgacctacgacgacagcgtgggcgtggaggtgagcagcgactcgttttgggaggtaggcaactataagagaactgttaaacgcatagacgatggccacaggctgtgttccgacctgatgaactgtctacatgaacgagcacgcattgagaaggcatacgcacagcagctgaccgaatgggcacgccgttggcgacagctggttgagaagggtccccaatacggaacagtggagaaagcttggatggcgtttatgtctgaagccgagagggtctctgagctgcatctggaggttaaggcaagccttatgaatgatgactttgagaagataaagaactggcagaaggaggctttccataagcagatgatgggcggttttaaagagactaaggaagccgaagacggttttcggaaggcccagaagccctgggcaaagaagctgaaggaagtacatttgagttag

SEQ ID NO: 26167 - DNA, 483 bp, synthetic construct
  source 1..483: mol_type = other DNA; note = Synthetic coding sequence
atggaggccgagcggccccaggaggaggaggacggcgagcagggccccccacaggatgaagagggctggccgccacccaacagtaccacgcgaccatggaggtctgcgccaccttccccccccccccccggcacacggcacaccgcacttgggcctaggagcgcttcccttctctccctgcagactgagctgttgctggacctagtggccgaagctcagagtcgtcgattagaggaacagagagcaactttttataccccacagaacccaagctccctagcccccgcacccctcagaccactcgaggacagagagcagctctacagcaccattctgagccatcagtgccagcggatggaagctcagagatctgaaccacccctccctcctggaggccaggagttactcgaacttctcttgagggtccagggaggcggaagaatggaggaacaacgatcccggccaccgacacatacttgctag

SEQ ID NO: 26168 - DNA, 660 bp, synthetic construct
  source 1..660: mol_type = other DNA; note = Synthetic coding sequence
atggagcccagcgcccagcagctgcagctggccgccagcctgcccgctaacctgtctaacttctgtcagggatccgaaatgcccacgacgtctaggccagccctggatgttaaagggggaaccagtccagctaaagaggatgcgaatcaggaaatgagtagtgtagcctattccaatttagcagtgaaagatagaaaggctgtcgcaatcctacattatcccggcgtggcaagcaacggaacgaaggcaagcggcgcacctactagctcctctggctccccgattggctcacctacaactacaccacctactaagccccccagctttaatctacaccccgctccacatctactcgcaagtatgcacctgcagaaattgaactcccagtaccaggggatggcagcggcgaccccaggtcaaccaggcgaggcagggccactgcagaactgggacttcggcgcgcaggcagggggtgccgagagtctatcgcccagtgcaggtgcgcagtccccggctatcatagactctgatccagtcgacgaagaagttctgatgtcccttgtcgtggagctgggtcttgatcgcgctaacgagctccctgagctctggctcgggcagaacgaattcgactttactgctgattttccctctagctgctag

SEQ ID NO: 26169 - DNA, 318 bp, synthetic construct
  source 1..318: mol_type = other DNA; note = Synthetic coding sequence
atgaacatgatctggcggaacagcatcagctgcctgcggctgggcaaggtgcctcatcgttaccaatcaggatatcatccagtagcccccctcggctcaaggattcttactgaccccgccaaggttttcgagcacaatatgtgggaccacatgcaatggtctaaagaggaggaggcagccgcgaggaaaaaagtcaaggagaattccgcggtacgcgtgctgctggaagagcaggttaaatatgaacgggaagctagtaagtattgggacacgttctacaaaattcataagaacaagtttttcaaagaccggaactag

SEQ ID NO: 26170 - DNA, 366 bp, synthetic construct
  source 1..366: mol_type = other DNA; note = Synthetic coding sequence
tgagagggcgagagccccaccgccagcccccacagcagcgccaccgatgacctgcatcacagcgacaggtatcagacgttcctcagggtccgggccaatagacagacaagattgaacgcacggatcgggaaaatgaagcggagaaagcaggatgagggccaggtgtgcccattgtgcaacaggcctctcgccgggtccgagcaggaaatgtccaggcatgtggaacattgtctttccaagagggaaggatcctgtatggcggaggatgacgcagtcgacatagagcatgagaataataatagatttgaggaatatgagtggtgcggtcaaaaaagaattagagcaacgacactgctggaagggtag

SEQ ID NO: 26171 - DNA, 1701 bp, synthetic construct
  source 1..1701: mol_type = other DNA; note = Synthetic coding sequence
atggacctgcaccgggccgccttcaagatggagaacagcagctaccttcctaaccctctagcttcacctgccttgatggtcctggcatctactgcagaggcttcccgtgacgcctccatcccttgccaacagcctaggccatttggcgtgcccgtatccgtagataaggatgttcatatcccgtttaccaacggatcgtatacatttgcctccatgtaccacaggcagggcggggtgcccggcacatttgcaaacagggactttccccctagcttgttgcacctccatcctcagttcgcaccccctaatctggactgtacacccatttccatgctgaaccactctggggtgggagcatttcggcctttcgcctctaccgaggatcgcgaatcttaccagtccgcattcacaccggcgaaacggctgaagaattgccacgatactgaatccccacatttgaggttttctgatgctgatggaaaggagtatgactttgggacacagctgcccagcagctcccccggcagtttaaaggtcgatgacacaggcaaaaaaatatttgctgtgagtggtttgatttccgatagagaggcctcttcgtcgcctgaagataggaacgatcggtgcaaaaagaaggcagctgctctctttgattcgcaagcacccatctgccctatctgccaagtgttgctgcgcccttctgaattgcaagaacacatggagcaagagctggaacaactggcacagctgccatccagcaagaacagcctgctcaaggacgctatggcccccgggactcctaagtccctgctgctgagtgcttccatcaaacgcgagggcgagtcccccactgctagcccccactcaagcgctacggatgacctgcaccactccgaccggtatcagaccttcttgagagtgcgggctaacaggcaaaccaggctgaacgccaggatcggcaaaatgaagcgccgaaagcaggatgaaggacaaagggaggggagctgtatggctgaggacgatgccgtggacattgaacacgagaacaataaccgctttgaggaatacgaatggtgtggacaaaagaggattcgagccacaactctcctcgagggcgggttcagaggatctggattcataatgtgtagcggcaaggagaatccagattctgacgccgatttggatgtggacggagacgacacactagagtatggcaaacctcagtacaccgaagctgacgtaattccctgtactggtgaggagcccggtgaagcgaaggagagggaggccttgaggggcgccgtcttgaacggtggccccccttcaacaaggatcactccggaattttcaaaatgggcctccgatgagatgcccagcactagcaacggggagtcttctaagcaggaagccatgcagaagacttgtaagaactccgatattgaaaagattacagaggacagcgcagtaaccacctttgaggcactcaaggctcgggttcgggaattagagcgccagctgtcaagaggagacaggtacaagtgtttaatctgcatggactcatacagcatgcctttaacctcgatacaatgctggcacgtgcactgcgaggagtgctggctccgtaccttgggcgccaagaagctctgtccgcagtgtaatactatcaccgctcccggcgatctgcggcgcatctacctgtag

SEQ ID NO: 26172 - DNA, 4719 bp, synthetic construct
  source 1..4719: mol_type = other DNA; note = Synthetic coding sequence
atgctgctgcacctgtgcagcgtgaagaacctgtaccagaaccggttcctggggctggctgcaatggccagcccatctaggaattcccaatccagaaggaggtgcaaggagccgctgcgatactcgtataaccctgatcagttccacaatatggacctgcgagggggcccccatgacggagtgaccattcccagaagcacaagcgacacggacctggtcaccagcgactcacgctccacactcatggttagctcctcttattactccattgggcactcccaggaccttgtgatccactgggatatcaaagaggaggtggacgcaggggattggattggaatgtaccttatagatgaggtgctgagcgagaactttctggactacaaaaacagaggcgtgaacggttcccatcgagggcagatcatctggaagatcgacgcgtcctcgtacttcgtggagcccgagactaagatatgttttaagtactaccatggcgtgagcggcgccctgcgcgcaacaacaccctccgtaactgtcaaaaactccgctgccccaatctttaaatcgataggagcggatgagaccgtccagggccagggaagccgccggctaataagtttcagcctgtctgacttccaggcaatgggcctcaaaaaaggcatgtttttcaacccagatccttatctgaagattagcattcagccaggcaaacactctatatttccagctttaccccatcatggtcaggagaggcgctccaaaataatcggaaacacagtcaaccctatttggcaagcagagcagttctccttcgtgtccctacccacagatgtgttagagattgaagtcaaagataagttcgcaaagagccggcctatcatcaagagatttctggggaagctctccatgcctgtgcaacgccttctagaacggcacgccattggtgacagggtagtgagctatactttaggacggcgattgcccaccgaccatgtctcaggtcaactacagtttcgcttcgagataacatcgtcaattcaccccgacgacgaagagatttctttatccaccgagccagagtccgcacaaattcaagacagccccatgaacaatctcatggaaagcggcagcggggaacctcggtccgaagccccagaaagcagcgagtcctggaaacctgagcagttaggcgaaggcagtgttccggatggccctggaaatcagtccattgagctgagtaggcctgcagaggaagccgcagtcatcactgaggctggggaccagggcatggtctcagtcggacctgaaggggctggagagcttcttgcacaggtccagaaggacatacaacccgcaccatcggctgaggaactggcagaacagctggatctgggtgaggaagcttcagccttgctattggaagatggggaagctcctgcctctacaaaggaggaacccctggaggaggaagccaccacacagagtcgagcaggacgcgaggaagaagagaaggagcaagaggaagagggtgacgtctcaacactggagcagggtgaggggcgccttcaactccgcgcatccgtgaagaggaagagcagaccctgcagtttgcctgtatccgagctggagaccgtaatagcatccgcttgtggcgacccggaaactcctcgaacacattacatcaggattcacaccctcttgcattcaatgccgtccgcccagggcgggagcgcggcagaagaggaagatggagcggaagaggaaagcactctcaaagacagtagcgaaaaggatggccttagcgaagtcgacaccgtcgcagccgacccatccgcattagaagaggatcgagaagagcctgagggcgccacaccaggcaccgcccatcccgggcactcgggggggcattttccttctctggcaaacggagcagcccaagacggggacacacatccgtcgactggtagtgagtcagatagctcacccagacaggggggcgaccactcttgcgaaggatgcgatgccagctgttgttccccgtcctgttactcatcctcatgttatagcacaagctgctattcttcaagttgttatagcgcttcgtgctatagcccatcctgctacaacgggaacagatttgccagtcacacaagattttcttccgtggattcagcaaaaatctccgagtccacggtcttttcctctcaagacgatgaggaagaagagaattccgcgtttgagtccgtgcccgatagtatgcagagccctgagctggacccagagtcgactaatggcgcaggtccatggcaagatgagctagcagcaccaagcggccacgtcgaacgttcacccgaaggcctcgaatcacccgtggctggtccatccaaccgccgggaggactgggaggcgaggatcgattcccacgggcgggtgttttacgtggaccatgtgaatcgaactaccacttggcagcggcccaccgccgctgcaacacccgacgggatgcgcagatctggaagtatccagcagatggagcagcttaataggcgttaccagaatattcagcggaccattgctacagaaagatctgaggaagactctggtagccaatcctgtgaacaggcccccgctggagggggaggcggaggcggtagcgattcagaggcagagagcagtcagagtagcctggacctgcggcgggaggggtcgctcagccccgtgaattcccaaaagataacattactgttgcaatcaccagccgtaaagttcatcacgaatcccgaattcttcaccgtgctccacgcgaattactctgcataccgagtatttaccagctcaacttgtctaaagcacatgattctaaaggtccggagggatgcccgcaacttcgaaagataccaacacaaccgcgatctggttaacttcattaacatgttcgccgacacgcgtttggaactgcccagaggatgggagatcaaaacggatcagcagggaaaaagtttcttcgttgaccacaattcccgcgccactaccttcatagaccctagaatccctcttcagaacgggcgactcccgaatcacctcacccataggcagcaccttcaacgcctaaggagctattccgccggggaggcaagcgaggtcagcaggaaccgcggagcttctttactggcccgtccgggccattctttggtggccgcaatacgatcccaacaccagcacgagtcgttgcccctagcttataacgataagatcgtggctttcctaagacagccaaatatcttcgagatgctgcaggagagacaaccaagtctggcgagaaaccacacgctaagggaaaagatccactacatcaggactgagggaaatcacggtttggaaaaactgtcatgcgatgcggatctggttatactgctgagtctgttcgaagaagagatcatgagctacgtgcccctgcaggcagctttccacccggggtactctttctcaccacgctgcagtccttgctcctcccctcagaattctcccggtcttcagagggcttccgctagggcaccatcaccatatcgccgagactttgaggctaagttaagaaatttctatcgaaaacttgaagctaagggtttcggacagggcccagggaagattaaactcatcatcaggagggaccacctacttgaggggacatttaatcaagtgatggcctatagccgcaaagaactgcagagaaacaagctttacgtgactttcgtaggggaggaaggactggactattccgggccttcaagggaatttttctttcttcttagtcaggaactgtttaacccgtattatgggttattcgagtactccgctaatgacacttacaccgttcaaatctctccgatgtcagcctttgtagagaaccatctggagtggtttcgtttttcgggtagaatccttggcctggcactaattcatcaatacctgcttgacgccttttttacccggccgttctataaggccctgctgcgtctgccctgcgatctgagcgacctcgagtaccttgatgaggagtttcatcagtccctgcagtggatgaaagataacaatattactgacattctcgacctaacgttcaccgtcaacgaagaggtattcggacaggttacggaacgggagctgaaaagtggcggcgcaaatacccaggtcaccgagaagaataagaaagaatatattgagcgcatggtcaaatggagggtggaaagaggagtggtgcagcaaaccgaggccctggtccgagggttttatgaggttgttgatagtcgcctggtctccgtgtttgatgcgcgcgagttggaactggttattgcaggaactgctgagattgatttgaacgattggcgaaataatacagagtatcggggcggctatcacgacgggcacttagtgatacgatggttctgggccgctgtggaaagattcaataatgaacagcgcctcaggttattgcagttcgtgactggcaccagctctgtgccctacgaaggctttgccgctcttagagggtctaacggcctgaggcggttttgcattgagaaatgggggaagatcacaagtctcccacgcgctcacacatgtttcaacaggctggatcttccaccctatcctagttattccatgctgtatgaaaagttgctaactgctgtcgaggaaaccagcacatttgggctggaatag

SEQ ID NO: 26173 - DNA, 1629 bp, synthetic construct
  source 1..1629: mol_type = other DNA; note = Synthetic coding sequence
atgagcggcctggtgctgggccagcgggacgagcccgccggccacagacttagccaagaggaaatactagggtcaacccgactagtgtcacaaggcctggaagccttgaggtccgaacaccaggctgttctgcagagcttgtcacagacaattgagtgcttgcagcaaggggggcacgaggagggcctggtgcacgagaaggccaggcagctcagacggtccatggagaatatcgagcttgggctatctgaggcccaggaagaaaaggaaggcgatgcaacgaaagatagcctcgatgacttatttcccaatgaggaagaggaggacccttctaatggactgagcagaggtcagggagcaacagcagcccaacaaggggggtacgaaattccagcccgcctgagaaccctgcacaacttagtgatccagtatgctgcccagggccgttatgaagtcgcggtgcccttgtgtaaacaggccctagaggatctggagcggacctcaggtcgcgggcacccagatgtggccactatgctgaatattctagcgctggtgtacagagaccaaaataaatataaggaggccgcacacctgctaaatgacgcactttctatcagggagtccactttgggcccagaccatccagccgtagccgcaaccctgaacaatctcgccgtgctttatgggaaaaggggaaagtataaagaggcagaacccttatgccagagggccctggagatcagggaaaaggtcctgggtaccaatcaccctgatgtggccaagcagcttaacaatctcgctctgttatgtcaaaaccagggcaagtacgaagcagttgagcggtactaccaacgggcgttggcaatttatgagggccagctgggaccggacaatcccaacgtggctaggaccaagaataatcttgcatcttgctacctgaaacagggaaaatatgccgaggctgagacgctgtacaaagagattcttacgcgcgctcacgtgcaggaatttggatccgtggacgacgatcacaaacccatctggatgcacgccgaggagcgggaggagatgtcgaaaagtaggcaccatgagggagggaccccctacgccgaatacggaggatggtataaggcttgcaaggtctctagtcccaccgtcaataccactctcaggaatttgggagccttataccgcagacaggggaaattagaggctgctgagactctcgaagaatgcgccctcaggtctcgacgccagggaaccgaccccatctcgcagactaaagttgctgagttgcttggtgaaagtgatggcagacggacgagtcaggaggggccaggagattccgttaaatttgaaggcggtgaagacgcctcagtggccgtcgagtggagcggcgatggatctggcaccctgcagcggtcggggtcccttggcaagatccgagatgtgttacgtaggtcatctgaactcttggttcgcaaacttcaaggaacggaacccaggcctagctccagtaatatgaaacgggctgctagtctaaattatctgaatcagcccagcgccgcacccctccaggtgtcccgcggtttgtcggcctccaccatggacctgtctagctcctcctag

SEQ ID NO: 26174 - DNA, 1548 bp, synthetic construct
  source 1..1548: mol_type = other DNA; note = Synthetic coding sequence
atgtgccaggtgggcgaggactacggcgagcccgcccccgaggagcccccaccagcccctcgcccctctagggagcaaaagtgcgtaaaatgtaaagaggctcagccagtagtagtcatacgcgctggcgacgctttttgcagagactgctttaaggccttttatgtacacaaattccgcgctatgctcggcaaaaaccgtttgatctttcccggggagaaagtccttcttgcgtggagcggcgggccctcatcttcaagcatggtgtggcaagtgctggaggggctaagccaggactccgctaagcgattgaggttcgtggccggggtcatcttcgtggacgaaggcgcggcatgcggacaatcattagaggaacgctccaagaccctcgccgaagtgaagcccatcctccaagctaccggattcccatggcatgtggtcgctctcgaagaggtgtttagcctgcccccctccgttctgtggtgcagcgcccaggagctggtgggaagtgagggcgcctacaaggctgccgtggactcatttcttcagcagcaacatgtcctaggtgccggggggggcccaggacctactcagggtgaggagcagcctcctcaacctccactcgatcctcaaaacctggcccgaccgccagccccggcccagactgaggccctatcgcagttattctgcagcgtgaggactctaactgccaaagaggagcttcttcagactctccggactcacttgattcttcacatggcccgggcacacggctacagcaaggtcatgactggagactcttgtacgagactcgccattaagctgatgactaatctggcccttgggcgcggcgcgtttctggcatgggacacaggattcagcgatgagagacacggggatgtggtggtcgttaggccaatgcgagatcacacattgaaggaagttgctttttataaccgtctgttctctgttccttccgtgtttacaccagcagtcgacactaaagcacctgagaaggctagtatccaccgcttgatggaagccttcatacttcgattgcagacccagttcccaagtacagtttctaccgtctatcgcacgtctgaaaaacttgtgaaaggcccacgggatgggccagctgcgggggacagtggcccacggtgtttgctgtgcatgtgcgcgctcgacgtggatgcagctgattctgccacagcatttggggcccagaccagctcccgattgtcccagatgcagtcacctattcccctgactgaaacgaggaccccacccggaccatgctgttcgccaggcgtcgggtgggcacaacgttgtggacagggggcatgccgacgcgaggacccccaggcctgtattgaagagcagctctgctactcctgcagggtcaatatgaaggaccttccctctcttgacccactccccccttacatactggccgaagcccagctccggacccaacgggcatgggggctgcaggaaattcgagattgtctcatcgaggattcggacgatgaggcagggcagtcttag

SEQ ID NO: 26175 - DNA, 1263 bp, synthetic construct
  source 1..1263: mol_type = other DNA; note = Synthetic coding sequence
atgttcaagcggaccgtgctgagctgccccccccccgccgcccccccattacaggctcgaggggccttcaggtctttccctcacagctggggggaggactttctggcctctttaatgtttaagatccagctggaaccgctgaaactgagggcttggacgctaaatggcttcgtaaagtttagaaacaaggagactagcgctggtcccgtagccgtgatggggaaagattattataaaattttggggatccctagtggcgccaacgaagatgaaatcaaaaaagcttaccgtaaaatggccctgaaatatcatcccgacaagaataaggagccaaatgctgaagaaaagtttaaggagattgcggaagcttatgacgtgctctctgacccgaagaagcgcggcctttacgaccagtacggggaagaaggcctcaagacagggggaggaaccagcggaggatcctccggctcattccattatacatttcatggggatccacacgctactttcgcctcgtttttcggaggttcaaacccgttcgacatcttctttgcttcctctcgaagcacgcggcccttctccgggttcgatcctgatgacatggatgtggacgaagatgaagaccctttcggcgcctttggacgcttcgggttcaacggcttaagtcgcggccctcggagagcccccgagcccctttacccaaggagaaaagtacaggatccacccgtggtccatgagctgagggtctcactggaggagatatatcatggctcaactaaaaggatgaagattaccagaagacgtctcaacccagacggccgaactgtcagaaccgaagacaagatcctgcatatcgtgattaagcgcggttggaaagagggtaccaagatcacattcccaaaagagggagatgctacacccgataatatccccgccgacatcgtctttgttctgaaggacaaaccccatgcccactttagacgggatggaaccaacgtgttgtactctgcgctcattagcctcaaagaggccctgtgcggctgcaccgttaatattcccaccatagacggtagagttattccattgccatgcaatgacgtgattaagcctgggacagtgaaaaggttacggggtgaggggctgccctttcctaaggtacccacgcagcgcggggatttgattgttgaattcaaggttaggttcccagatcgtctaaccccccagaccaggcagattctgaagcaacatttgccatgctcctag

SEQ ID NO: 26176 - DNA, 2979 bp, synthetic construct
  source 1..2979: mol_type = other DNA; note = Synthetic coding sequence
atgtacggcagcgcccggagcgtgggcaaggtggagcccagcagccaatctcctggcaggtcgcctcgccttccccgctcgccaagactaggccatcgccgtaccaattctactggtggaagctccggaagcagtgttgggggtggctccggaaagaccttatctatggaaaatatccagtctctcaatgcagcgtatgccacctcaggccctatgtacctgtcggatcacgaaaacgttgggtctgagacgcctaaaagtactatgactctgggacgatcaggaggcagactgccgtatggcgtccgtatgaccgcgatgggatcatctcctaacatcgccagttcaggcgtggcttccgatactatagctttcggcgagcatcatctgccccccgtctctatggcgtccaccgttccacactctctcaggcaggctcgtgataacactatcatggacctccagacccagctgaaggaagtgctcagagaaaacgacctgctgaggaaggatgttgaggtgaaagagtccaaactgtctagttccatgaactctatcaaaactttctggagcccggagttgaaaaaggagcgcgcgctaaggaaggatgaggcctcaaaaatcacgatttggaaggaacagtatcgggtggtgcaggaggaaaatcagcacatgcagatgacaattcaggccctccaggacgaactgcgtattcagagggatcttaatcagctgtttcagcaggattcgtccagtcgcacaggggagccatgtgtggctgaactcaccgaggaaaattttcagagactgcacgccgagcacgagagacaggccaaagaactttttctgctgaggaaaaccctcgaagaaatggagctgaggatcgaaactcagaagcagactcttaatgccagagatgaatccattaaaaagttactggagatgctgcagagcaagggactgagcgctaaggctaccgaggaagaccatgagcgcactagacgtctcgcagaggccgagatgcatgtgcaccaccttgaaagtctgctggaacagaaagagaaggaaaactccatgctccgggaagagatgcatcggaggttcgagaatgctccagactcggccaaaactaaggcactccagacggtaatcgaaatgaaagacagcaagatctcttcaatggagcgcgggctgagggatctggaagaagagatccagatgttgaagtctaacggtgcactctccaccgaagaaagagaagaggagatgaaacagatggaggtttacagaagtcatagtaaatttatgaagaacaaaatcggacaagttaagcaggaactgtcccgaaaggataccgagctacttgccctgcagaccaagctagaaacactgacaaatcagttctccgactcgaagcagcatatcgaagtgcttaaggagagccttactgctaaggaacagcgtgcagccattctgcaaactgaagttgacgccctccgtttacgactggaggaaaaggagacaatgcttaacaaaaagaccaaacaaattcaagacatggctgaggaaaagggcacgcaggccggcgagattcatgatctgaaggacatgctggatgtcaaggagcgcaaagttaatgtgctccagaagaaaatcgaaaatctccaagagcaactgcgtgataaggagaagcaaatgtcttcactgaaggagagagtgaagtctctgcaagccgatacaacaaatactgacaccgccttgactaccttggaggaggccttagcagagaaagagaggactattgaaagactgaaggagcaacgcgaccgggatgagcgagaaaagcaggaagagatagataattataagaaggacctgaaggatctcaaggagaaggtttctttactccaaggcgacctgtccgaaaaagaagccagcttgctggatctcaaggaacatgccagcagcctcgccagctctgggttaaagaaagacagtcgccttaaaacactcgaaattgctctggagcaaaaaaaggaggaatgcttgaagatggaatcccagctcaaaaaggcgcatgaggccgctttagaggctagagcatcgcctgagatgtccgaccgcattcagcacctggagagagagataacacgctacaaggatgaatcttcaaaagctcaggccgaggtcgatagactcctggagattttgaaagaagtagagaatgagaagaatgacaaagataagaagattgcagagctcgaatctctcttttctaggcaagtgaaggatcagaataagaaggttgccaacttgaagcacaaagagcaggttgaaaaaaagaaatcagctcagatgctcgaggaggcccgcagaagggaagataacttgaatgattcgtcccaacagttgcaagattcactaagaaagaaggacgataggattgaggagctagaggaggctctccgtgagagcgtgcaaatcaccgctgagagagaaatggttttggcccaggaggaatcggcacgcactaacgccgagaagcaggttgaggagctcctgatggctatggaaaaagttaagcaagaacttgagagcatgaaggcaaaactgtcatccactcagcagtccttggccgaaaaagagacccatcttactaatctgcgggctgagcgccgaaaacatcttgaagaggtcctggagatgaagcaggaggccttgcttgccgctatatcagaaaaagacgccaatatcgccctcctagagttatctagctctaagaaaaagacccaggaggaggtcgcagcacttaaacgtgagaaggatagacttgttcagcaactgaaacagcaaactcagaacagaatgaaactgatggcagataactatgaggatgatcacttcaagtcttcccactcgaatcagacaaatcataagccatcacctgaccaggatgaggaagagggcatctgggcttag

SEQ ID NO: 26177 - DNA, 180 bp, synthetic construct
  source 1..180: mol_type = other DNA; note = Synthetic coding sequence
atggagcccagcgcccagcagctgcagctggccgccagcctgcccgcaaacctgagtaatttttgccagggaagcgagatgcccactacttccagacccgctctcgatgtgaaaggcggcactagcccagctaaggaagacgccaaccaggagatgtcctcagttgcctacagtaattag

SEQ ID NO: 26178 - DNA, 6978 bp, synthetic construct
  source 1..6978: mol_type = other DNA; note = Synthetic coding sequence
atgaagaagggcagccagcagaagatcttcagcaaggccaagatcccttcttcgtcacactcccccattccttcaagcatgtctaacatgcgctcccggagtttgtcccctcttatcggatccgagaccctgcccttccatagtggaggacagtggtgcgagcaagtggagatcgctgacgagaacaacatgcttcttgactaccaggatcacaagggggcagacagtcatgccggagttcgctatatcactgaggccttgatcaaaaagctcaccaagcaggataacctggcgcttattaagtctttgaatctgtccctgagcaaggacggtggcaaaaagttcaaatatattgagaacctcgaaaagtgcgttaaactggaggtgctgaacctttcgtacaacctgatcgggaagatcgaaaaactcgacaaactcctgaagctgagggagcttaatttaagctataacaaaatcagcaagatcgagggcatcgaaaacatgtgcaatctgcaaaagctcaatctggctggcaacgaaatcgaacatattcctgtctggttaggtaaaaaactgaagtcactcagagttctgaacttaaaggggaacaaaatttcatcactgcaggacatcagtaagctgaagcctctacaggatctgatctcactgatcctggtggagaaccccgtagtgaccctcccgcattatctgcaattcaccattttccatctgcgttccctagaatctctggaagggcaacccgtcacaacccaggatagacaggaggccttcgagagattctcactggaggaagttgaaaggctggagcgagacctcgagaagaaaatgatagaaacagaggaacttaagtccaagcagacgagatttctcgaggaaattaagaaccaggataaactgaacaagtcattgaaagaagaagccatgttacagaagcaaagctgcgaggagctgaaaagtgacctgaacaccaagaacgaacttctgaagcagaagacaatcgagctgacaagggcctgtcagaagcagtacgagctggaacaggaacttgccttttataagatcgatgccaagtttgagcctctgaattactatccatcagagtacgccgagatagacaaggcacctgatgagagcccctatatcggcaaaagccgttacaaaaggaacatgttcgctacggagtcctacataatcgacagcgcgcaggccgtgcaaataaagaaaatggagcccgacgaacagcttaggaacgaccatatgaatcttagggggcacacaccacttgacactcagcttgaggacaaggaaaagaaaatcagtgcagctcagaccaggctgagtgaactgcatgacgaaatcgagaaagccgaacagcaaattttgcgagctacagaggagttcaagcagctggaagaggctattcagttgaaaaaaatctccgaagccggtaaggacctcttgtacaagcaacttagcggaagactgcagctggtgaacaaactacgacaggaggcacttgaccttgagttgcaaatggaaaaacagaagcaggagattgcaggtaaacagaaggagatcaaggacttgcaaattgctatcgatagcttggatagcaaggaccccaaacacagccacatgaaagcacagaagtctgggaaggagcaacagttggatattatgaataagcagtaccaacagcttgagagtagactcgacgagatcctctctcggatcgcaaaagagactgaggaaatcaaggatttagaagaacaattgactgaaggccaaatagcagccaacgaagccctgaaaaaggacctggaaggggttatcagcggcctgcaggagtatctagggaccattaagggccaagccacgcaggcccagaatgagtgtcgcaaactgagagatgagaaggagaccctgctccaacggctcaccgaagtggagcaagaacgagatcagcttgaaatagtggccatggatgctgagaacatgcgcaaggagctggctgagctagaaagcgcactccaggaacagcatgaggtgaatgcttcactgcagcagacacagggagacttgtctgcctacgaggcagaattagaagcccgactgaatcttagggatgctgaggcaaaccagttgaaagaagagctcgagaaagtgacacggctgacgcaattagaacagtccgctctgcaggcagagctcgagaaggaacgccaagcgctgaagaacgcactaggcaaggcacagtttagtgaagaaaaagagcaggagaatagtgagctgcatgctaagctgaagcatttgcaggacgacaataatctgcttaaacagcagctgaaagatttccagaatcacctgaatcacgtagtcgatggcttggtgcgccctgaggaggtggccgccagagtcgatgagctgcgcagaaagttgaagctcggaacaggagaaatgaacattcattcaccaagcgacgtcctcggaaagtcactggccgatctccagaagcagttctccgagattctggctcgatcaaagtgggagcgcgacgaggcccaggtgcgagagagaaaacttcaggaggaaatggccctccagcaggagaagctggcaactgggcaagaagagttccggcaagcttgcgagcgggccctggaggcgaggatgaattttgacaagcggcagcacgaggcccggatccaacagatggagaatgaaatccactacctgcaggaaaatctaaaatctatggaggaaattcagggactgacagatctgcagctgcaagaagctgacgaagaaaaggagagaatcctggctcaattgagagagctcgagaagaagaagaaactggaagatgccaaatcacaggagcaggttttcggcttagataaagagttaaagaagctgaagaaggctgtggccacttccgacaaattggcgaccgcagagctgaccatcgctaaggaccagttgaaaagtctgcatggaaccgttatgaagatcaaccaagagcgcgccgaggaactccaggaggccgagcgcttttcgcgaaaggctgctcaggctgctagggatcttacacgcgctgaggcagagatcgagttgctgcaaaacttgctaagacagaaaggtgagcagttcagattggaaatggaaaagaccggcgtgggcaccggggcaaactctcaggtactcgaaatcgaaaaattgaatgagaccatggaaagacaacgtaccgagatagcacggctgcagaatgtgctcgacctgacagggtccgacaataaaggcggtttcgagaacgtgctggaggagatcgccgaactccgccgggaagtgagctatcagaacgactatatctcttcaatggccgatccatttaaaaggagaggctactggtactttatgccgcctcctccctcaagcaaagtatcttcgcacagttctcaggctacaaaggatagcggagtaggcttgaagtacagtgcgtctacgccggtcagaaagcctcggcccgggcagcaggacggtaaggaaggaagccaacccccgcccgctagtggctactgggtatactcccctattcgctccgggctccacaagctctttccatctagagacgcagacagtggcggtgacagtcaggaagaatccgaattagacgatcaggaggagccaccgtttgtgcccccccctgggtacatgatgtatactgtgctccctgatggaagccctgttcctcaaggcatggcactgtatgcccctccaccaccgcttccaaacaactctcgccccctgacacccggtacagtcgtctacggacctcctccagccggagccccgatggtctacgggccccctcctcctaacttcagcatacccttcatacctatgggggtgttgcactgtaatgtcccagagcaccacaacttggaaaacgaggtctcccgcctggaggatatcatgcagcaccttaaatccaagaaacgggaagagcgctggatgagagcgtccaagagacagtccgagaaagaaatggaagagctgcatcataatatcgatgacttgttgcaggaaaagaaaagcttggaatgcgaagtcgaggagctgcaccgaaccgtgcagaaacgacagcagcaaaaagattttatcgatggaaatgtggagtctcttatgacagagctagagatcgaaaagtccctgaaacatcatgaggatatcgtggatgagatcgaatgcattgagaagaccctcctgaagcgaaggagcgagctgcgtgaagcagacagactgcttgctgaggctgaatcggagctgagttgcactaaggaaaagacaaaaaatgcagtcgaaaagttcaccgatgctaaaaggagcctgctgcaaactgagtcggacgccgaggagcttgaaagacgggcccaggaaacggctgtgaacctggtgaaggcagatcagcagctaagatccctccaggctgatgcaaaggatctggagcagcacaaaatcaaacaagaagagattttgaaggaaattaataaaattgtagccgccaaggattccgactttcaatgcttgtccaaaaagaaagaaaaactgactgaggagctgcaaaagctccagaaggacatcgaaatggcagaaagaaacgaggatcaccacttgcaagtcctgaaggagtccgaagtgctcctgcaggccaagagagcagagttagagaaactgaagagccaagtcacaagtcagcaacaggagatggccgtgttagatcggcaactgggccacaagaaggaagagcttcacctcctgcagggtagtatggtccaggccaaggccgatttgcaggaagcgttgagactgggggaaacagaggtaactgagaagtgcaatcacataagagaggtgaaaagcttgcttgaagagctaagcttccagaagggcgaactcaatgttcagatcagcgaacggaagacccagctgaccctaataaaacaggaaattgaaaaggaagaagagaatcttcaggtggtccttcgacagatgtccaagcataagactgagctcaagaacattctagacatgctccagctcgagaatcacgagttacagggactgaagctgcagcacgaccagagggtcagcgaactggaaaagacccaagtcgccgtgctggaggagaagcttgaactcgaaaatctccagcagatcagccagcaacagaaaggggagatcgaatggcaaaaacagttgctggaacgcgataaacgcgagatagaacggatgaccgctgagagcagggcattacagagctgcgttgaatgtctgagtaaggaaaaagaggatctgcaagaaaaatgtgatatttgggaaaagaaactagctcagactaaaagggtcttagccgccgcggaagagaatagcaaaatggaacagtcaaacctcgagaagctggaactgaatgtccgaaagctacagcaggagcttgatcaattgaacagagacaaactgtccctgcacaatgacatcagtgcaatgcaacagcagctacaggagaagagagaggccgtgaatagtctgcaggaagagcttgcaaacgtgcaggatcacctgaacttagcaaagcaggatctcttgcacacaaccaaacaccaggacgtcctcctatcggagcagacccgactccaaaaggatatatccgagtgggcaaatcgattcgaagactgtcagaaggaggaagaaacaaaacaacagcagctccaggtgctccagaacgagattgaggagaataaactaaagctggtgcagcaggagatgatgttccagagactgcagaaggagcgcgaatctgaggagagcaagcttgagactagcaaagtgacactgaaagaacagcagcaccagctcgagaaagaactcactgaccagaaaagcaaactggaccaagtcctctccaaggtgctcgccgcagaggaacgcgtccgcacattacaagaagaagaaaggtggtgcgaaagtctagagaagacactgtcacagaccaaacggcagctctcggagagggagcagcagctggtggagaagagcggagagctgcttgcactccaaaaagaagcggactcaatgcgcgccgatttcagtctcttgagaaaccagttcttgaccgagcggaagaaggctgagaagcaggtcgcttccctcaaagaggcactcaagattcagcgaagccagctggaaaaaaatcttctggaacagaagcaggagaattcatgtatacagaaagaaatggctaccatcgagttagttgctcaggataaccacgaaagggcccgacgcttgatgaaagagctgaaccagatgcaatacgagtacacggagctgaaaaagcaaatggccaatcaaaaggacttggagcgacggcagatggagatcagtgatgccatgcgtacattaaagagcgaagtaaaggacgaaataagaacttcattgaaaaatttaaaccagttcttgcccgagcttcctgctgacctcgaggcaatactcgaacgcaatgaaaacttggagggtgagctggagtcgttgaaggaaaatctgccattcacgatgaacgaggggccctttgaagagaagctgaatttttcacaggtgcatataatggatgagcactggaggggcgaggcccttagggaaaagctgcgccatcgcgaggatcgattgaaggcacagcttagacactgcatgtctaagcaggctgaggtgttaattaagggcaaaaggcagacggaggggacactgcactccctccggagacaagtggacgcgttaggggagttagtgacctctacctctgctgacagtgccagttccccctctctgtctcagctggagagctcacttactgaagattcccagctgggccagaatcagaagcagaataatagcctgcggtag

SEQ ID NO: 26179 - DNA, 657 bp, synthetic construct
  source 1..657: mol_type = other DNA; note = Synthetic coding sequence
atggacgagctggtgaccctggaggaggccgacggcggcagcgacatcctgttagtggtacccaaagctaccgtcctgcagaatcagctggacgaatcacaacaggaacgaaatgatcttatgcaattgaaactccagctagagggtcaagttactgagctccgatctcgcgtacaggagctggaacgggccctcgccacggcgaggcaagaacacacggagctcatggagcagtacaagggcatcagcagatctcacggggaaattacagaggaaagagatattttaagtaggcagcagggcgaccatgtcgcgaggatcctagaactggaggacgatattcagacaatcagcgaaaaggtactgacaaaagaggttgagctcgacaggctcagggataccgtgaaggcactgacccgggaacaagaaaagttgctagggcaattgaaagaagtgcaggctgacaaggaacagagtgaagctgagctccaagttgcccaacaggaaaaccaccacctaaacttagatctgaaagaggctaagtcctggcaagaggagcagtcagcccaagcccagagactcaaagataaggtggcgcagatgaaggatacactcgggcaggcacaacagagagtccgtccgtcttggagcccgtag

SEQ ID NO: 26180 - DNA, 693 bp, synthetic construct
  source 1..693: mol_type = other DNA; note = Synthetic coding sequence
atgaagaagccccggcccgccgccgccgcccccagcccccggcccccagcctgttcccgaggggctcaccctggcactgcctcggagctgcgcgttcctgcgctgagacgcggcggctgtggggaccggcgtctgcgcgaagaggcggccccagaacaagccgcggccgggccaagacgatccaccgtgggagccctgctggctagcgagctaggatggaagttctatgatgccgatgattaccaccccgaggagaaccgtcgcaagatgggtaagggcattccccttaatgaccaggaccgcatcccatggctgtgtaacctccatgatatactgttgagggatgtggccagcggacagcgtgtcgtccttgcttgcagcgccctgaagaagacatatcgggatattctaacccaggggaaggatggagtcgccttgaagtgtgaggaatccggcaaggaggccaagcaggccgagatgcaattactcgtagtacatttatcaggctcattcgaagtaatttctggccgcctgctgaagagagaggggcattttatgccccctgagttacttcagagccagtttgaaacacttgaaccccctgctgcccctgaaaacttcatccagatttccgtggacaaaaatgtctcagaaataattgccaccataatggaaaccctgaaaatgaagtag

SEQ ID NO: 26181 - DNA, 957 bp, synthetic construct
  source 1..957: mol_type = other DNA; note = Synthetic coding sequence
atgtgccggaccgccctgggcgtgaccaccctgcaggacctgggcgtatgctggcgaaaagaacatgaccccgcagagatgctccgggtgggacgtgccgaactggggggatggaaacctagctgggaagccattgtgaaggaggtggccgctgctaccggccataccgtcgtcctagtggatcagaccgaggacatcctggccaaatcgaagaagggcatcgaagaatccctgcggaaagtggccaagaaaaagttcgcagagaaccttaaggcaggcgatgagtttgtggaaaagacactctccaccattgccaccagcactgatgccgcctcagttgtgcatagcaccgatttagtcgttgaggccatagttgaaaatctcaaagttaagaacgaactcttcaagcgcctggacaaatttgccgccgagcacacgatctttgcaagtaatacatcttccctgcaaattactagcatcgccaacgcaactaccaggcaggatagatttgcagggctgcatttcttcaaccccgtgccagtgatgaagctcgtggaggttatcaagacccctatgacgtcccagaaaacatttgagtccctcgtcgacttctcaaaagcgctcggaaaacaccccgtatcttgcaaagatacgccaggatttatcgtgaatcgccttttagtcccgtacctgatggaggcaatccgtctttatgagagaggggatgcctctaaagaagacatcgacaccgccatgaagcttggcgcagggtacccgatgggtcccttcgagctgcttgattacgtcgggctggacactaccaaattcattgttgatggatggcacgagatggacgccgagaaccccctccaccagccaagcccatccttgaataagttagtggcggaaaataagttcggaaagaagacaggagagggcttttacaagtacaagtag

SEQ ID NO: 26182 - DNA, 666 bp, synthetic construct
  source 1..666: mol_type = other DNA; note = Synthetic coding sequence
atggccatcgtgcagaccctgcccgtgcccctggagcccgcccccgaggctgccactgctccacaagcacccgtgatggggagtgtgtcatcccttatctcaggacgcccctgtccaggcggccccgcacccccaagacaccatggtccgccaggaccgaccttctttcggcaacaagacggactgctgcgggggggatacgaggctcaggagcctttgtgccccgctgtgcccccacgtaaagcggtccccgtaaccagctttacgtacatcaacgaggacttccgcaccgaaagcccccccagcccctcatctgatgttgaggacgcccgggagcagagggcgcacaacgcccatcttaggggccccccccccaagctgattcctgtttctggtaaacttgagaagaatatggaaaagattctgattcgaccgaccgccttcaagccagttctaccaaagcccagaggtgcccccagtctgccaagcttcatgggcccacgtgcgaccggcctgagcggctcgcaagggagccttacacaactgtttggcgggccagccagctcgagttcttcaagcagttcgtcaagtgccgccgacaagcccttagcattttcgggatgggccagcggctgtccctccggcaccctctctgatagcggatag

SEQ ID NO: 26183 - DNA, 585 bp, synthetic construct
  source 1..585: mol_type = other DNA; note = Synthetic coding sequence
atgcgggagctggccgccgtggtgagccgggacatctacctgcacaaccccaacatcaaatggaacgacatcattggactcgatgcagcaaagcagctggtgaaagaggctgtcgtgtacccgataagataccctcagctcttcaccggtattctgtccccatggaaggggctgttgctgtacggacctcctggaacgggcaagacactgctggcaaaagcagtagctactgagtgtaagaccacattcttcaacatctccgctagtactatcgtatccaagtggagaggcgattccgagaaattggtgcgggtgctcttcgagctcgcccgataccacgccccctccacaatctttctggacgagctcgaatctgtgatgtcacagcgaggcaccgcctctgggggggaacacgagggcagcctccggatgaagactgaactcttggtgcaaatggacggactggctcggtcagaggacctggtcttcgttcttgcggccagtaatctgccatgcctaaaggctattgccctccagccgggtgatcgggcaaggcttaggttgaaaaagaaaaagtgcacgtag

SEQ ID NO: 26184 - DNA, 555 bp, synthetic construct
  source 1..555: mol_type = other DNA; note = Synthetic coding sequence
atgaccttccagttcaacttcaccatcgaggaccacctggagaacgaattaacccccatcagggacggggccctgacgctggactcttcaaaggagctttcggtgagcgaatcacaaaaaggagaggagcgagaccgcaaatgttccgcagaacagttcgacctgcctcaggaccacctgtgggagcataagtccatggagaatgctgcaccatcccaggatactgattcacctctttcggccgctagttcctctagaaacctcgagccacacggaaaacaaccatctttgagagccgcaaaggagcacgccatgcctaaggatcttaagaagatgctcgaaaacaaggtcattgaaaccttgcctggcttccagcacgtgaagctttcagtagtgaaaacaatcttactaaaggaaaacttccccggcgagaatatcgtcagcaaaagtttctcttcccatagtgatctgataaccggtgtgtatgaaggaggtctaaagatttgggaatgtacattcgatttgttggcctacttcactaaagctaaagtgtag

SEQ ID NO: 26185 - DNA, 354 bp, synthetic construct
  source 1..354: mol_type = other DNA; note = Synthetic coding sequence
atggtgctgatcctgggccggcggctgaaccgggaggacctgggcgtgcgggatagcccagccaccaaacgaaaggtcttcgagatggaccccaaaagcttaaccggccacgagttctttgattttagtagtggaagttcccacgctgagaacatactgcagatttttaatgagtttcgcgacagcagactcttcacagacgtcatcatctgtgtggagggaaaggagttcccatgccatcgtgctgtactgtccgcatgctcctcctacttcagggctatgttttgcaatgaccatagagagtcaagggagatgctagtggaaataaacggcattctggccgaggccatgtag

SEQ ID NO: 26186 - DNA, 498 bp, synthetic construct
  source 1..498: mol_type = other DNA; note = Synthetic coding sequence
atgatcctgaacgtgctggagtacggcagccagcaggtggccgacctgactctcaatctcgatgattacatcgacgccgaacacctgggggactttcaccggacctacaaaaacagcgaagaactgagatcaagaattgttagcgggatcatcactcctatccacgagcaatgggaaaaggctaacgtgagctctccccaccgagagttcccacctgctaccgcccgggaggtggacccactgcgaatcccccctcaccatccacatacgtcccgacagcctccatggcctcgtcgcgggggaatgatcgtggaccccttaaggagcgggtttcctcgcgctctgattgaccccagttcaggactgccaaaccggctgccccccggagccgtgccaccgggagcccgcttcgatcccttcgggccaatcggcacttccccaccaggacccaaccctgaccatctcccccctccagggtatgatgatatgtatctctag

SEQ ID NO: 26187 - DNA, 369 bp, synthetic construct
  source 1..369: mol_type = other DNA; note = Synthetic coding sequence
gccctgaccttcagcctgcgggccggcgccgccagcgcccaggacggtcggtgcccttgcggcgcgcgacggccagattcacgccttctccaactccatatcacaatgcctttctcatctcctatggaggcagaattggtgcgcagaattctctcgagagatgctgctcctctcccccgccctggagctgtgctgaaggatttcaccgtcagcggcaatcttctatttatacggctgaccgcagcggatcacaggcagctgcaactgagcatcagcagctgtctgcagcaattgtctcttctgatgtggattactcagtgctttctccctgtgtttcttgctcaggcgccctcaggccagcggaggtag

SEQ ID NO: 26188 - DNA, 2415 bp, synthetic construct
  source 1..2415: mol_type = other DNA; note = Synthetic coding sequence
atgaagagcatcggcgtgaagaccgtgaaggtgtgcggcagcaagtcctctgtaagaatagagggacaaccctgctccctcggacagtcccgacgcaaagtgaagctcatgggcgaaaggagctacacactgagcatcggtaacggtgattatttttgggccaataaggagatgctgtgggactacgtgcagacactctctgaccagggggccgagaaacacgagggcaccggacagtcaagcggcataacggatcaggaaaaggaactgtctacaaatgcgttccaagcctttacaagtgggaactacgatgcttgcctgcagcatttggcctgccttcaggacatcaataaggacgactacaagatcattctgaataccgccgtggcagaatttttcaagtcaaaccagacgactacagataatcttagacagacactgaaccaacttaagaatcaggtgcattcagctgtcgaggaaatggatggcttggacgacgtggaaaactccatgctgtactataaccaggccgtcatcctgtaccatctgagacagtacaccgaggctatctccgtcggtgagaagctttaccagtttatagaaccatttgaagagaagttcgcccaggccgtttgctttctcctggtagacctgtatatcctaacatatcaggccgagaaagccctgcacctgcttgcagtactcgaaaaaatgattagccaagggaacaacaataagaacggtaagaacgaaacagggaataataataataaggatggctccaaccataaagccgagtctggggctctcattgaggcagccaaatccaaaattcaccaatataaggtgcgcgcttatatccagatgaaatctctcaaagcctgtaagcgggagattaagagcgtgatgaacaccgcagggaactccgccccttcactgtttctgaagtctaacttcgaatacctgcgaggcaattaccgcaaggctgtcaagttactcaacagcagcaacattgccgagcaccctggctttatgaaaaccggcgagtgcctgcgctgcatgttttggaataatctgggttgtatccattttgccatgagtaaacacaaccttggaatattttatttcaagaaagccctgcaggaaaacgataacgtgtgcgcccagctgtcagccggatctaccgatcccggcaagaagttcagcggtcggccaatgtgtacactgcttacaaataagagatacgagttgctctacaactgtggcatccagcttctccatatcggccgacccctcgcggccttcgagtgcctcattgaggccgtgcaggtctaccacgccaacccacgactatggctccgactcgccgaatgctgcatcgcagccaacaagggcacctcagaacaggagactaagggcttgcctagtaaaaaaggcatcgtacagagtattgtcggtcagggctaccaccgaaaaattgtgcttgcatcccagagcatccagaacacagtgtacaatgatgggcagtcttcagccatccctgttgctagcatggagtttgcagcaatctgtctgcgaaacgcgctgttgttgctaccagaggagcagcaggaccctaagcaagagaatggggctaaaaattcaaatcagctgggcggaaatacggagtcctccgagagtagcgaaacgtgctctagcaaatcgcacgatggagacaaatttattcccgctccaccatcttccccattgagaaaacaggagctagaaaacctaaaatgttctatccttgcctgctcagcttacgttgccctggctctgggagataacctcatggccctgaatcacgcggataagttactgcagcagcctaagcttagtggcagtctcaagttcctcggtcatctgtacgctgctgaggcgctgatcagtctcgatagaatttccgacgccataacccacctcaaccccgagaacgtgacggacgtttcactgggaattagctctaatgaacaagaccaagggtcagataagggagagaacgaggctatggagtcttctggcaagcgggccccccagtgttatcctagtagcgtaaatagcgccaggacagttatgctgtttaaccttggctctgcttattgcctgcggagcgagtacgacaaggctaggaagtgtctgcatcaggctgctagcatgatccatcccaaagaagtcccccctgaggcaatactattagccgtgtacttggaactgcagaatggcaacacccagttggcactgcagatcattaaaagaaaccagctcctccccgctgttaaaacacacagcgaggtgcgaaagaagccggtgttccagcccgtgcatcctattcagccaatccagatgcctgcattcacaaccgttcaacgcaaatag

SEQ ID NO: 26189 - DNA, 1899 bp, synthetic construct
  source 1..1899: mol_type = other DNA; note = Synthetic coding sequence
atggacaccatgatgctgaacgtgcggaacctgttcgagcagctggtcagaagggtagaaattttgagtgagggcaacgaggtccagtttatacagctagcaaaggacttcgaagactttagaaaaaaatggcagcgtacagatcacgaactcggcaagtataaggaccttctaatgaaagccgagacagagcgctccgccctagacgtgaaactgaaacacgcaagaaaccaggtcgacgtggaaattaagagacgccagcgggctgaggctgattgcgagaagttggagcggcagatccagctgatccgcgaaatgctcatgtgcgacacaagcggctccatccagctgtcagaagagcaaaagtccgctttagcattccttaatagggggcagccatccagcagtaacgccgggaacaagaggctgtcaacaatagatgaatcaggctcgattctcagtgacatctctttcgataaaacagatgagtcccttgactgggatagcagtctggttaagaccttcaagctgaaaaagcgggagaagcgacgctccacatctcggcagttcgtggatggcccacctggtcctgtcaagaaaacaaggtctatcggctctgccgtggatcagggtaacgaatctatcgttgccaagaccacggttactgtgccaaatgacggaggccccatagaggccgtttctacaatagagactgttccctattggacccggtcccgtcgcaaaacggggaccctgcaaccttggaactctgacagcaccttgaactcacgacaattggagcctcgaaccgaaacagattctgtgggtacaccccaatctaacggcggcatgcgcctccacgacttcgtatccaagactgttataaagccagagagctgtgtgccttgtgggaagagaatcaagttcggcaagctgtcactgaagtgtcgtgactgccgcgtagtgtctcaccctgaatgcagagataggtgccccctaccatgcattccgacacttatcggcacccccgtgaaaatcggcgaaggaatgctggcggacttcgtcagccaaacctcccctatgataccgtctatagtggtgcactgtgtgaatgagattgagcaaagaggactgacagagaccggactgtaccgaatctcaggttgcgacagaactgtcaaagagctcaaagagaagtttctgagagttaagacagtacccttgctgtccaaggtggacgacattcacgccatctgttcacttctgaaagatttcctgaggaatttgaaagagccactactaacattcagattgaatcgcgcgttcatggaagctgcagagataacagatgaagacaactcaattgccgctatgtaccaggcagttggtgagctcccacaggctaatagggatacccttgcttttcttatgattcacttgcagagggttgcccagagtcctcataccaaaatggacgtagccaacctggctaaggtgttcggccccacgatcgtggcacacgccgtgcctaaccccgacccagtgactatgctgcaggacattaaacgacagcctaaggttgtagaaagactgctaagcctgcctctggaatattggtctcagtttatgatggtggaacaagagaatatcgatcctctgcatgtaatagaaaattccaacgcattctctacaccccagacccctgacatcaaggtgagcctgctcggccccgttactacccccgaacaccagctcctgaagactccgtccagctcatcactgagccagagggtgcgctcgacgctgactaagaacaccccaagattcggttctaagagcaaatctgcaaccaatctcggacgccagggtaacttcttcgcaagtccgatgctgaaatag

SEQ ID NO: 26190 - DNA, 585 bp, synthetic construct
  source 1..585: mol_type = other DNA; note = Synthetic coding sequence
atggaggacctgttcgagaccttccaggacgagatgggcttcagcaacatggaggacgacggccctgaagaggaagagagggtggcggaaccccaggccaattttaatacaccccaagccctgagatttgaagaattactggcaaatctgctcaacgaacagcaccagatcgctaaagaactgtttgaacaactgaaaatgaagaagccaagtgcgaagcaacaaaaggaggtggagaaggtaaaacctcaatgtaaagaagtgcaccagacactcatcctggatcctgcccaacgcaaacgcctccagcaacagatgcaacaacatgtccagttactgacacagatccatttgcttgccacatgtaatcccaatctcaaccctgaagcctccagcacccgaatctgcttaaaagagcttggtactttcgcccagtcctccatagcgctgcaccatcagtacaatcctaaattccagacactgtttcagccctgcaatctcatgggggcgatgcagctaatcgaagacttctcaacgcacgtgtctattgattgttcaccccataagactgtaaaaaagacctag

SEQ ID NO: 26191 - DNA, 1803 bp, synthetic construct
  source 1..1803: mol_type = other DNA; note = Synthetic coding sequence
atggtgctgatcctgggccggcggctgaaccgggaggacctgggcgtgcgggattcgccagccacaaagaggaaggtgttcgagatggaccccaaaagccttactgggcatgaattctttgacttttcctctgggagcagccacgcggagaatatcttgcagatcttcaatgaatttagagattcccggctatttacagacgtcataatatgtgttgagggaaaagagttcccctgtcaccgcgccgtgctcagcgcttgctcctcttacttccgcgcgatgttttgcaacgatcatcgcgagagccgggagatgctggttgagataaatggcatcctcgcggaggccatggagtgctttctgcagtacgtgtacacaggcaaggtgaagatcacgacagagaatgtccagtatctctttgagacctcaagcctgtttcagatttcagtgctgcgggacgcttgtgcaaaattcctggaggaacagcttgacccctgtaattgtctgggcatccagagattcgccgatactcatagcctcaaaacattgtttaccaaatgcaagaactttgccctgcagacgtttgaggacgtgagccagcacgaggaattcctcgagctggataaggacgaactgattgactacatctgcagcgatgagctggtcattggaaaggaggaaatggtattcgaagccgtaatgcgctgggtgtatagagcagtcgacctccggaggcccctcctgcacgaactgctgacgcacgttcggctgcccctcttacatcctaattattttgttcaaactgttgaagtggatcagctcattcagaattcccccgagtgctaccagctgttacacgaagctcgcagataccacattcttggaaacgagatgatgtcaccaaggactcggccccgcaggagcacgggctattctgaagtcattgtggtcgtaggtggttgtgagcgcgtaggggggttcaatctaccttacaccgagtgctacgaccccgtgacaggtgagtggaaaagtttggccaagctgcctgaattcaccaaaagtgagtatgctgtgtgcgcactcagaaatgatattttagtgtctggcggaaggataaattctagagatgtgtggatctataatagccagctgaacatctggataagagtcgcttctttgaataagggtagatggcggcacaagatggccgtcttgcttggaaaggtttatgtggtgggcggctatgacggccaaaatagactctcatcagttgagtgctacgactctttcagcaacagatggacagaggtcgcacctctgaaagaggccgttagctcaccggcagtgaccagctgcgtggggaaattattcgtaatcggaggtgggccagacgacaatacctgctcagacaaggtgcagtcctacgatccagagacgaattcttggctcctgagagccgcgatacctatcgcaaagcgatgcatcacagcagtatcattaaacaacctcatctatgtggccggggggctgacgaaagcgatatattgttacgatccggtcgaagattattggatgcacgtccagaacacttttagtcgtcaggagaactgtggtatgagcgtatgcaatggtaaaatttacatcctagggggccgtcgcgaaaacggtgaggcaaccgataccattctctgctacgaccccgctacaagcatcataacaggtgtcgcagccatgcctcgaccagtgagctatcacggttgcgtcaccatccatcgttataatgagaagtgtttcaagctctag

SEQ ID NO: 26192 - DNA, 1620 bp, synthetic construct
  source 1..1620: mol_type = other DNA; note = Synthetic coding sequence
atggccaccagcgcccccctgcggagcctggaggaggaggtgacctgtagtatctgcctggactatttgagggaccctgttacaatcgattgcgggcatgtgttctgtcgtagttgcacaacagacgtacgccctatttctgggagcaggccggtgtgccccctgtgcaagaagccctttaagaaggaaaatatccgtccggtgtggcaacttgcctccctggtggagaatattgagagactgaaggtggacaaaggtcggcagccgggcgaggtaacacgcgagcagcaagacgcaaagctttgtgagagacaccgagagaaattacactattactgcgaggatgacgggaagctgctatgtgtgatgtgccgggaatcccgggaacacagaccacatactgctgtcctgatggaaaaggctgcacaaccccatcgcgagaagattctgaatcatttgagtaccctccggcgtgatcgggataaaattcaaggcttccaggcaaaaggcgaggccgacatcctggcggcactgaaaaagttacaggatcagaggcaatatattgttgcagaattcgaacaaggacaccaattcctgagagagcgcgaagagcacctcctcgagcaacttgctaaattggaacaagaactgaccgaggggcgtgaaaagtttaagtcacggggagtgggggaattggcccgattggcactggtgatctccgaactggaggggaaagcccagcagccggccgcagagctgatgcaagacactagagacttcctgaatcgctatccgaggaagaaattctgggttggaaagcctatagctcgggtcgtgaagaagaaaacgggagagtttagcgacaaacttcttagtctccagcgcggcctcagagagtttcagggtaaactgctccgggacttagaatataagaccgttagcgttacacttgatccacaaagtgcctctggatatctgcaactgtctgaggattggaagtgcgtgacctatacctccctatacaagtccgcctacttgcatccacagcagttcgactgcgaaccaggggtgctggggtcaaaaggattcacctggggaaaggtgtattgggaagtggaggttgagcgggagggctggagcgaggatgaggaagaaggggacgaagaagaggagggcgaggaggaagaggaagaggaggaagcagggtacggggatggatatgatgactgggagactgacgaggatgaggaaagcctgggagacgaggaagaggaggaggaggaagaagaagaagaggtgttggagagctgcatggttggagtggcacgcgattctgttaaaagaaaaggagatctgtccctcaggcctgaagatggcgtatgggcccttaggctgagttcctccggcatttgggccaacacaagccccgaggctgagctcttccccgctctaaggcctagacgagtgggcatcgccctagattacgaagggggtacagtgacgttcacgaatgccgagtcccaggaattaatttacacctttacagccacctttaccagaaggctggttcccttcctgtggctgaagtggcccggaactagactgctgctgagaccttag

SEQ ID NO: 26193 - DNA, 567 bp, synthetic construct
  source 1..567: mol_type = other DNA; note = Synthetic coding sequence
tgatacgtgaacgccgtggacagccggtggagcagctacggcaacgaggccacaagctctgctcactacgtggagagggatagattcattgtgacagacttgtccggccaccggaagcacagcagtactggagatctgctatctctggaactgcagcaggcaaagagcaattcattgctcctccaacgcgaggcaaacgctctggctatgcagcagaaatggaattccctcgacgagggacgtcatctgaccttgaacctgctgtctaaggagatagagcttagaaacggcgagcttcagtctgattacacagaggatgcaactgacaccaaacccgaccgggacatcgaacttgaactcagcgccttagacactgacgaacctgacggacagtccgagcctatcgaggaaatcttagatatacagttgggaatttctagccagaatgaccaactcctgaacgggatggccgttgagaacggccatcccgtccagcaacatcagaaggaaccccccaagcaaaagaagcagtcactggggcgatctaagaaacaattttgtcgctag

SEQ ID NO: 26194 - DNA, 1806 bp, synthetic construct
  source 1..1806: mol_type = other DNA; note = Synthetic coding sequence
atggaggagaccatgaagctggccaccatggaggacaccgtggagtactgcctgtttttgattcccgacgaaagccgggatagcgataagcacaaagagatcctgcagaagtatattgaaaggatcattacccggttcgcccccatgctggtaccttacatatggcagaatcagccatttaacctcaaatataaaccaggcaaaggcggggtgccagcccacatgttcggagtgacaaagtttggcgataacatcgaagatgagtggtttatcgtatatgttattaagcaaatcacaaaggaatttcccgagctggttgcaagaatcgaagacaacgatggggaatttctgctcatcgaggctgcagatttcttacccaagtggctggacccagagaatagtacgaaccgggtgtttttttgtcatggggagctgtgcataattcccgcgccgagaaagagtggggccgaatcttggcttcccactacacctcctaccattccccaagccctgaacatcataactgctcattccgaaaagatccttgcaagtgagagcatcagggcagccgtaaatagaaggatcagggggtatccggagaaaatccaggctagcctccaccgcgcacactgtttcttgccggcaggcattgttgctgtgttgaagcagcggcccagactggtggccgctgcagtacaggcgttttacctgcgggacccaatcgatctacgagcatgccgcgtgttcaaaaccttcctcccagaaacgaggattatgacaagcgcacacggattcgaaattctttgctccaagtgctctccccacttttctgactgtaagaagtccctcgtgactgcgagtcccttatgggcttctttcctggagtccttgaagaaaaacgattactttaaaggtctgatcgagggatccgcacagtaccgagagaggttggaaatggccgagaattattttcagcttagtgttgattggccggagtcttcattggctatgagtccgggagaagagatcctaactctgctgcagactatccctttcgatatcgaggacctgaaaaaggaagccgcaaatctgccaccggaggacgatgatcaatggttggacctatcccccgatcagttagaccagctcctgcaggaagcagttggtaaaaaagagtcagaatcggtgagcaaggaagagaaggagcaaaactatgacctgacagaagtgagtgaaagcatgaaagcattcatttccaaagtgtccacacacaagggtgctgagttgcctcgagagccatccgaggctccaataaccttcgacgctgattcctttcttaactacttcgacaagatactcgggccacgccccaacgagtccgattccgatgatcttgatgatgaggactttgaatgcctggattctgatgatgaccttgatttcgaaacccacgagcccggagaggaagcatctcttaagggcaccttggataacctgaagtcctatatggctcagatggaccaggagctagcccacacgtgtatttctaaatcatttaccactagaaatcaagtggagccggtgtcccagactacagataataactcagacgaagaagattctgggactggtgagtccgtgatggcacccgttgacgtggaccttaacctcgtatcgaatattctcgagagctacagttctcaagccggccttgcgggacccgcaagcaatctgctgcagtccatgggcgtgcagctgccggacaataccgatcatcggcccactagcaagccaaccaaaaactag

SEQ ID NO: 26195 - DNA, 405 bp, synthetic construct
  source 1..405: mol_type = other DNA; note = Synthetic coding sequence
atgaagaagaagcacgacggcatcgtgtacgagaccaaggaggtgttgaacccctctcccaaggtgacgcactgctgcaagtccctgtggttaaaatattccttccagaaagcgtacatgactcaattggtcagtagccagcctgtgcccgctatgtctcggaatcctgatcataacctgttgagccagccgaaggaacatagcattgttcaaaaacatcaccaggaagagatcatccacaaattagctatgcagctgagacatataggcgacaatatcgatcaccgcatggtgcgggaagatctacagcaggacggcagggatgcactggaccattttgttttctttttcttcagacgtgtccaggtgttactgcacttcttttggaacaaccacttgctgtag

SEQ ID NO: 26196 - DNA, 1791 bp, synthetic construct
  source 1..1791: mol_type = other DNA; note = Synthetic coding sequence
atggaggacgccccccagcggctgcggtggcaggcccacctggagttcacccacaaccatgatgtgggcgatctcacatgggacaagattgcagtgagtctgccacggtcggagaaacttagaagcctcgtcctggccggaattccacatggtatgcggccccaactctggatgcgccttagtggcgcattacagaagaagagaaattcagaactctcctaccgcgagatagtaaagaactcgtctaacgacgaaacaattgctgccaagcagatagaaaaggacctccttcggactatgccttccaacgcctgcttcgcatcgatgggttcaattggagtgccacgacttaggcgggttttgagagctttggcctggctgtaccctgagatagggtactgtcagggaaccggcatggttgcggcctgtctactactcttcttggaggaggaagacgccttctggatgatgtccgccatcattgaggatttactgcccgcgtcatacttcagtaccacacttctcggggtgcaaaccgatcagagagtcctgagacacctgattgtccagtaccttcccaggttagataaactgctgcaggagcatgatatcgaactcagtttgataacactgcactggtttctgactgctttcgcctctgtggttgacatcaaattactgctgcgaatctgggacctgttcttttacgagggctcaagagtactgtttcagctcacgctggggatgttacatcttaaagaggaggaactcattcagtccgaaaacagtgcgtctatattcaacactctgtctgatattccttcccaaatggaggacgccgagctgttactcggggtggccatgcgtctcgccgggagcctgacggacgtggctgtggagacccaacgccgtaagcatctcgcctacctaatagcagatcaaggccagctgctgggcgccggaaccctgaccaacctgtcccaggtggtccgacggaggacccagcggcgaaagtcaactataactgctttgcttttcggcgaggatgacctcgaagccctaaaggctaaaaatattaaacaaacagagctggtcgcagacctccgggaagccatcctccgtgtggcgcgacatttccagtgtacagatcctaagaactgctccgtggagctgaccccggactactcaatggagagtcaccagcgggatcacgagaattacgtggcatgttctcgcagtcatcgacgccgagccaaagccctcctggactttgagcgccatgacgacgatgagctcggcttcagaaagaacgacattattactatcgtgtcacagaaggatgaacattgttgggtgggggagctgaatggccttagaggctggttccctgcaaagtttgtggaggttcttgacgagcggagcaaagaatactctatagccggcgacgacagcgtgacggagggggtgaccgaccttgtgagaggaactctgtgtccagctctcaaagccttgtttgagcatgggcttaagaaacctagccttctgggtggagcttgccacccgtggttgtttattgaggaggcagcgggccgagaagtagaaagagacttcgcctctgtatactcccgcctggtcctgtgcaaaaccttccggctcgacgaggacgggaaggtgctcacgcccgaggagcttctctaccgtgctgtgcagtcagttaatgtgacacacgatgcagttcacgctcagatggacgtaaaactgaggtctctgatctgcgtgggccttaaatag

SEQ ID NO: 26197 - DNA, 399 bp, synthetic construct
  source 1..399: mol_type = other DNA; note = Synthetic coding sequence
atggagagccgggtggccgacgccggcaccggcgagaccgcccgggctgccggtggaagccctgccgtcggatgtaccacccggggaccggtagtgtctgctcccttaggggccgctaggtggaagctcctgagacaggtgttaaagcagaaacacctagatgattgcttgcgacacgtgagtgtccgtagatttgagtcattcaatctattttcagtaaccgagggaaaagagagagaaaccgaagaggaagtcggggcctgggtgcagtacacctctattttttgtccggagtattcgatttccttgcgccataactcaggctccctcaacgtcgaggacgtgctcacctcattcgataataccggtaatgtttggtctttctctcgggggaagtag

SEQ ID NO: 26198 - DNA, 1620 bp, synthetic construct
  source 1..1620: mol_type = other DNA; note = Synthetic coding sequence
atggccaccagcgcccccctgcggagcctggaggaggaggtgacctgctcaatttgtctggactatctgagggacccggtgacgatcgactgcggccatgtcttctgcaggtcatgtactaccgacgtgcgcccaatctctggctcaaggcccgtgtgccctctttgtaaaaagcctttcaagaaggaaaacatccgacccgtctggcagctggcatccctcgtagagaacatcgaacgtctgaaggtcgataaagggaggcaacccggagaggtcacgcgggaacagcaagacgccaaactgtgcgaaagacatcgcgagaaattgcactactattgtgaagacgacgggaagctgctttgtgtaatgtgccgagagagtagagagcacagaccgcataccgccgttctcatggagaaggcggctcaacctcatcgcgagaagatactgaaccatctcagtacactgaggcgggaccgagacaagattcagggcttccaggccaagggtgaagccgatattctcgcagctttgaaaaaactgcaagatcagagacagtacatagttgccgaatttgaacaaggccatcagttcctgcgtgagcgggaggagcacctgcttgaacagttagccaaattggagcaagaactgaccgagggcagggaaaagtttaagagccgcggggtgggggagctcgccagactggccctggtcatctccgagcttgagggcaaggctcagcagcccgcagccgaactgatgcaagacacacgggactttctgaaccgatatccgcggaaaaaattctgggtgggaaagcctatcgcgcgggtggtcaagaagaagactggcgaattctccgataagttgctctccctgcagcgaggactgcgcgagttccaggggaagctgctgagggatctagagtataagacagtttctgtgaccttggaccctcagtcagcctctggttacctgcagttgagcgaggattggaagtgcgtgacctatacctctctctacaagtccgcgtatctgcacccgcagcagttcgattgtgaacccggcgtattagggagcaaggggttcacatggggtaaggtctactgggaagtcgaggtggagagagaggggtggtctgaagatgaagaggagggcgacgaggaggaagagggagaagaagaggaagaagaggaagaggctgggtatggggacggctatgatgattgggaaactgatgaggatgaagaatcactgggtgacgaagaggaggaagaagaagaagaagaggaagaggtgcttgaatcatgtatggtcggcgtcgcaagggacagcgtaaagagaaaaggcgatctgagcctccggcctgaagacggtgtctgggcacttcgcttgtcctcctccggaatctgggcaaacacaagtccagaagctgagcttttcccagcgcttcggcccagaagagtgggcatagcattggattacgaaggagggacagtcacctttacaaatgcagagtcacaggagttaatatacacctttaccgcaacatttacccgtcgactcgttccttttctgtggctcaaatggcccggaacacgcttactgttgcgcccttag

SEQ ID NO: 26199 - DNA, 2193 bp, synthetic construct
  source 1..2193: mol_type = other DNA; note = Synthetic coding sequence
atgaacaacagcagcagcgagacccggggccacccccacagcgcctcaagccctagcgagcgagtatttccaatgcctttgcccaggaaggctccccttaatattcctggtacccctgtcttggaggatttcccccagaacgatgacgagaaagaaagattgcagagaagaagatcccgcgtcttcgatctccagttttcaacggattcaccccggctgttggcctctccctcaagtcgcagcatagacatcagtgccacaattcccaaattcactaacacccagatcacggaacattattctacgtgtattaaactcagtacggaaaacaaaattaccaccaaaaacgcttttggcctgcacctaatcgattttatgtccgaaatcctgaaacagaaagacaccgagccgaccaacttcaaggtggctgcagggacgcttgatgcctcaaccaaaatttatgctgtacgggtggatgcggtgcatgccgatgtgtatcgtgtcctgggtgggttggggaaggacgctccatcattagaagaagtggagggacacgttgccgatggtagcgccacagagatgggcaccaccaagaaagctgtgaagccaaagaaaaaacatctccaccggaccattgagcagaatatcaataatctcaacgtcagcgaagctgataggaagtgcgagatcgatccaatgtttcagaagaccgccgccagttttgatgagtgtagtacagctggggtcttccttagcacactgcattgccaggactatagatcggagttgctgtttccaagtgacgtgcaaacactgagcaccggagagcctctggaacttcctgagttggggtgcgtggagatgacggatctgaaagcccctttgcagcagtgtgcagaagataggcaaatctgcccctctctggcggggtttcagtttacccagtgggattctgaaacacataatgagagtgtcagcgccctggtcgataaattcaagaaaaacgaccaggtctttgatattaatgcggaagtcgacgagagcgattgtggggattttccggacggatctctcggcgatgatttcgatgccaatgatgagcccgatcatactgccgtcggggatcatgaggagttcagaagttggaaggagccttgtcaggtacagagttgtcaggaggaaatgatctccctcggggacggagatattaggaccatgtgcccattgcttagcatgaagcctggggagtattcctacttctctccccgaaccatgtcaatgtgggctggccccgatcactggcgctttaggcccaggagaaagcaggatgccccctcccaatctgaaaataagaagaagagcacgaaaaaggatttcgagattgatttcgaggacgatattgattttgacgtgtattttcggaagacaaaggccgccacaatcctcactaagtctaccctcgagaaccaaaactggagggccactacgcttccaaccgactttaactataacgtagatactttggtgcagttgcaccttaagccaggaactagactcctgaagatggcccaaggccaccgtgtcgaaactgaacattacgaggaaatcgaggattacgactacaacaatccaaacgacacgtccaatttttgccccggccttcaggcagctgattcagacgacgaggacctggacgacctgttcgtggggccggtgggcaactccgatctgagcccgtacccttgtcatcccccgaagacagcacagcagaacggcgatacacccgaggcgcagggactggacattacaacatacggtgagagtaacctggttgctgagcctcagaaggttaacaaaattgagatacactatgccaagaccgcaaagaagatggacatgaagaagctgaagcagagtatgtggagtttgttaactgctctgtccggcaaggaggctgatgctgaggccaatcaccgcgaagccggaaaagaggccgccctagcggaggtagcagatgagaagatgctctctggacttaccaaagatttacaacggtctctgccaccagtgatggcccaaaacttgtccatccccctggcattcgcatgccttctgcaccttgccaacgaaaagaatctgaagcttgaggggaccgaagacctaagtgatgtcctcgttcgtcagggtgactag

SEQ ID NO: 26200 - DNA, 900 bp, synthetic construct
  source 1..900: mol_type = other DNA; note = Synthetic coding sequence
atggagacccagttccccgtgagcgagggcaaggtggacccctaccgatcttgtggattcagctacgagcaggacccgaccttgcgcgatcctgaggccgtggccagacgctggccttggatggtgtcagtaagagcaaacgggacccatatttgtgccggcaccattatcgcttcacagtgggtgctcaccgtagcgcactgcttgatttggcgcgatgtgatctatagtgtcagagtgggctccccatggatcgaccagatgacgcaaaccgcatccgacgtacccgtcctgcaagtgattatgcactcacgctatagagcccagcggttctggtcttgggtaggacaggccaatgacatcggtctattgaaactcaagcaggaacttaagtattccaactacgtgaggccaatctgcctgccaggcactgattatgtgctgaaggaccacagcagatgcacagttactggatggggactgagcaaggctgacggtatgtggccccagttcagaacaatccaagagaaagaggttatcattctgaataataaagaatgtgataacttttaccataactttacaaaaattcccaccttagttcagataataaaaagccagatgatgtgtgctgaagacactcatcgagagaaattttgctacgagctgacgggggaacctttagtttgttccatggagggcacttggtacctcgttggactggtgtcgtggggtgctgggtgccagaagtctgaggcgcctcctatttacctacaagtgtcatcttaccagcattggatttgggattgcctgaatggccaggcactcgcccttcccgccccctccagaaccctgctccttgcgctacccttacccttatctctgctggccgccctttag

SEQ ID NO: 26201 - DNA, 1089 bp, synthetic construct
  source 1..1089: mol_type = other DNA; note = Synthetic coding sequence
atgctggtgcccggcagcacccggccctacagcaagaagcggcagaactcaaaatccgcccagggtctagctggactccgtaatttgggaaatacatgtttcatgaactccatactgcaatgcttgtctaacacacgcgagctgagagactactgccttcagcgattgtatatgagggacctccaccacgggtcgaatgcgcatacagcattagttgaagagtttgcaaaacttatccagactatctggacaagctctcccaacgatgttgtgtctccaagcgaattcaagacccagatccaaaggtacgcaccacggttcgtgggttataatcaacaagacgcgcaggaattcctccgtttccttttggatgggctccacaacgaagtgaatcgagtgactctgcggcccaaatccaacccagagaacctcgatcacttacctgatgatgagaagggccggcagatgtggcgcaaatacctggagagagaggattcccgcattggggatctattcgtggggcagttgaaaagctcgttgacttgcaccgattgtggatattgctccacagtatttgacccattctgggatctgtccctgcccatcgcaaagaggggctaccccgaggtgacgctgatggattgcatgcgcctgtttaccaaagaagacgtgctggacggagacgaaaagccaacttgttgtcgatgtcggggccgtaagcgctgtatcaagaaattttccatacaacgcttcccaaagattctcgtgctgcacctgaagagattcagcgagagccgtatccgtacaagcaagttaacaaccttcgtcaacttcccgctccgagacttagacttgagagagttcgcctcagaaaatactaaccatgctgtctacaacctctacgctgtctcaaaccactccggaaccaccatgggaggtcattataccgcctactgcaggtcccccggtaccggagaatggcacacgtttaacgacagcagcgtgactcctatgagtagtagccaggtccgcacctcagatgcataccttttgttttacgaactggcttccccaccttctaggatgtag

SEQ ID NO: 26202 - DNA, 1800 bp, synthetic construct
  source 1..1800: mol_type = other DNA; note = Synthetic coding sequence
atggaccccggcgacgccgccatcctggagagcagcctgcggatcctctacaggctctttgaaagtgtgctgccccctttgcccgcagcactgcaatctagaatgaacgttatcgaccatgtgcgtgatatggcggctgctggcttgcattcaaacgtgaggctgctgagctctctgctgcttactatgtccaacaacaaccccgaactgttctcacccccacagaagtatcaactcctcgtgtaccatgctgacagccttttccatgataaggagtaccgaaacgccgtgtccaagtatactatggcacttcaacagaaaaaagccctgtcaaagacaagcaaggtgcgcccctccactggtaactccgcctccactccacaatctcagtgcttgccaagtgaaattgaagtcaagtataagatggccgaatgttatacgatgctgaaacaggacaaggatgcaatagctatattggatgggatccccagcagacaaagaacccccaagattaacatgatgctggcaaacctatacaaaaaggccgggcaagaaagaccgtccgtgacatcatataaggaggtccttcgtcaatgcccactcgccctggacgctatcctgggactgttgtctctaagtgtaaagggagcggaggtggcttccatgaccatgaacgtgatccagactgtccctaacctagattggttatcagtgtggattaaagcctatgcctttgtacacactggcgataattcaagagccattagcaccatatgtagccttgagaagaaatcgttgctcagagacaatgttgacctgctcggctccctggccgatctgtactttcgagctggggataacaagaatagcgtccttaaattcgaacaggcacagatgcttgatccatatttgatcaaaggtatggatgtttatggctacttgctggcccgagagggccgtcttgaggatgtcgagaacctcggctgtagactgttcaacatttccgatcagcacgccgagccttgggtggtatctgggtgtcattcattctactccaaaagatatagcagagcgctgtacctgggagccaaagccatccagctgaacagtaattcagtgcaagcactgctgctgaagggagctgccctgaggaacatgggacgggtgcaagaagctattatccacttccgggaggcaattcgccttgctccatgcagactggactgctacgagggcctgatcgaatgctacttggcttctaattccatccgggaggccatggtaatggccaataatgtctacaagaccctgggtgcaaacgcccagacactgaccttgctggctactgtctgtttggaagaccccgttacccaggagaaggcgaaaacattactcgacaaggcccttacacagcgtccagattatatcaaagcagtcgtcaagaaggcagaactgctctcccgggagcagaaatacgaggatggtatcgctctgcttagaaatgcattagccaaccaatctgactgtgtcttacacagaatccttggagacttcctggtagccgtgaatgagtaccaggaggccatggatcaatatagcatcgctctgagtctggaccccaatgatcagaagtccctagaggggatgcagaagatggagaaagaggagtcccctacagatgctacccaggaagaggacgtggacgacatggaagggagtggagaggagggcgatctggaagggagcgatagtgaggcagcccagtgggccgaccaggagcagtggttcggtatgcagtag

SEQ ID NO: 26203 - DNA, 507 bp, synthetic construct
  source 1..507: mol_type = other DNA; note = Synthetic coding sequence
atgcccgccacccggaagcccatgcggtacggccacaccgagggccacaccgaggtgtgcttcgacgacagcggctcattcatcgtgacatgcggctccgacggtgatgtgcggatctgggaagaccttgatgatgacgaccccaaatttattaacgtgggggaaaaagcgtattcttgtgctcttaagtccgggaagctagtgaccgcagtgtccaacaacacgatccaagtccacacctttccggaaggcgtgccagacgggattttgacgcgctttacaactaatgctaatcatgtggtgtttaacggagacggaactaagatcgcagctggctcctctgactttctggtcaaaattgtggacgtgatggactcctctcagcagaaaacgtttcgcggccacgacgcaccagtactttctcttagctttgacccgaaagacatttttcttgcctccgcttcatgcgatgggagtgtgagagtgtggcagataagcgatcagtag

SEQ ID NO: 26204 - DNA, 141 bp, synthetic construct
  source 1..141: mol_type = other DNA; note = Synthetic coding sequence
atggtgaacagctgctgcggcagcgtgtgcagcgaccagggctgcgggctggaaaactgctgtcgaccctcctgttgccaaaccacatgctgccgaaccacctgttgtcgcccattatgttgcgcctcctcttgttgctag

SEQ ID NO: 26205 - DNA, 669 bp, synthetic construct
  source 1..669: mol_type = other DNA; note = Synthetic coding sequence
atggccagcgtggtggagtacaagggcctgcgggccggctaccactgcggatactgcgattccaaggaaggaaaggcctcatgcggtatgtgggctcactcaatgacagttcaggactatcaagatctaattgatagaggctggagaaggtccgggaagtatgtgtacaaaccggttatgaatcagacttgttgcccacaatacaccatccggtgccgacctttacagtttcagccctccaagtcacacaagaaagtcctgaaaaagatgctgaagtttttggcaaagggtgaggtgcctaaaggcagctgtgaagacgagcccatggatagtaccatggatgacgctgtggcaggagactttgccctcatcaataaactggacattcaatgcgaccttaagactctctcagacgatatcaaagagtcactcgagagcgaaggtaagaactctaaaaaagaagagccccaagaactgctccagtctcaagattttgttggcgaaaagctggggagtggagagcctagccacagcgtgaaggtacacactgtccccaaacccgggaagggggctgacctttcaaaacctccctgccgcaaagcgaaggagatcaggaaggagaggaagcggctcaagcttatgcagcaaaaccctgccggcgagctgtag

SEQ ID NO: 26206 - DNA, 495 bp, synthetic construct
  source 1..495: mol_type = other DNA; note = Synthetic coding sequence
atgctgaaggccgtgatcctgatcggcggcccccagaagggcacccgatttaggccgctgtcttttgaggttccaaaaccactgttcccagtagctggagtgcctatgatacaacatcatatcgaggcatgcgcgcaggtgccgggcatgcaggaaattctcttaatcggattctaccagccagacgagcccctgacacagttcttggaagcggcccagcaagagttcaacctaccggtaagatacctgcaggagtttgcacccctaggcacaggtgggggcctgtatcactttcgagaccagatcttggccggttcgccagaggcgttttttgtgcttaacgcagacgtgtgtagcgatttccccctgtccgccatgctggaagcacatcggaggcagcgtcatccattcttgctcctgggaacgaccgctaaccgaacacagtcactaaactacggatgtattgttgaaaatccccaaacacacgaagtatag

SEQ ID NO: 26207 - DNA, 339 bp, synthetic construct
  source 1..339: mol_type = other DNA; note = Synthetic coding sequence
atgttcgtgagcgacttccggaaggagttctacgaggtggtgcagagtcaacgcgtgctgctctttgttgctagcgatgtggatgcactctgcgcatgcaaaatcctgcaggctttgttccagtgtgaccacgttcagtacactctagtgcctgtgagcggttggcaggagctcgaaaccgctttcctggagcacaaagagcagttccattacttcatcctcatcaactgtggcgccaacgttgacctgctggatatcttacagccagacgaagacacaattttctttgtatgcgacactcacagacccgtaaatgtggtaaatgtttacaacgattag

SEQ ID NO: 26208 - DNA, 942 bp, synthetic construct
  source 1..942: mol_type = other DNA; note = Synthetic coding sequence
accctggtggtgagcggccgggacgacccccccacccacagccagcccgactcagatgatgaagctgaagagatacagtggtccgacgatgagaacacagcaacactcaccgctccagaatttcccgagttcgcgaccaaagtgcaggaggcgatcaattccctgggcggctctgtctttccaaagctgaattggtccgccccacgcgatgcttactggatcgccatgaactcctcgctcaagtgcaagacactgagtgatatttttttgctttttaagtcttcagatttcatcacacgcgacttcactcagccatttattcattgtaccgacgactctcctgatccctgtatcgagtatgagctggtcctgaggaaatggtgcgaactgatacccggggccgagtttcgctgctttgtgaaggagaataagctgattggaattagccagcgcgattatacacagtactatgaccatatatccaaacagaaggaggagatacggaggtgcatacaggacttctttaagaagcacatacagtataagtttttggatgaagattttgtgtttgatatctatagagacagtagagattcaccagcttttagatgtactaactcagaggtaaccgttcaaccctccccgtacctctcctacagacttcctaaagattttgtcgacctgagcacaggagaagacgcacacaaactaatcgataaaagcgcaggtggacggcttatgtcagtcctggaactcgaaaaacgcagacctcggccaacagccccgggagccgctcaccagcctcaactacctgcagacccagacgccggaggaccatcttctgtagacatttcgcactttctgtacagttgcacctttacctggggcaagaagcggagggacttcgctacatgcaagaataacattatcaatcggagttag

SEQ ID NO: 26209 - DNA, 1017 bp, synthetic construct
  source 1..1017: mol_type = other DNA; note = Synthetic coding sequence
atggagctgtggggccggatgctgtgggccctgctgagcggccccggaaggagaggatctaccagggggtgggccttctcgagctggcaaccgcagcccccacttgctggcttaagcagcgctattgaactggtcagtcattggacgggtgtatttgaaaaacgcggaatacccgaggctcgagagtcctctgagtacattgtagctcacgtcttaggtgcaaaaacattccagtctctcagaccagctctttggactcagccactgactagtcagcagctgcaatgcattagagaactgtcgagtaggcgtctccagagaatgcctgtacagtacatactgggtgaatgggatttccagggcctgagcttacggatggtgccccccgtctttatccctaggcccgagacggaggagctggtcgaatgggtcctggaagaggtggcacagcggtcccacgcagtggggtcccctggtagtccactcatcctggaagtcggatgcggctcaggcgccatcagtctgagtctcctgagtcaactgccccagtctcgagtgattgctgtggacaaacgggaggcagctatttcgcttacgcacgaaaatgcacaaagacttaggctgcaggaccgaatctggatcatccacctcgacatgacgtctgagagatcctggacccacttgccctgggggcctatggaccttatagtctctaatccaccttatgtgtttcaccaggacatggagcagctggctccagagatccggtcttatgaggatccagccgcgcttgatggaggcgaggagggaatggacatcatcacacatattttggccttagccccccgcctgctgaaagatagcgggtccatttttctggaggtcgatccaagacatcccgaactggtctcaagctggctgcagagccggccagatctgtatctgaatctcgtggctgtccggagggatttctgcgggcgccccagattccttcacatccgccgctccggcccttag

SEQ ID NO: 26210 - DNA, 1119 bp, synthetic construct
  source 1..1119: mol_type = other DNA; note = Synthetic coding sequence
atgaagcggcggaccgaccccgagtgcaccgcccccatcaagaagcaaaagaaacgtgtggccgagctcgctttgagcctgtcatccacctccgacgatgaacccccaagctcagtgtcacatggtgctaaggctagcaccacttccctgagcggctctgattctgaaacagagggcaaacagcattcgtcggactcatttgacgacgccttcaaagccgactcgcttgttgagggcacaagcagcaggtactcgatgtacaacagtgtttcacagaagctgatggccaagatgggatttcgggaaggcgagggcctagggaaatacagccagggacgtaaagacatcgtggaggcctcatcccagaaaggtcggcgcggactgggcttgaccctgcgaggtttcgaccaggaactaaacgtggattggagggatgagccagaaccaagtgcttgcgagcaggtatcatggtttccggaatgtacaacagaaattcctgacactcaagaaatgagcgactggatggtggtcggaaagagaaaaatgattatcgaagacgaaacagagttctgtggagaggagctgctacacagtgtactgcaatgcaagaagcctttggtgaaggatcgagaggcggaactgctttacttcgccgatgtttgcgccggcccaggtgggttttctgagtacgtgctctggcgcaagaaatggcatgctaagggctttgggatgactctcaagggacctaacgatttcaaactggaggacttctacagcgctagcagcgaactgttcgagccatactacggcgagggggggatagacggagatggcgatatcaccagacctgaaaacatctcggctttccgaaactttgtcctggataacacggaccgaaaaggagtgcatttcctgatggccgacggggggttttccgtggaaggccaggagaatctccaggagatcctctctaaacagcttcttttgtgtcagttcctgatggccctctcaatcgtgagaactggtggccactttatctgcaagacattcgacctatttaccccattctcagtgggtctcgtgtacctcttgtattgttgctttgaacgggtctgctag

SEQ ID NO: 26211 - DNA, 408 bp, synthetic construct
  source 1..408: mol_type = other DNA; note = Synthetic coding sequence
tgacagctggccagcatggtgtggaacaaccccagccagcagcagttcatgcagttcggcggaagcagcggatctcaactcccacagatacagacagacgttgtcctcccgtcttgcaagaaaaaggccccggcagagacaccggtgaaagaacgtctgtttattgtcttcaaccctcatcctctgccgctggatgtgctggaggatatcttttgtaggttcggtaaccttattgaggtgtatttggtttcgggcaaaaacgtaggttacgccaagtatgccgatcgcataagcgccaacgacgctatagctacactgcacgggaagatcctgaacggagtacggctgaaggtgatgctggctgacagcccccgggaagaatccaacaaaagacagcgcacatattag

SEQ ID NO: 26212 - DNA, 1764 bp, synthetic construct
  source 1..1764: mol_type = other DNA; note = Synthetic coding sequence
atggccagcgaggacatcgccaagctggccgagaccctggccaagacacaggtcgccggcggccagctctcctttaaaggaaagagcctaaagttgaacacagcagaggatgccaaggacgtcatcaaggagatcgaggacttcgacagccttgaggctttacggcttgagggaaacacagtgggagtcgaagccgcccgggtcattgctaaggcccttgagaaaaagtctgagctcaagaggtgtcactggtcagacatgtttacaggtaggctccgcaccgagattccacccgcgttgatcagtttgggagaaggtttgatcacagctggagctcagcttgtggagcttgacctgtcagacaacgcgtttggcccagatggcgtgcaggggtttgaggctttacttaaatcatcagcgtgcttcacactacaggagctgaagctgaataattgcggcatgggaatcggcgggggcaaaatcttggcagcagcactaacggagtgccataggaaatctagtgctcaaggcaagccactcgctctgaaagtgtttgtggcagggagaaatagacttgagaacgatggtgctaccgcactcgccgaagctttcagagtaatcggtacactcgaagaagtgcatatgcctcagaacgggataaaccacccagggatcacagccctggcccaggcattcgcagtgaaccccctactaagagttatcaacctgaacgacaacacatttaccgagaagggggccgtggcaatggcagaaaccttaaaaacattgaggcaggtggaagtgatcaattttggggactgtctggtgaggtccaaaggggccgtcgccatcgcagacgcaattagaggaggccttcccaagctcaaagagttgaacttgtctttttgtgagataaagcgagatgccgccctggctgtggccgaagctatggcagataaagccgaattagagaaattggaccttaacggcaataccctgggcgaggagggatgcgagcagctgcaagaggtgctcgagggcttcaacatggccaaggtgctggcctccctgtctgacgatgaggatgaggaagaggaggaagaaggcgaggaggaagaagaagaagccgaagaggaggaagaggaggacgaggaggaagaagaggaagaagaagaagaagaggaggaagagcctcaacagcgcggacagggggaaaagtctgcaactccttccagaaagattttagacccaaataccggcgagccagcgccagtgctgagctcaccacctccagccgatgtgtcaacttttctggcttttccttcacccgaaaaactgctacgacttggacctaaatcttccgtactcattgcacagcagacagatactagcgatccggagaaggtggtttccgcctttctcaaggtgagctccgtattcaaggacgaagcaacggtccgcatggcggttcaggatgctgtagatgccctgatgcaaaaggcttttaatagcagcagtttcaattcgaatacctttttaacgcgtctgctcgtgcatatgggactcctcaaatcagaggacaaagtgaaggctattgccaacctctatggacccctgatggcgctgaatcacatggtgcaacaggactatttcccaaaagccctcgctcccttgctactagccttcgtgactaagccaaactcagcactcgagtcctgttcattcgctaggcactcactgctccaaacactctataaggtgtag

SEQ ID NO: 26213 - DNA, 1842 bp, synthetic construct
  source 1..1842: mol_type = other DNA; note = Synthetic coding sequence
atggccaccatccccgactggaagctgcagctgctggcccggcggaggcaggaggaagcatccgtgcgtggaagggagaaggccgagcgcgagcggctgagccagatgcccgcctggaagcgggggctccttgagcggcgacgggccaagctggggctgtctccaggagagcccagtccggtcctcggcaccgttgaggccgggcctccagatccagatgaatctgccgtactgctggaagcaatcgggcccgtccatcagaatagattcattaggcaggagaggcagcagcaacagcagcaacagcagcgatcggaggagctcctggctgagcggaagccgggcccgctggaggccagggagcgcaggccctctcctggggaaatgcgggaccagtcccctaaagggagggagtccagggaggagagactgtcacctcgggagaccagggagcgcagattaggcatcggaggcgcccaagaactgtccctccgaccattggaggcccgagactggaggcagtccccaggagaggtgggggaccggagctcccggcttagcgaggcttggaaatggagactgtctcccggagagacacccgagcgctctcttcgactggctgaatcccgcgagcaatctccacgaagaaaggaggtcgagagccggctatcccccggagagtccgcctaccagaagctggggctgaccgaagcccataagtggcgccccgatagccgtgaatcccaggagcagtctctggtgcaattagaagcaaccgagtggcgcctcaggtctggcgaagagagacaggactacagcgaagagtgtggacgcaaagaggaatggcccgttcccggggtcgctcccaaggaaacagctgaattgagcgaaacattaacccgcgaggctcaggggaatagtagcgctggagtcgaagccgcagaacagcgcccagtggaggatggagagaggggaatgaaacccacagagggatggaagtggaccctcaattctggtaaagctcgcgagtggacgcctagagacatcgaagcccagacccagaagccagagcctccagagtcagcagagaagctcttagaaagcccaggtgtggaggcaggagaaggggaggccgagaaagaggaggctggggcgcagggaagacctcttagggcgctgcaaaattgctgctctgtgccaagcccgctgccacccgaggacgcgggaaccggcggcttacgtcaacaggaggaggaggccgttgaactccaaccccccccaccagctccactaagtcccccaccgcctgcaccaaccgcgccccagcctccaggcgaccctctgatgtccagactgttttacggtgtaaaagcaggacctggcgtcggagctcccaggcggtccggacacaccttcacagttaaccctcgccggtcggtgcctccggctacgccagcaacgcctacctctccagcgactgtagacgcagctgtgccaggagctggcaagaagcgataccccacagccgaggagatactggtcttaggtggctacttgcgcctctcacggtcatgcttggctaagggcagtcctgaacggcaccacaagcaattgaagattagcttctctgaaaccgccctggagactacgtaccaatacccgagcgaatcaagtgttttggaggaacttggtcctgaacctgaagtgcccagcgccccaaacccccccgcggcacaaccagacgacgaggaggatgaagaggaactcctgttgcttcagcccgaacttcagggaggcctgcggaccaaggccttaattgttgatgaatcctgccgccgatag

SEQ ID NO: 26214 - DNA, 477 bp, synthetic construct
  source 1..477: mol_type = other DNA; note = Synthetic coding sequence
atgacccactgctgcagcccctgctgccagcccacctgctgccggaccacatgctgccgcaccacctgctggaagccgaccactgtgacaacctgtagtagcactccatgttgccagccggcctgttgtgtctcgagttgttgccaaccttgttgcaggcctacttgttgtcagaatacatgctgtaggacgacgtgctgtcaaccaacttgccctacatgctgtggaagcagttgttgcggccagacgtcttgtggcagttcctgcggccagtcgagctcctgcgcgcctgtgtactgtaggcggacgtgttactatcctaccaccgtctgtctccctgggtgcctcaaccagagttgcgggtctaactgctgccagccttgctgtcgccctgcctgctgcgaaaccacctgttgtaggacaacatgctttcagccaacttgcgtgagcagctgctgtcagcccagctgctgctag

SEQ ID NO: 26215 - DNA, 1620 bp, synthetic construct
  source 1..1620: mol_type = other DNA; note = Synthetic coding sequence
atggccaccagcgcccccctgcggagcctggaggaggaggtgacctgtagcatttgcttggactaccttcgggatccagtcaccatcgactgtggacatgtcttctgtaggagctgcacgacagatgtgcggcctatatccggctccaggcctgtctgcccgttgtgtaaaaaaccctttaagaaggagaatattcgaccggtatggcaattggcctccctcgtggagaacatcgaacggctgaaggtagacaagggccgccagccaggagaagtcactcgcgaacaacaagacgccaagctgtgtgagcgccatcgggaaaaactccactactactgcgaggacgacgggaagcttctctgcgtaatgtgccgggagtccagagaacatcggccccataccgctgtgttgatggagaaggctgctcagcctcacagagaaaagattctgaaccacctgagcactcttcgaagagatcgcgacaagattcaagggttccaggccaagggggaggccgatatcctggccgcattgaagaagcttcaggatcagcgtcagtatatcgtcgccgagttcgaacagggccatcagtttctgagagaacgagaagagcatcttcttgagcagctcgcaaagctcgagcaggaattaactgagggccgggaaaagttcaaatcccgcggagtgggggagcttgcacgattggctctggtgatttccgagcttgagggcaaagcgcagcagcccgccgctgagctaatgcaggacactcgcgatttccttaatagataccctaggaagaagttctgggtaggtaaaccgatagcgagggtcgttaagaaaaaaaccggggaattcagtgataaactcctgtccttgcaaagaggattgcgcgagttccagggtaaactgctgcgggacctggagtacaagaccgttagcgttaccctcgacccacagtcggcttccgggtacctgcaactgagcgaggactggaaatgtgttacctatacaagcctttacaagtccgcatacttgcaccctcagcaattcgattgcgagcccggagtgcttggatctaagggattcacatggggcaaagtctactgggaagttgaagttgaaagagagggatggtccgaagacgaagaggagggcgatgaagaggaggagggagaggaggaggaggaggaagaggaggccggatacggtgatggatacgatgactgggaaactgatgaagatgaagagtccctgggtgacgaggaagaggaagaggaggaggaggaggaagaagtgctcgagagctgcatggtaggggtggcacgtgactcagttaaacggaagggggacctgtctctgcggcccgaggacggagtgtgggctttaaggctaagctcctccggtatctgggccaatacgtcacctgaggcagaacttttccccgctctgcgaccccggagggtcggaattgctctcgactacgaggggggcaccgtgaccttcacgaacgccgagtcacaggagctgatatatacattcaccgccacttttacacgtcggttggttccctttctatggcttaagtggcccggaactcgcctgctattaagaccctag

SEQ ID NO: 26216 - DNA, 2511 bp, synthetic construct
  source 1..2511: mol_type = other DNA; note = Synthetic coding sequence
atggccgccgccctgggcccccccgaggtgatcgcccagctggagaacgccgcaaaagttctgatgcaaacccttgcttgttctattctgacggcactcctgtcagagttcagctcttctagtaagaccagtaacatcggtctgtctatggaatttcacggtaattgcaaaagggtgttccaagaagaggatctccgccagatttttatgcttacggttgaggtcctccaggaattttcgcggagggagaatctcaacgcgcagatgtcctccgtctttcagagatatcttgccttggccaatcaggtcttgtcctggaattttctgcccccgaagcttggacgtcactatatcgctatgttcgagagcagccagaatgtactgttgaaacccacggaaagctggcgtgaaactcttctggattcacgagtgatggaattgttttttacggtgcatcggaagattcgagaagattccgatatggcgcaggacagtttgcagtgcctggcacagctagctagcctccacggtccaatcttccccgacgaagggagccaagtcgactatctggcacattttatagaggggttgttgaacaccattaacgggatcgaaatagaagactccgaagccgtcggcatctcatctattatcagcaatctgataacagtgtttccccgcaatgtgctcactgccattccttccgagctcttctcatcgtttgtgaactgtctcacacacctgacctgtagctttggccgcagcgcggccctggaagaagtgctagacaaagatgacatggtgtacatggaagcctacgataagctgctggagagctggctgactctggttcaggacgataaacatttccataagggcttcttcactcagcacgctgtgcaggtgttcaattcttacatacagtgccacttggctgcacccgacggaaccagaaaccttaccgcgaacggggtggcttctagagaggaggaagaaatttcagaactacaggaagacgacagggatcagtttagcgatcagcttgccagcgtcggtatgctcggtcggatcgccgctgaacattgtatccctctgttgacctctttgctcgaggaacgggtgacaagactgcacggccagctacagcggcaccagcagcagttgctggcaagccccggctcatcaaccgttgacaacaagatgctagatgacctttatgaggatatccattggctgattctcgtgaccgggtatcttctcgccgacgatactcagggtgagactcctcttattccacccgaaatcatggaatactccatcaaacattccagcgaggtcgatatcaacactactctgcagatactggggagtccgggagaaaaggcctcaagtatccctggctacaataggacagactcagtcatccgcctattatcagccatattaagggtctctgaagtggagtctcgcgccatcagggccgatttaacacaccttctctcaccccagatgggtaaggatatcgtgtggtttcttaaaagatgggcaaagacttatcttctggtagacgagaagctgtacgatcagatctccctgccattttctactgctttcggcgccgatacggagggcagtcagtggattatcggttacctgctgcagaaagttatcagtaacttgtcagtgtggagttctgagcaagacttggccaacgataccgtgcagttgctcgtgacactggtcgaacgcagggagcgagccaatttagtgatccagtgtgaaaactggtggaacctggctaaacagtttgcctcccgaagccctcccctcaacttcttaagcagtcctgtgcagaggacactgatgaaggcactggtgcttggtggatttgcacacatggacacagagacaaagcagcagtactggaccgaggttctacaacccctgcagcaaagatttcttagagtcattaatcaggagaactttcaacagatgtgccagcaggaagaagtaaaacaggaaataactgcaacactggaggctttgtgtgggatagcggaagctacacagattgataatgtcgctatcctttttaatttcttaatggactttctgaccaattgtattggacttatggaggtttataagaataccccggagactgtgaacctgataatcgaggtgttcgtggaagtagcccacaaacagatatgctatcttggggagtctaaggctatgaatctttacgaagcttgtctgactctcctacaggtctacagcaaaaacaacctcggtcgccagagaatagacgtgactgctgaagaggaacagtaccaggatctgttgctcatcatggaactccttaccaatctcctcagtaaggagttcatcgactttagcgatacagacgaagtctttagagggcacgaacccggccaagccgccaataggtcagtgtctgccgcagatgtggtgctgtatggggtgaacctgattctgcctctgatgtag

SEQ ID NO: 26217 - DNA, 1008 bp, synthetic construct
  source 1..1008: mol_type = other DNA; note = Synthetic coding sequence
atggacttcctgctgggcaaccccttcagcagccccgtgggccagcgaatcgaaaaagccactgatggctctctgcagtcagaggactgggccctgaatatggagatctgcgacattattaacgagacagaagagggaccgaaggatgcgcttcgagcagtgaaaaaaagaatcgtgggaaacaaaaatttccatgaagtactggaaacctgcgttaagaattgcggtcataggttccacgtactggtggcttcgcaagactttgtagaaagcgtgttggtaaggaccatcttgcccaagaataatcctcctactattgtacatgacaaggtgctaaacctgatccagtcttgggccgatgcattccggtcttccccagacctcactggtgtggtgaccatatatgaggatctgcgcaggaagggattggaattcccgatgaccgacctggatatgctgagccccatccacactccccagaggaccgtcttcaactctgagactcagtctggacaagattctgtggggacggattctagccagcaggaggactcgggccagcatgcagctcccctgccagcaccgccgattttatcaggagatacacccatcgcccccacccccgaacaaatcggcaaactgcgcagtgagttggagatggtgagtggaaacgtgagggttatgtctgaaatgctaactgaactagttcctacccaggctgagcctgcggacctggaacttcttcaggagctgaaccggacctgcagggccatgcagcagcgggtgctcgagcttatcccccaaattgctaacgagcaactcacagaggaactgctgattgttaatgacaacctaaacaacgtgtttctgagacatgagcggttcgaaaggttccggacaggtcagaccacaaaagcacctagcgaggcagagcccgctgcagatctgattgacatgggccctgatcctgcagcaacgggcaatctcagctcccaactggctgggtag

SEQ ID NO: 26218 - DNA, 5193 bp, synthetic construct
  source 1..5193: mol_type = other DNA; note = Synthetic coding sequence
atgggcaacagcgacagccagtacaccctgcagggcagcaagaaccactcaaacacaataaccggggcgaagcagattccctgcagtctgaagatcaggggcattcatgcaaaagaggagaagtcactgcacggctgggggcatggcagcaacggcgcaggatataaatcgagatccctggcacgcagctgcctcagccatttcaaaagtaaccagccctacgcctcccggctggggggaccaacatgcaaggtttcacggggcgtggcctactctacacataggactaacgccccgggcaaggacttccagggcatctccgctgccttttcaacggagaacggcttccactctgtcggacacgaactggcggataaccatatcacgtcccgggactgcaatggccacctcctgaattgctacggtcgcaacgagagcatagccagcacgccccctggcgaggaccgaaagtctccacgcgtcctgataaaaaccctcggcaagctggacggttgcctaagagtggaatttcataacgggggcaatccatccaaagtgccagcagaggattgcagcgagcctgtacagctgttgcgatacagccccacactggcctccgagacctctcccgtgcccgaggcaaggagggggtccagcgccgactctttgcccagccaccgcccctcacctacggactcgcgactgcggagctccaagggatcttcgctgagctcagaatcaagttggtacgactccccttggggcaacgccggggaattaagcgaggctgagggatcattcctggctcccggtatgcccgaccccagtctgcacgcatccttccctccaggtgatgcaaaaaagcctttcaaccagtcatccagtctgagtagcctcagagagctctataaggatgctaaccttggcagccttagtccctcaggcatccggctaagcgacgaatacatgggaacccacgcttctcttagcaaccgagtcagcttcgcttccgacattgatgtgccttcccgtgtcgcccacggggaccccattcagtactcctcttttaccctgccctgccgcaagccaaaagcctttgtggaagatacagccaagaaggacagtctcaaggcacgcatgagacggatatccgactggaccggtagcctgtctcggaagaaacgcaaactacaggaacccagaagtaaggagggaagcgactactttgactcccggtctgatggcctgaatactgacgtccaggggtcatctcaggccagtgccttcctctggtccggagggtcaactcagattctctcccagcggtctgagtccacacatgcaatcggcagtgatcccctgcggcaaaatatttatgagaattttatgcgggaactcgagatgagccgcacaaatactgaaaatatcgaaacctcgactgagacagcggaatcttcaagtgaatccctgtcgtctctggaacaacttgacctactgttcgagaaagagcagggtgtggtgaggaaggctggttggctttttttcaagcctttggtcacagtgcagaaggaaagaaaactcgagctggttgcccggcgaaagtggaagcagtattgggtgactctgaagggctgtacactgctcttctacgaaacctatgggaagaatagcatggatcagagttctgcacctcgctgtgcactgtttgctgaagatagcatcgtgcagtctgtgcccgagcatcctaagaaggagaacgtcttctgtttaagcaattccttcggcgacgtgtatctctttcaggctaccagccaaaccgacctggagaattgggtcactgcagtgcactccgcatgtgctagccttttcgcaaagaaacatggcaaggaagacaccctccgccttctgaagaatcagactaagaatctcctgcagaagatagacatggactccaaaatgaaaaagatggcagagctacaactaagcgtggtctctgacccaaaaaatagaaaagctatcgagaatcaaattcagcagtgggagcaaaacctggagaaattccacatggacctgtttcgcatgcgatgttatttggccagcctccagggcggcgagctacccaatcctaaatccctgctggccgcagccagcaggccaagtaagttagcactcgggagactgggcatcctgagcgtgtcctcattccacgccctggtgtgctccagggacgactcagcgctcagaaagagaaccttgagcttaacccagaggggccggaataagaaaggcattttcagctccttaaaaggtcttgacacgcttgcgcggaaggggaaagagaagcgccccagtatcactcaggtcgatgagctgcttcacatctatggatccacggtggatggtgtcccaagagacaacgcctgggaaattcaaacatatgtgcattttcaagataatcatggggtcactgttgggattaaaccagaacacagagttgaggacatccttacgctcgcttgtaaaatgcggcagctagagccgtcccactacgggctgcagcttcgaaagctcgtggacgacaacgtcgaatattgcattccagctccatatgaatacatgcagcagcaggtgtacgatgagatcgaagtttttcccctgaatgtatacgacgtccagttgaccaagaccggttcagtgtgcgactttggtttcgccgtgactgcgcaggtggatgagcggcaacatttatctaggatattcatcagcgacgtgcttccagacggtcttgcttatggagaaggactcagaaagggaaatgagattatgaccttgaacggggaggccgtgtctgatttagacctgaaacagatggaggccctcttctccgagaagtctgttggtctcactctgatcgcccgacctcctgatactaaagccacattgtgtacttcatggtccgactccgatttgttttcaagagatcaaaagtccctcctcccaccccccaaccaatctcagcttctggaggaattcctggataattttaaaaaaaatacagctaatgacttcagtaacgtcccagacatcactaccggccttaagcgaagccagaccgatggcaccctggaccaggtctcgcaccgcgagaaaatggagcaaacatttcgaagcgccgagcaaatcaccgccctatgtcgcagctttaacgattcacaggcgaacgggatggaaggccctcgcgaaaaccaggatccgcctcctcgtagtctcgccagacacctttcagatgccgacaggctccgcaaagtgatccaggagctggttgataccgaaaaatcctacgtcaaggatctgtcatgcctctttgagctgtacttagagcctctgcagaacgagacctttctgacgcaagacgagatggagtccttgttcgggtcattgcccgagatgttagagttccagaaggttttcctcgagaccctggaagatggaatctctgcctcgagcgatttcaatacccttgagaccccttcacagttccgaaagcttctattttctctggggggtagctttctgtactacgccgatcattttaagctgtattccgggttctgcgcaaatcacattaaagttcagaaggttctcgaacgcgccaagacggataaggcatttaaggcctttctcgatgctcggaatcccactaaacagcatagtagcaccctcgagtcttaccttattaagcctgtccagagggtacttaagtatcccctgctgctcaaggagctggtttcactcactgaccaggagagcgaagagcactaccacttgacagaagcccttaaggccatggagaaggtggcttcccacatcaatgaaatgcagaaaatttatgaagactatggtacggtctttgatcagctagtggccgagcagtcaggtaccgaaaaggaacagcccgagtggtcaagcgaggtaatggatgtgctggatcctagggggaagttgaccaaagggactcttgaggaaccccgaaccctggtgacagagctgtctatgggggaactgctgatgcattccacagtgtcatggttgaatccctttctgagtttaggcaaggcgcggaaggacctggaactaacagtgtttgttttcaagcgggccgtgatcctagtgtataaagagaactgcaaactcaaaaaaaaactaccgtctaactcccggcccgcccacaattccaccgatttggacccatttaagtttagatggctgatccctatctccgctctgcaagtcagactgggcaacccagccggcactgaaaataactcaatttgggagctgatccacacaaagtctgagatcgagggacgccccgagacaatttttcagctttgctgctctgactcagagagcaagaccaacattgttaaagtgatccggtccatcctccgcgaaaattttcgccggcacatcaaatgtgaactgcctctggagaaaacctgcaaagaccgcctggtgcctttaaaaaaccgagtgcccgtgagcgccaagctggccagttctagaagcctgaaggtacttaagaatagcagtagcaacgagtggaccggagaaaccggtaagggtacactcctcgattcagatgagggatccctgtcttccgggactcagagtagtggctgtcccaccgctgagggaagacaggattccaaatcgaccagtcctggcaaatatccccaccccgggctggccgatttcgctgacaatttgatcaaagaatccgacattctgtcagacgaggatgatgatcacagacagacggttaaacaggggagcccaaccaaggatatcgagattcagttccagcggttaagaatatcagaagacccagacgtccatccagaagcagaacagcaacctggcccggaatctggggagggtcagaagggtggggagcagcctaagctggttcggggccacttttgtcccattaaaagaaaggccaactccacaaaaagggaccggggtacactcctcaaggcccagattcgccatcagtccctggattctcagtccgaaaatgccacgattgatttaaacagtgtgctagaaagggagttctccgtacagtcattgacctcagtggtgagtgaagagtgcttctatgagaccgaaagccacggcaaaagttag

SEQ ID NO: 26219 - DNA, 348 bp, synthetic construct
  source 1..348: mol_type = other DNA; note = Synthetic coding sequence
atggcccccgccaagaagggcggcgagaagaagaagggccggagcgcaattaacgaagttgtaaccagagagtatactattaacatccataagagaattcacggggtgggctttaagaaacgtgctcccagagccttaaaggagatccggaagtttgccatgaaggagatgggcacccctgatgtgcgcattgacaccagactgaacaaggctgtgtgggccaaaggaattcgaaatgttccatacaggatccgtgtgcgcctgtctagaaagcgcaacgaggatgaggatagccccaataaactctacaccctggtgacttacgtacctgttaccacgttcaagtag

SEQ ID NO: 26220 - DNA, 747 bp, synthetic construct
  source 1..747: mol_type = other DNA; note = Synthetic coding sequence
atggccctggaggtgggcgacatggaggacggccagctgagcgactctgacagcgatatgaccgtggcaccttccgatcggcctcttcagctgccaaaagtactgggcggagactctgccatgagggcgttccaaaatacagcaactgcatgtgccccagtgtcccattaccgggccgtggagtcagtggattcatcagaggaatctttcagtgactcagatgatgattcatgcctctggaaacgcaaacgccagaagtgttttaacccaccgcctaagccagagccattccagttcggtcagagttcccagaagcccccagtcgccggaggcaaaaagatcaacaacatttggggcgccgtgctgcagaagttacgaaaggagagtcaggagcataccaaagacctggataaggagctggatgaatacatgcacggtgggaagaagatgggatctaaagaagaagagaacggccagggtcacctcaagcgtaaaaggcccgtgaaggacagactcgggaacagacccgagatgaattacaagggccgttatgagatcaccgccgaggattctcaagaaaaagttgccgatgagatatcctttaggctccaggaacctaagaaagacctcattgcgcgggtcgtccggaacaaactgcgtaccttctctactttaaaaacaaagcggaatatgaagatcaagaaactgctcggtcgtggcgagcataagtgctggggtaaacgctag

SEQ ID NO: 26221 - DNA, 78 bp, synthetic construct
  source 1..78: mol_type = other DNA; note = Synthetic coding sequence
atggccatggcccccagccccagcctggtgcaggtgtacaccagcccagcggccgtggcagtgtgggaatggcagtag

SEQ ID NO: 26222 - DNA, 171 bp, synthetic construct
  source 1..171: mol_type = other DNA; note = Synthetic coding sequence
atgagctactaccagcggcccttcagccccagcgcctacagcctgcccgcttccctaaattccagtattgtcatgcagcatgggactagcctggacagcacagacacctatccacagcacgctcagagcctggatgggaccacatcctcttcaatccctctgtaccggtag

SEQ ID NO: 26223 - DNA, 450 bp, synthetic construct
  source 1..450: mol_type = other DNA; note = Synthetic coding sequence
gtgcgggagctggaggccgagctggacgccgagcagaagaagcacgccgaggctctgaaaggcgtaagaaagcacgagcgcagagtgaaggagttggcttaccaggctgaggaggatagaaaaaacctcgcgcgaatgcaggacctcgtggacaaacttcagagcaaagtgaagagctacaagcggcagttcgaggaagccgaacagcaggccaataccaacctggctaagtatagaaaggcccagcacgagcttgacgacgcagaggaacgcgcggatatggcagagacccaggccaacaaactcagggcccgcacgcgcgatgcgctgggacccaaggtcagatccggaagagggattgcgttgtgtgccggaggcctctggggcctcactgggagcacagcccacagcgcaatcccattctcctcggcccaaggcgtgaccgcttag

SEQ ID NO: 26224 - DNA, 468 bp, synthetic construct
  source 1..468: mol_type = other DNA; note = Synthetic coding sequence
agcaacgtgatggaggccaacgccgcccggcaggccacccccgccgagtggtcccaggatgattcgaatgatatgtgggaggatcaagaggaggaagaggaggaggaagaggacgggcttgccggacagctcctctccgacatcctggccacctccaagtacgaagaagactattatgaggatgacgaggaggacgatcctgatgcacttaaagacccgctgtaccagatcgatctgcaggcaaccctaatgacaatgcggggagaattttacaggccaagtgctagtaaaaagggttccttatccacattcgccccctcaggcccggcggccaaccacttcgctgccctcacagggttagaaatgcactttctgttgaacctcaagtggcacttggacccgtggccgttggcctccgcagtcaccttgatgaccatacagactagactgaccggagccgtgacctag

SEQ ID NO: 26225 - DNA, 1620 bp, synthetic construct
  source 1..1620: mol_type = other DNA; note = Synthetic coding sequence
atggccaccagcgcccccctgcggagcctggaggaggaggtgacctgctccatatgtctcgattacctgagagatccggtgacaatcgattgcggccatgtattttgtagaagctgcaccactgatgtgcgccctatttctggcagtcgaccggtgtgccccctgtgcaaaaagccgttcaaaaaggaaaacatcaggcctgtatggcagctggctagtctggtggagaatattgaaaggctcaaagtagacaagggcaggcagcccggagaagttacccgagagcagcaggacgctaaattgtgtgaacgccatagggaaaaactccactactactgtgaggatgacggaaaactactctgcgtcatgtgtcgcgaatcccgggagcaccggccgcatacagccgtcctgatggagaaggctgcacagcctcaccgcgaaaaaattctgaaccacttaagcacactgcgcagggatagagataagattcaggggttccaggcaaagggcgaggccgacatcttagccgccttaaaaaagctgcaggatcaacgccagtacattgttgctgagtttgagcagggacaccagtttctcagagagagagaggaacatcttcttgagcaactagccaaactggagcaggagttgaccgaaggcagggagaaattcaagtctcggggggtaggggaactggcccgcctggctttggttatctctgagctagaagggaaggctcagcagcccgccgccgaattaatgcaagatactcgtgactttctgaatagatacccccggaagaagttctgggtgggtaagcctatcgcccgagtagtgaaaaaaaagactggtgagttctctgataagctgctctccctgcaaagagggttgagagagtttcagggcaagctgcttcgcgacctggagtataagacagtcagtgtcacactggatcctcagagtgcatcaggttatttgcagttgtccgaagattggaaatgcgtcacttataccagcctatacaaaagtgcctacttacacccgcagcagtttgattgtgaaccaggcgtgctgggcagtaaagggtttacatggggcaaagtctactgggaagtggaggtagagcgtgaaggctggtcagaagacgaagaggagggcgacgaggaggaggaaggagaggaagaggaagaagaggaggaggcgggttatggcgatgggtatgacgactgggaaactgacgaggacgaagagtccctcggggatgaagaagaggaagaagaggaggaggaggaggaggtgcttgagtcatgcatggtgggagtggcacgtgactcagtgaagcggaagggcgatctgagccttcgcccggaagacggcgtgtgggcgctcaggctgagctcctcggggatctgggctaatacctcgccagaggctgagttatttccagcgctgcggccaagacgagtgggcatcgccctcgattatgagggggggacagtgacctttacaaatgcagagagccaagagctgatatacaccttcactgccacctttacgcgccgtctggtgccctttctgtggctcaaatggcccggcacccggttgctcctgcggccatag

SEQ ID NO: 26226 - DNA, 645 bp, synthetic construct
  source 1..645: mol_type = other DNA; note = Synthetic coding sequence
atgcccagcccctggggctggttcgccgtgaccgcctgcggcgcccagaggaataatttcgaggagcctgtcgcattacaggagatggatacatccaatggagtcctgttacccttttacgatcctgactcttccatagtgtatctttgtggcaaaggcgactcctcaattcgctacttcgagattaccgacgagcctccttttgtgcattacctgaatacattcagctctaaggagccccagagaggcatgggatttatgcccaaacgtggtctcgacgtgtctaaatgcgagattgcgcgcttttataaactacatgagaggaagtgcgaacccatcattatgacagtccccaggaagtctgacctcttccaggacgccgaaccagtgctcataagcctccgggacgggtacgtgccccccaaacaccgcgagttaagagtcactaagcggaatattttggatgtgaggcctccgtcaggcccacgacgcagccagtccgcttccgatgctcccctgtctcaacacactttggaaactttactggaggagattaaagccctacgggaacgggtgcaggcccaagaacaacgaattaccgctctagagaacatgctttgtgaacttgtggatggcactgattag

SEQ ID NO: 26227 - DNA, 690 bp, synthetic construct
  source 1..690: mol_type = other DNA; note = Synthetic coding sequence
atgctgcagctgcgggacagcgtggacagcgccggcaccagccccaccgctgtgttggctgctggcgaagaacctggctccatagaacaagctgtggaggagataagagtggttgttagaccagtggaagatggagaaatccagggggtgtggctgctgaccgaggtagatcattggaataacgagaaggaacggctggtcctcgttaccgagcaatccctgttgatttgcaagtacgatttcatctctctgcagtgtcagcaagtggtacgaatcgcccttaatgcggttgataccatcagttatggtgagttccagtttcccccaaagtcactgaacaagcgagaagggttcggtatccgaattcaatgggacaagcagtcccgacctagcttcatcaacagatggaacccatggtccaccaacgttccttacgctacctttacggagcacccaatggctggtgctgatgagaagacggcatccctttgccagctcgaatcttttaaggcactgctgattcaagccgtcaagaaagcccagaaggagtcccccctccctggacaggccaacggcgtgctgatacttgaaaggcccctgttgatcgagacctacgtgggattgatgtccttcattaacaatgaggcgaagctcggctacagtatgactagaggcaagataggtttctag

SEQ ID NO: 26228 - DNA, 390 bp, synthetic construct
  source 1..390: mol_type = other DNA; note = Synthetic coding sequence
atgtgcgaggtgagccggggctggaagccctgcaccgagggcatcctcaaggtgagacccactaggaagatcagttatgagggtaatattacccctacagtcgagctgaacgctctgtgcatgaagctcggcaagaagcccatgtacaagccagtagatccttatagtagaatgcagtccacttacaattacaacatgcggggtggtgcatacccacctagatatttctaccccttcccagtgcctcccctcctgtaccaagtggaattatctgttggagggcagcaatttaacgggaaaggaaaaacacgccaagcggcaaaacacgatgccgccgcaaaggcactccggatcctgcagaatgaacctttgcctgagagactagaatag

SEQ ID NO: 26229 - DNA, 3042 bp, synthetic construct
  source 1..3042: mol_type = other DNA; note = Synthetic coding sequence
atggacctgttccggatgcggtgctacctggccagcctgcagggcggagaactccctaaccccaagtccctcctggctgcagccagccggccctccaagctcgcccttggacggctgggaatcctgagcgtatcaagttttcacgcacttgtatgctcgcgagatgattccgccctccgtaaacgcacactgagtctgacccagagaggacgaaacaagaaaggcatattcagctccctgaaaggccttgatacactggcaagaaaggggaaggagaaaaggcctagcataacgcaggttgacgagctgctacatatatatggatcaacggtagatggcgtgccccgagataatgcatgggaaatccagacatacgtgcacttccaagacaaccacggcgtgaccgtaggtataaagcccgaacaccgcgtggaggacatcctgacactggcctgtaagatgagacaattagaaccgtcccattatggactgcagctacgtaagcttgtggatgataatgtagaatattgcataccagctccatacgaatatatgcagcagcaggtttacgacgagattgaagtctttcccctgaacgtatatgacgtgcagctgactaaaaccggaagcgtgtgtgatttcggctttgccgtgactgcacaggtggacgaaaggcagcacctgagcaggatttttatctctgacgtgctacctgatggcctggcctacggtgaaggactgcggaaagggaatgagattatgactttaaatggggaagccgtgtcagatctggacttaaagcagatggaggccctcttctccgaaaaatctgtggggctgactctgatagcgcggccacctgacactaaagccactctctgcacatcatggtctgactctgacctgttcagccgcgaccagaaatctttgctgccacctcctaatcagtcccagcttctagaggaatttctggataacttcaagaagaacactgcgaacgacttcagtaacgtgccagacatcaccactggactgaagaggtcacaaacggatggaaccctagatcaggtttctcaccgtgagaaaatggagcaaacatttcgcagcgcagagcagattactgccctctgccgcagtttcaacgacagccaagcaaacggcatggaaggtccccgggagaaccaagacccaccccccaggtccctcgctcgacacctctctgatgctgacagactgcggaaagtgattcaagagctcgtagataccgaaaaaagctatgttaaggatctctcttgtctcttcgaactctacctggagccccttcagaatgaaacttttctcactcaggatgaaatggaatccctcttcggttctctgccagaaatgctggagttccagaaggtattcctcgagaccctagaggacggcattagtgcatcatccgattttaataccctggaaaccccttctcagtttcggaagctgcttttttccctgggtggctccttcctgtactacgcagaccactttaagctatatagtggcttctgcgccaaccacataaaggtgcagaaggttctggagcgcgccaagaccgataaagcttttaaggcgtttcttgacgcgaggaacccaaccaagcagcatagctcaactctggaaagttacctgatcaaacccgtgcaaagggtgctaaaatatccgctcttgttgaaggagctagtctctctgaccgatcaggagtccgaggagcactaccacctgaccgaggcgctcaaggccatggaaaaggtcgctagtcatataaatgagatgcaaaagatttacgaggactatggtacggtgtttgaccagctcgtggccgaacagtcaggcactgaaaaggaggtaactgagctgtctatgggtgaattgctgatgcattctaccgtgtcttggctgaatccctttctgagtttaggaaaggctcgcaaagacctcgagctgaccgtatttgttttcaagagagcggtgattttggtgtacaaggaaaactgcaagttgaagaaaaagcttccttcaaactcgagaccagcccacaattctaccgacctcgacccattcaaatttcgttggttgatccctattagtgcccttcaggtacggttaggaaacccagccggaaccgagaacaatagcatttgggagctcattcataccaagagcgagatcgaaggccgccctgagacaatctttcaactttgttgcagcgactctgagtcaaaaaccaatattgtgaaggttatacggtccattctgcgcgagaacttcaggcggcatatcaaatgtgagcttcctctagaaaaaacatgtaaggaccggttagtccccctaaaaaacagagttccagtgagtgccaagcttgcgtcaagcagaagcttgaaagttttaaagaatagctcttcgaatgagtggaccggtgaaaccggaaagggcacattgctcgattcagacgaggggtccctatcgtcaggtactcagtcctccggatgtccgactgccgagggtaggcaggactccaaatctacgagcccaggcaaatacccgcatcctggtctcgcggactttgccgataacctgatcaaggagtcagacatactttctgatgaggatgatgaccaccggcagacggtaaagcaaggcagtcccaccaaagacatagagatccagttccagcgcctgaggatttccgaggaccccgatgtgcacccagaggctgaacagcagccaggtcctgagagtggagaaggccagaagggcggggaacagcctaagcttgtgagaggccatttttgtcccatcaagcgcaaggcaaacagcaccaaaagggataggggtacattgctcaaggcacagatccgtcaccagagccttgattcccaaagtgaaaatgcaacaatcgatctaaacagtgttctcgagcgggagttctccgtgcagtcactgacctcagtggttagcgaagagtgtttctatgaaacagagtcacacggaaaatcatag

SEQ ID NO: 26230 - DNA, 1149 bp, synthetic construct
  source 1..1149: mol_type = other DNA; note = Synthetic coding sequence
atggccgccaacctgagccggaacggccccgccctgcaggaggcctatgttcgtgtggttacggaaaagtcacctacagactgggcgctcttcacctatgaggggaactccaacgacatccgcgtcgccggaacaggcgaagggggattggaggagatggtggaggagctgaactctggcaaagtaatgtatgccttctgcagggtgaaggacccgaactcaggcctgccaaagttcgtgttgattaactggaccggtgaaggtgttaacgacgttcggaagggggcctgcgcttctcacgtgagcaccatggcttcctttctgaaaggcagtgtctaccagaaaaccaatgcagtctcagagatcaagagggtaggaaaagactcattttgggccaaggcagagaaagaggaggagaaccggcgcctggaggaaaaacggcgagccgaggaggctcagaggcagctggaacaagagcggcgggaacgtgagctgcgagaagcagctcgacgcgagcagcgttatcaagagcaaggaggcgaggcctccccacagtctagaacctgggagcaacaacaagaggtagtcagtagaaacaggaacgagcaggagtccgccgtgcacccacgggaaatatttaaacagaaagagcgagcaatgtcaaccacctccatctcttctccgcagcccggaaaacttcggtcaccttttctgcagaagcaactgactcagcccgaaactcattttggccgggagcccgccgccgccatttccaggccaagagctgacttgcccgccgaagagcccgccccctccactcccccctgtctcgtgcaagctgaggaggaggccgtctacgaggagccgccagaacaggaaaccttctacgagcaacctccgctggtccagcagcagggagcagggtctgagcacattgatcaccacatccagggccaggggcttagcggccaggggctgtgcgccagggctttgtatgattaccaggcagccgatgatacagagatttctttcgatcccgagaatttaatcaccggaattgaggtaatcgacgaagggtggtggcgaggttacgggccagacggacatttcggaatgttcccagctaattatgtggagctgatcgaatag

SEQ ID NO: 26231 - DNA, 660 bp, synthetic construct
  source 1..660: mol_type = other DNA; note = Synthetic coding sequence
atggtggtgctgagcgtgcccgccgaggtgaccgtgatcctgctggacatcgaggggacaaccacacctatcgcattcgtgaaagacatcctgttcccttacattgaagagaatgtgaaagagtaccttcagactcactgggaagaggaggaatgtcagcaggatgtgtctctcctgcgaaaacaggcggaggaggacgcccacctggacggggctgtcccaattccggcggcaagcggcaatggcgtagatgacctgcagcagatgattcaggcggtggttgacaacgtgtgctggcagatgtcactggatcgcaaaacaacagcactgaagcagctccagggacacatgtggagggccgcattcaccgctggacgtatgaaggctgagtttttcgcagatgtggtacccgccgtcaggaagtggcgggaagctggcatgaaagtgtacatctactcgtccggttcggtggaggctcaaaagctcttgtttggacactctacagagggtgacatcttagagcttgtcgacggacactttgatacaaagataggccacaaagtggagtccgagagctacaaagattgtaggcaacactgggtgctgaaccagcagcatttcgtttcagacagatgttatagtcggggacagtgctgctag

SEQ ID NO: 26232 - DNA, 1446 bp, synthetic construct
  source 1..1446: mol_type = other DNA; note = Synthetic coding sequence
atggccagcgccgccagcgtgaccagcctggccgacgaggtgaactgcccaatctgtcaggggacattaagagagccagtgaccatcgactgcggccacaatttctgtcgtgcatgtctcaccaggtactgtgaaatacctggtccagatcttgaagaaagccccacgtgcccactgtgtaaggaacccttccggcctggctcttttaggccaaattggcagctggcgaatgtggttgaaaatattgagaggcttcagctggtgtccaccctgggcctgggcgaggaggatgtgtgccaggaacacggagagaagatttactttttttgcgaggacgatgagatgcagttgtgcgtcgtgtgcagagaagccggggaacatgccacccataccatgcgctttctcgaggatgccgccgcaccttaccgagagcaaatacacaagtgcctgaaatgcctgaggaaggagcgggaggagatccaggaaatccagagcagggagaacaagcgaatgcaggttctgctcacgcaggtgagtactaagcgccagcaggtcatcagtgaatttgcccatttgcgaaagtttctggaggagcaacagtctattctgctggctcagcttgaaagccaagacggggatatcttgagacagcgtgacgagttcgacctgctggttgccggggagatatgccggttcagtgcgttaatcgaggagcttgaagagaaaaatgaaagacccgctagggagctcctgaccgatattcgctctactctgattcgatgtgaaacccggaagtgtaggaagcccgttgccgtgtctcctgagctcgggcagaggatcagggatttcccacagcaggctctacctttacagagagagatgaagatgttcctggagaagctgtgctttgaattggattatgagcctgctcacatctccctagatccacagacctcacatccaaagctgctcctgagcgaggaccaccagcgcgcccagttctcttacaagtggcaaaatagccctgacaatccacaacggtttgaccgggccacttgtgttctggcccacaccgggatcaccggggggagacatacatgggtagtgtctattgacctggcccatggtggctcttgcaccgttggcgttgtcagtgaggacgtacaaagaaagggagagctccgattgagacccgaggagggcgtttgggccgtccggcttgcctggggctttgtctccgcattagggagtttcccaacgcggttgactcttaaagagcagcctaggcaagtcagggtgtctcttgattacgaggtaggatgggtgacctttacaaacgctgtgacccgtgaacctatatacacattcacagccagctttacaaggaaggtgatcccattcttcgggctgtggggccggggcagctcattctccctgtcctcctag

SEQ ID NO: 26233 - DNA, 1644 bp, synthetic construct
  source 1..1644: mol_type = other DNA; note = Synthetic coding sequence
atggccggcaccaagaacaagacccgggcccaggccaagaccgagaaaaaagccgctatccaggcgaaggctggagcagaacgggaagcaaccggcgtcgttaggcccgtggccaagacaagggcaaaggctaaggccaagacaggatccaagacagatgcagttgcagagatgaaggcagtctccaagaacaaagtagtggccgagacaaaagagggagctttgagcgaaccaaagacgctcggcaaggcaatgggggactttactcctaaagccggcaacgagagcacctcctctacatgtaagaatgaggcgggaactgatgcctggttctgggccggagaagaagcgacaataaactcatggttttggaacggagaagaggccggcaactccttttccactaaaaacgacaaacctgagatcggagctcaggtgtgcgcagaagaactggagccagccgccggcgctgactgtaagcctcgcagcggcgccgaagaggaagaggaagagaatgtgatcggcaattggttttgggagggggatgacactagcttcgaccccaatcctaaacccgtttccaggatcgtgaaaccacagcctgtatatgagatcaacgagaagaatcgacctaaggattggtccgaggttacgatctggcccaatgcccctgcggtgaccccagcagtgctgggatttagatcacaggctccatcagaggcctcaccaccatcgtatattgttctggcctcagccgaagaaaatgcttgttcactacctgtggcaacggcatgtcgaccttcaaggaatactagatcttgctcccaaccaattcctgaatgcagatttgattctgatccctgcattcaaacaatcgacgaaataaggcggcaaattcggatccgagaggtaaacgggattaagcccttcgcttgtccttgcaaaatggaatgttacatggacagtgaagaattcgaaaaactggtgtcactcttgaagtccaccaccgaccctctgatacacaaaatcgcaaggatcgcgatgggcgtgcacaatgtgcatcccttcgcacaggagtttataaatgaagtcggagtggtcactctgatcgagagccttctgtccttcccttctcctgaaatgaggaagaaaaccgttattactctgaatcctcccagtggagacgagcggcaaagaaaaatcgagctgcacgtcaaacacatgtgtaaggaaaccatgtctttccctctaaattctcccggacaacagtctggacttaaaattctcggtcaattgaccacagacttcgtacatcactacatagtggctaactatttctccgagttgttccatcttctttcgagcggcaattgcaagacgcggaatctggttctaaaactgctgcttaatatgtctgaaaaccccacagctgcgcgggatatgattaacatgaaagcgctggctgcgctgaagttgatttttaaccagaaggaggctaaggctaacctagtgagcggagtagcaatattcatcaacataaaagaacatattcggaagggatccatagttgtagttgaccatctgagttacaacactttgatggcaatattccgagaggtaaaagagattatcgagaccatgtag

SEQ ID NO: 26234 - DNA, 1887 bp, synthetic construct
  source 1..1887: mol_type = other DNA; note = Synthetic coding sequence
atgagcgacaagagcgacctgaaggccgagctggagcggaagaagcagcggctcgcacagattcgggaggagaagaagagaaaggaagaagagcgtaaaaaaaaagaagcagatatgcagcaaaagaaggaacctgttcaggacgactccgatttggaccgaaaacgaagggaaaccgaagctctgctgcagagcatcggtattagcccagagccccccctggtgcctaccccaatgtccccctccagcaaaagtgtaagtaccccatctgaagctggctcccaagattccggtgatttgggacctctgacgagaaccctgcagtgggatacagacccttctgttctgcagctgcagtccgactcggaactgggccgacgcttgcataagctcggcgtgagtaaagtcacccaggttgacttcctgccgcgcgaggtagtctcctacagcaaggagacgcagactcctttggcaactcaccagtctgaagaagacgaggaggatgaagaaatggtcgagtcaaaagtcggccaagacagtgagcttgagaaccaggataagaaacaggaagttaaagaagctccaccccgtgagctcacagaagaggaaaaacagcaaatccttcacagcgaggaatttttgatatttttcgataggaccatccgcgtcatagagagagcactggctgaggactccgacatattctttgactactctggcagggaattggaggaaaaggatggcgatgtgcaggcaggcgccaacctgagcttcaaccgacagttttacgatgagcactggagtaagcacagggtcgttacatgtatggactggtctctccagtaccccgaattaatggtggcctcttacaataacaatgaagatgctccccacgaacctgacggagtcgccctcgtatggaatatgaaattcaaaaaaactactcctgagtacgtgtttcattgccagagcagcgtgatgagcgtgtgctttgccagatttcaccctaacctggtcgtggggggtacatactccgggcagatcgtgctttgggataaccgatcccatcggcgtaccccagtacagcgcacccccctatctgccgctgctcatacccaccctgtgtattgcgttaatgttgttggtacccagaatgcacacaatctaattactgtgagcactgacgggaaaatgtgctcctggtctctggacatgttgagcactccgcaggaatccatggagctcgtctacaacaaatccaaaccagttgcagttaccggaatggctttccccacaggagacgtgaacaatttcgtggtaggatccgaggaggggactgtttacaccgcctgccgacatggctccaaagctggcataggcgaggtgtttgaaggccatcaggggccagtcacaggcatcaattgtcacatggccgtgggtcctattgatttttctcatcttttcgtaacatcatcgttcgattggacagtgaaactgtggaccaccaagcacaacaaacctttatactcttttgaagacaacgcagactacgtgtatgatgtgatgtggagccccgtccaccctgctctattcgcttgcgtggacggcatggggaggctggatctgtggaacctgaacaatgacaccgaagtgccaaccgcatcggttgccatcgagggagccagtgcgttaaatcgtgtgaggtgggcacaagccggcaaagaggtggccgtgggcgacagtgaaggcagaatttgggtgtacgatgtcggggagctggccgtgccacacaacgacgagtggaccagattcgcccgcacactggtggagattagggcaaaccgggctgactcagaggaggaagggacagtagagctgtccgcgtag

SEQ ID NO: 26235 - DNA, 474 bp, synthetic construct
  source 1..474: mol_type = other DNA; note = Synthetic coding sequence
atgcggagcggcttccggtgcgacgagcccgccgaggccgtggcccccgagaggcaaacagtgtcgggcgcagtggcactggctagtttcacaagtccgcatacgcatccagttgacgatgggggccgtcactactcttgggggtcacccaagcggatcttgggacttggccccggagacgcagccaaggaggccggcctcgtaaggcccctccaaggacagagcgagaagatcttactgcggactagaaaccgccagcctatggaacccccgatggagccatccggtggcgaacaggagccgggagctgtacgcttccttgatctcccttgggaggatgtcctgctgccacatgtgttaaatcgcgtacccttaagacagctcctaaggctacaacgagtgtcccgggctttccgctcactggtgcagctgcatctggctggcttaagacggttcgatgccgctcaggtgtag

SEQ ID NO: 26236 - DNA, 483 bp, synthetic construct
  source 1..483: mol_type = other DNA; note = Synthetic coding sequence
atggaggccgagcggccccaggaggaggaggacggcgagcagggccccccccaggatgaagagggatggcctccccctaacagcaccacacggccatggaggtccgccccccccagccccccccctcctggaacacggcatactgccctgggccctagatccgcatccctcctatccttgcaaaccgaactgctactcgaccttgtggcagaggctcagtcccgacggctggaggaacaacgcgctacattttacaccccccaaaacccctccagcctggcaccggcaccattgaggccgcttgaggatcgggagcaactgtatagtacgatcctgtcacaccagtgccagagaatggaggctcagcggagcgaaccgcccctgcctcccggtggacaggaactcctggaattactccttagggtgcaggggggcggtcgtatggaagagcagcgatcccggccacccacccatacctgttag

SEQ ID NO: 26237 - DNA, 402 bp, synthetic construct
  source 1..402: mol_type = other DNA; note = Synthetic coding sequence
atggccgccctgcggcccctggtgaagcccaagatcgtgaagaagagaactaagaagttcattagacatcagagcgatcggtatgtaaaaattaaacgcaattggcgaaagcctaggggaattgacaatcgggtgaggcggcgattcaaaggccagatcttgatgccaaacattgggtacggatccaacaagaagactaaacatatgctgccatcaggctttcgaaagttcctggttcataacgtgaaggagctggaggtgctcctgatgtgcaataaatcttactgcgcagagatagcacacaatgtgagctctaagaaccgaaaagccattgttgaaagggctgcacagctcgctattagagtaacaaaccctaatgcccggcttcgctccgaggagtag

SEQ ID NO: 26238 - DNA, 639 bp, synthetic construct
  source 1..639: mol_type = other DNA; note = Synthetic coding sequence
atggacctgttcggcgacctgcccgagcccgagcggagcccccggcctgccgcgggaaaagaggcccagaagggcccactattatttgatgatctccctcccgccagttccaccgatagcgggtccggtggaccgctcttatttgacgatctgccccccgcgagctcgggagactctggctctcttgccacatccatcagtcaaatggtcaaaacggaaggaaaaggcgccaaacgtaagacctcagaagaagagaagaacgggtctgaggagctagtggagaagaaagttagcagcagtgttatctttggacttaagggatacgtcgccgagcggaagggagagcgcgaggaaatgcaggatgcccacgtgatccttaacgacataacagaagagtgccgacctccctctagtctcattacacgtgtgagctattttgccgtgttcgatggccacggtggcatcagagccagcaagtttgccgcccagaacctccaccagaatctgattcgtaagtttcctaaaggggacgttatttccgtggagaagactgtgaagagatgtttgctggataccttcaagcacacggacgaagaatttctgaagcaggcatcatctcagaaacctgcatggaaatag

SEQ ID NO: 26239 - DNA, 1131 bp, synthetic construct
  source 1..1131: mol_type = other DNA; note = Synthetic coding sequence
atgcccctgcaggtgagcgactacagctggcagcagaccaagaccgcagtcttcctgtccttgccgctaaaaggagtgtgtgtgagggacaccgatgtgttttgcacagagaactaccttaaggtcaattttcctcccttcctctttgaagcatttctgtatgccccaattgatgacgagtcaagcaaggcaaagatcgggaatgacaccatcgtgtttaccctttacaagaaggaggctgccatgtgggaaaccttgtctgtcacgggggtggataaggagatgatgcagcggatccgggaaaaaagcatcctgcaggcccaagaacgtgcaaaagaagccactgaggccaaagcagccgcaaagcgcgaagatcagaaatatgccctatcagtgatgatgaagatcgaagaggaggagcgcaaaaagatcgaggatatgaaagagaacgaacgtatcaaggctactaaggctttggaggcgtggaaagagtatcaacggaaagccgaggaacagaagaaaattcagcgcgaggagaaactctgtcagaaggagaagcagatcaaggaggagcgaaaaaagatcaagtacaaatccctgactagaaatctggccagccgcaacctcgcgccaaagggtcggaattctgaaaatatttttacggagaaactgaaggaagactcaattcccgcaccgcgcagcgtgggttctataaagatcaatttcacaccccgtgtgtttcccactgcactgagggaaagccaggtggccgaggaggaggaatggttacataagcaggccgaggctcgccgggctatgaacaccgacatcgccgaactctgcgacctgaaagaagaagagaaaaatcccgaatggctgaaggacaagggaaacaagctttttgcaacagagaactaccttgctgccataaacgcgtacaatctagctattcggctgaacaataaaatgccgcttctttacctgaatcgagccgcatgccacctgaagttaaagaaccttcacaaagcaatcgaggactcttcgaaggcctacagaataatgaaacgacatctccggttgattcacccgaccaagctgtacaagctaatgctgcggcgctttggaatgtag

SEQ ID NO: 26240 - DNA, 1485 bp, synthetic construct
  source 1..1485: mol_type = other DNA; note = Synthetic coding sequence
atggccgccgccgccgagtgcgacgtggtgatggccgccaccgagcctgaattgctggacgaccaggaggcgaagcgcgaggcggagaccttcaaagagcagggaaatgcatactatgccaagaaggattataacgaggcttacaactattacacgaaagcaattgacatgtgtccgaagaatgcgtcttactatgggaatagagcagccacgttaatgatgctcggccggttccgggaggcccttggcgatgcccagcagtccgtccgcctggatgatagctttgtgcgtgggcatctcagagaggggaaatgccacttgtcccttgggaacgcaatggccgcttgtcgatccttccagagagcgctcgaactggaccacaagaacgcccaggctcagcaagagtttaaaaacgccaacgcagtgatggagtatgagaaaatcgccgagaccgacttcgaaaaacgcgacttcagaaaggtggtgttttgtatggacagagcactggagttcgctcccgcctgtcatagattcaagatactcaaagctgaatgtctggcaatgctcggccggtaccctgaggcgcagtccgtggcctccgatatcctcaggatggattcgacaaacgctgatgccttatacgtgagaggcctctgtttatactacgaggactgtatcgaaaaggccgtccagtttttcgttcaggcgttacgcatggctcccgatcacgagaaagcctgtattgcatgccgcaacgccaaggcccttaaggcaaagaaagaggatggtaacaaagcgttcaaagagggtaactacaagctagcctatgagctgtatacagaggctctaggcatcgaccctaataacataaagactaacgccaaactgtattgtaacagggggacggtgaactcaaagcttcggaagttagatgatgctatcgaagattgcactaacgccgttaagctggacgatacctatatcaaggcctacctcagacgcgctcagtgttacatggataccgagcagtacgaggaagcagtccgggattacgagaaggtctatcagaccgagaagaccaaggagcataagcaactgctgaagaatgctcagctggaacttaaaaaaagcaaacgtaaggactactataagattctaggtgtcgataagaatgcctctgaggacgagattaagaaagcctacaggaagagagcgctaatgcaccaccccgacaggcacagcggggcctctgcggaagtgcagaaagaagaagaaaagaaatttaaagaagtcggagaagcatttacgattctgtctgaccctaagaagaaaaccagatatgactccggacaggacctggacgaagagggcatgaatatgggtgattttgaccccaacaacatcttcaaggccttctttggcggtcctgggggctttagttttgaggcctccggacccggcaatttctttttccaattcggatag

SEQ ID NO: 26241 - DNA, 1329 bp, synthetic construct
  source 1..1329: mol_type = other DNA; note = Synthetic coding sequence
aacgaggtgtacaacctgacccaggagttcttccggcacgacaagccagtaaacgcagaatctcagaactcagtgggggtgttcacacgggaggaagtgagaaacagaatccgaaatgatcccgatgatcctgaagcgactaagcgacttaagcttgcaatgatccagcagtacctgaaggttgagtcttgtgagtcgtccagtcactcgatggacgaagtgtccctgtcggctttcggggagtggactgaaatcccgggcgcccatcacattataccaagcggctttatgcgagtggttgaattactggccgagggaatcccggcccacgttatccagctgggaaagcctgtgcgctgcatccattgggaccaagccagtgcgaggccgcgaggccctgaaattgaacctaggggcgaaggagaccataatcacgacacaggggagggcggtcagggaggggaggagccgcgtggcgggcgctgggacgaagatgagcagtggtccgtcgtggtggaatgcgaagactgtgagttgattccagctgaccatgtgattgtcaccgtctccttaggagtgctgaaacgacaatacacctctttcttcagacctggtcttcctacggaaaaggtcgccgcgattcaccgcttggggattgggactaccgacaagattttcctggagttcgaggagccgttttggggccccgagtgcaacagcctgcagttcgtctgggaggatgaagccgaaagtcatactttgacatacccccccgaattatggtaccggaagatctgtggctttgacgtgctctatccccccgaacgatatggtcatgtgctcagtggctggatctgcggggaagaggctctggtgatggaaaagtgcgatgacgaggccgttgccgaaatttgtactgagatgctgaggcagttcactgggaatcctaatattcccaaaccgagacgaatcctcaggtccgcctggggcagcaacccctactttagaggctcatattcctacacccaagtcgggagcagtggagcggatgtagagaagctggctaaacccctgccctacaccgagtcttctaagaccgcccacggctctagcactaagcaacaaccaggacacctgttcagcagtaaatgccctgagcagccgctcgatgccaaccgcggggccgtgaagcccatgcaggtgctcttctccggcgaggcaactcaccgtaagtactatagtactacacatggtgccctgctctccggccaacgggaggcggcacgtttgatcgagatgtacagggatcttttccagcaaggtacttag

SEQ ID NO: 26242 - DNA, 180 bp, synthetic construct
  source 1..180: mol_type = other DNA; note = Synthetic coding sequence
atgagctactaccagcggcccttcagccccagcgcctacagcctgccggcatctctgaacagcagcattgtgatgcagcacggaaccagcctggactccacggatacttacccccaacacgcacagagcttggacggcacaacctcatcttcaatcccattatatcggagcagcgaatag

SEQ ID NO: 26243 - DNA, 837 bp, synthetic construct
  source 1..837: mol_type = other DNA; note = Synthetic coding sequence
atgaagtgcgagcactgcacccggaaggagtgcagcaagaagaccaagacggacgaccaggagaatgtgtccgcggacgctccctcccctgcccaagaaaatggggaaaagggtgagttccacaaactggccgatgcgaaaatcttccttagcgactgcctagcgtgcgactcatgcatgacagctgaggagggagtgcaactgtcccaacaaaatgccaaagatttcttcagagtgctgaacctcaataagaagtgtgatacctccaagcataaggtgctggttgtgagcgtatgcccacagtctcttccgtattttgctgctaagttcaacctgtcagtgactgacgcctcacggagactgtgcggttttctcaaatctctgggatgggttaggtacgccgagagggtgttagggagaccaattacagcgcatctctgcaccgccaagtcaccacaacaggtgatggggtctctggtgaaggattactttgctagacaacagaatctgtcacccgaaaagatttttcatgttatagttgccccatgctatgataagaaactggaagctctgcaggaaagtttgccaccagccctgcatgggtctcgcggcgcagactgcgtcctgacttctgggacagggtctctgtgggagtgcacccctgtcatcaccgccacgcaggaagctgcagcccgtgaaagtcttgagccagggcggcaacgcttgcagcgggacaagatcgcccctctggacagttcactgggtggcggcggcgaaattgcacagattatggagcagggcgatttgtcagttagggacgcagcagtggacacttag

SEQ ID NO: 26244 - DNA, 471 bp, synthetic construct
  source 1..471: mol_type = other DNA; note = Synthetic coding sequence
tgaggcaaggcccagcggaagatcagcgccatccacatcctggacgtgctggtccttaacgggacagacgtgagggagcagcattttaatcagaggatccaactagcagaaaaattcgtgaaggccgtgagtaagccatcccggccagatatgaatccaatccgggtgaaggaggtgtacaggctggaggagatggagaagatcttcgtgcggctggaaatgaaaattataaagggttcttcgggcaccccaaagctgtcttataccggaagagatgacagacactttgtgcctatgggactctacatagtgagaacagtgaacgagccgtggacaatgggctttagcaagtctttcaaaaaaaagtttttttataacaaaaagaccaaagattcgacgttcgacttgcctgctgattctatcgcaccattccacctaccatcgctcgcgtgcctgagcaaaatggactag

SEQ ID NO: 26245 - DNA, 1200 bp, synthetic construct
  source 1..1200: mol_type = other DNA; note = Synthetic coding sequence
atggccaccggcgacctgaagcggagcctgcggaacctggagcaggttctccggctgctaaattacccagaagaggtcgattgtgttggcttgataaagggggaccccgcagccagtctcccaattatctcatattctttcaccagctactcaccttacgtcaccgagctgattatggagagcaatgtcgagctcatagccaaaaatgatcttaggtttatagatgccgtttacaaactgctacgcgatcagttcaactataagccgatcctgacgaagaagcagttcattcaatgtggttttgccgagtggaaaatccagattgtctgtgatatcctgaattgtgtgatgaaaaagcataaggagctgagcagcctgcagaaaatccctagccagcagcggaaaaagatctcatcaggaaaatccgagccccctctaggcaatgaaaaaatttctgcagaagcagttggagtggatatcagtggacggttcatgacctcaggcaagaaaaaagccgttgtgatacgacatctctataatgaggacaatgtggatatttccgaagatactctgagtccaatcacagacgtgaacgaggcggtggacgtgagcgatctgaacgccacagagattaagatgccagaggttaaggtgcctgaaatcaaggccgaacagcaggacgtgaatgttaatccagaaatcactgccctgcagacaatgctcgccgaatgtcaggagaacctcaaaaagctgacctccattgaaaagcggctcgactgcctagagcaaaagatgaaaggcaaagtaatggtggacgaaaatacctggaccaatcttcttagccgcgtgactcttcttgagaccgaaatgctcctgagcaagaaaaatgacgagttcatcgaattcaatgaggtcagcgaggactatgctagctgcagtgacatggacctcctcaacccccacagaaagagtgaggtggagcggcccgcatccattcccttgtcaagtggctattcaaccgcttcctcggatagtacaccgagagcttccaccgtcaactactgcggtttaaatgaaattagcgaaaactttcccgcgtggagcgcgacaagttcatgctctagcttgagctggctgctgcgcggccacacatcctacctctccagccaatctttcgcttggccccttagttgtgtatag

SEQ ID NO: 26246 - DNA, 819 bp, synthetic construct
  source 1..819: mol_type = other DNA; note = Synthetic coding sequence
atggccagcctgctgcaggaccagctgaccaccgaccaggacctgctgctcatgcaggaaggcatgccgatgaggaaagtccgatcgaagtcctggaagaagctccggtatttccgtttgcaaaacgatggtatgaccgtgtggcacgcacggcaggccaggggatctgccaagccatccttcagcatttccgacgtggaaacaattcgaaacggtcacgatagcgagttgctcaggtcgctggcagaagagctgccgcttgagcaggggtttaccattgttttccatggcaggcgctccaacctggacctaatggccaactccgtagaggaggcacagatctggatgcgcggcctgcagttgctcgttgatttggtgaccagcatggatcaccaggaacggctagaccggtggctgtccgactggtttcagcggggcgataaaaaccaggacggtaagatgagtttccaggaggttcagcggcttctgcacctgatgaatgtcgaaatggaccaggaatacgctttttctctgttccaggccgctgacacttctcagtcaggaacactggagggggaagaattcgtgcagttttacaaggccctcaccaagcgagccgaggttcaggagctttttgaatccttctccgctgacggacagaagcttacattgctggagttcctcgacttcctgcaagaagagcagaaagagcgggactgtacaagcgagcttgccctggagttgattgataggtacgagccgagcgacagcggagccagtgaggaggatcctggcgagggcgaagaggtcaacacatag

SEQ ID NO: 26247 - DNA, 360 bp, synthetic construct
  source 1..360: mol_type = other DNA; note = Synthetic coding sequence
atggacaagaacatcggcgagcagctgaacaaggcctacgaggccttccggcaggcctgcatggaccgtgactctgctgtcaaggaactgcagcaaaagaccgagaactacgagcagaggatccgagagcagcaggaacaactcagtcttcagcagacaataattgacaagctcaaaagccagctgctgctggtaaattccacccaagacaacaactatggttgtgtgccacttttggaggactctgagactcggaagaataacctgaccctggaccaaccgcaggataaggtgatttcaggtatcgctcgggagaaactgcctaaggtcgacatagcttccgccgagtccagcatttag

SEQ ID NO: 26248 - DNA, 1881 bp, synthetic construct
  source 1..1881: mol_type = other DNA; note = Synthetic coding sequence
atgtgcagcaccctgaagaagtgcggcacctaccggaccgaggtggctgaatgccacgatcacggatcaactttccaaggccggaaaaaaggcggttcctccttcagggacaactttgacaagcgctcatgccactatgagcatgggggttatgagaggccaccctctcattgtcaggagaatgacggttccgtggaaatgcgggatgtccacaaagatcaacagctgagacacactccgtacagcatacgctgcgaaagacgcatgaagtggcattcagaggatgagattcgcataacaacctggagaaatcgaaaacctccagagaggaagatgagtcagaatactcaggacggctacacacgaaactggttcaaggtcacaatcccatatggtatcaagtatgataaggcttggctgatgaactcaattcaatcacattgctccgatagatttactccagtggattttcattacgtccgcaatcgcgcctgttttttcgttcaagatgccagcgctgcaagtgcgctcaaggatgtctcttataaaatctatgatgatgaaaaccaaaagatatgcatttttgtgaatcactctactgcaccctactcggttaagaataaactaaagcccggccagatggaaatgctgaagctgacgatgaataaacggtataacgtgagccagcaagcccttgatctgcagaacctgcggttcgaccccgacctgatgggccgtgacatagacatcatccttaacagacgtaactgcatggccgctactctcaaaattatcgaacggaatttcccagagctgctgtcgctcaatctctgcaacaataaactttaccagctggatggcctctccgacatcactgagaaggccccaaaagtgaaaactttgaatctgtcaaaaaataagctcgagtcggcatgggaactggggaaagtcaaaggcctgaagctcgaagagctgtggttagagggaaaccctctgtgttcaacattcagcgatcagtcagcatatgtaagcgccataagggactgtttccccaaactactgcgactagacgggcgcgaactgtcagcacctgtgatagtggacatagacagcagtgaaactatgaaaccgtgcaaagagaactttactggtagcgaaaccctgaagcatctggttctccaatttctgcagcaatattacagtatatacgactccggggatcgccaggggctgctgggggcatatcatgacgaagcttgcttctctctagccatccctttcgatcccaaagacagcgctccgtctagcctttgcaagtactttgaggacagccgaaatatgaaaacactgaaggacccttaccttaaaggggagctcctaaggcgcaccaaacgcgacatagtagattccctgagcgcactcccaaagacacaacacgacctcagttccattctggtcgacgtttggtgtcaaacagagcgcatgctctgtttttctgtcaatggagtttttaaggaagtggagggtcagagccagggttccgttttggcttttaccagaaccttcatcgccacacccggatcctctagctctctctgtatagtgaacgatgaattgttcgtacgggatgcgagcccacaggagactcagtcagcgtttagcattcccgtgagcaccttgtccagcagctcggaaccctcactaagtcaagagcagcaggagatggtgcaagccttctcagcacagtctggaatgaagctggagtggagtcagaagtgcctccaagataacgagtggaactacactcgggctggtcaagctttcacaatgttacaaaccgaggggaagattcccgcagaggccttcaaacagataagctag

SEQ ID NO: 26249 - DNA, 189 bp, synthetic construct
  source 1..189: mol_type = other DNA; note = Synthetic coding sequence
atggccatggcccccagccccagcctggtgcaggtgtacaccagccctgctgctgtggccgtgtgggagtggcaggatgggcttggcacatggcacccttacagcgcaactgtgtgttccttcattgagcagcaattcgtacagcagaaaggacagaggttcggactaggatcactagctcactcatag

SEQ ID NO: 26250 - DNA, 228 bp, synthetic construct
  source 1..228: mol_type = other DNA; note = Synthetic coding sequence
atgcggctgagcctgcccctgctgctgctgctgctgggcgcctgggctattcctggaggccttggggacagagctcccttgaccgcaacagccccacagttagatgatgaggagatgtactcagctcacatgcctgcccatctgaggtgtgatgcctgccgggctgtggcctatcagagactttgtagttacccacctcatctgcctctgacagagcaacagagctag

SEQ ID NO: 26251 - DNA, 2619 bp, synthetic construct
  source 1..2619: mol_type = other DNA; note = Synthetic coding sequence
atgggcgacagcgacgacgagtacgaccggcggcggcgggacaagttccggcgggagagaagcgactacgataggagccgcgaacgggacgaaagaaggcgcggggatgactggaacgatagagagtgggatcgaggtagagaacgccgcagtagaggagaataccgagattacgatcgcaacagaagagaaagatttagcccccctagacacgagctctcccctcctcagaaaaggatgaggcgagattgggacgagcatagctctgacccctaccactccggatacgagatgccttatgctgggggaggaggcggacccacctatggtcccccccaaccttggggccaccccgacgttcacattatgcagcaccacgtgttgccgatccaggcccgcttaggtagtatcgcagaaattgacctgggagtcccgcctcccgtgatgaaaacctttaaagagttcctactgtctttggatgactctgtagatgagacagaggccgtgaaacgctacaatgactacaaactcgacttcaggaggcagcaaatgcaagacttttttctcgctcataaagatgaggaatggtttcgttctaaatatcaccctgatgaagtcgggaagcgcaggcaggaggctcggggcgccttacagaaccgcctgagagttttcttgagcctgatggagactggctggtttgacaacctgctccttgatatagacaaagccgacgcgatcgtcaagatgctagacgcggcagtgatcaaaatggaaggggggacagagaacgatctgcgaatcctggaacaggaagaggaagaagagcaggccgggaagcccggcgagccgagcaagaaagaagagggccgcgccggcgctggcctgggcgacggcgagagaaaaaccaacgacaaagatgaaaagaaggaggacgggaagcaggctgagaacgacagctccaacgacgacaagacgaaaaagtctgaaggcgacggtgataaggaagagaagaaagaggactcagagaaggaagcaaagaaaagttctaaaaaaaggaatagaaaacacagcggcgacgacagcttcgacgagggatccgtgtccgaaagtgaatcagagagcgagtccggccaggcagaagaagagaaggaggaagcggaagaagcgctcaaagagaaggagaagccaaaagaagaggaatgggagaagcccaaggacgcggctggcctcgagtgcaagcccaggcccctgcacaaaacctgctccctgttcatgaggaatatcgcccctaatattagccgggccgagataatttcactgtgcaagcggtacccgggcttcatgagggtggcattgagtgagcctcagcccgagcggcggtttttcagacgagggtgggtgacgttcgatagaagtgtcaacatcaaggaaatctgctggaacttacagaacataaggctacgagaatgcgaactaagtcccggcgtgaatcgtgatttgactaggcgagtgagaaacattaacggaattacgcagcacaaacagattgtcaggaacgatatcaagctagccgctaaactcatccatacactagatgaccgaacgcagctgtgggcaagtgaacccggtaccccgccgctacccacatccttaccctctcagaaccccattctgaaaaacatcactgactacctcattgaggaggtttcagcagaggaggaggagcttctgggctcttccggcggagctcctcctgaggagcccccaaaagaagggaacccagccgagattaacgtcgagagggatgagaagctgataaaagtacttgacaagctcttattatacctccgcatcgtgcactctcttgattattacaacacttgcgagtatcctaatgaggatgaaatgcctaataggtgtggcataatccacgttagaggtcccatgcctccgaatcgaatctcccacggggaggtactggaatggcaaaagactttcgaagaaaaactgacccccctgctatccgtccgggaaagcctaagcgaagaagaggcccagaagatggggcgtaaggatccagagcaagaggtcgagaagttcgtcacttcaaatacccaggaactcggcaaagataagtggctgtgcccactctctggaaaaaaattcaaggggccagaatttgtgaggaagcatattttcaacaagcatgctgagaagatagaggaagttaaaaaagaagtcgccttttttaacaattttctcaccgacgctaagcgccccgctctgccagaaataaaaccggcccagcccccaggtcccgctcagtctctgacacccggtctgccctatccacaccagaccccacagggcttgatgccgtatggtcagccgagaccccctattctgggatacggagcgggagctgtgcggcctgccgtgcctactggaggccctccctaccctcacgcaccttacggagcaggaagagggaattatgatgctttcagaggccagggaggctaccccggcaagcctaggaaccgcatggtgagaggagatcctcgagccattgtggaataccgcgatttggatgctcccgacgatgtggactttttttag

SEQ ID NO: 26252 - DNA, 483 bp, synthetic construct
  source 1..483: mol_type = other DNA; note = Synthetic coding sequence
tgacccgaggacgtgcaggccctggtgagcggcaagctggccctgcgatacgccggaaggcagaccgaggcattgaaatgtgttgctcaggcctctaagaatagatccctggccgattttgaaaaggccttgaccgactatagggccgagctccgggacgacccaatcatttccacgcacttggcgaagctttatgacaaccttttagaacagaaccttattagagtgattgagccgtttagccgggtccaaatcgagcatatcagcagccttataaagctatctaaagccgacgtcgaacggaaattatcacagatgattctggacaagaaatttcatggcattcttgaccagggagagggtgtgctcatcatttttgatgaacccccagtcgacaaaacttacgaagctgcactagagacgatccagaatatgagcaaggtggtggattctctctataacaaggccaaaaagctgacctag

SEQ ID NO: 26253 - DNA, 3906 bp, synthetic construct
  source 1..3906: mol_type = other DNA; note = Synthetic coding sequence
atgtggcggcggaagcacccccggaccagcggcggcacccggggcgttttgtcaggcaacagaggcgtggagtatggaagcggccggggccacctcggtactttcgagggccgctggcggaaactccccaagatgccagaggccgtcggaactgaccctagtaccagcaggaaaatggctgagctggaagaagtgacgttagacggtaaacctctgcaggccctgagggtgactgatttgaaagcagctctcgaacagaggggattagccaagtccggacagaagtccgccctcgtaaaacggctgaagggcgctctgatgttagaaaacctgcagaagcatagtacacctcatgcggcatttcagcccaatagtcagataggagaagagatgtcccaaaactcattcataaaacagtacctggaaaaacagcaggagctgctccgacagagactcgaaagagaagcaagagaggccgccgagttagagggtaaaagcagctcgatctccgaggagaagggggattccgacgacgagaagccaagaaagggcgaaagaagaagctctagagtgaggcaggcccgggctgctaagctctcggaagggtcacagcccgcagaagaggaagaggatcaggagaccccttcacgtaacctaagggtgagagccgatagaaacctgaagactgaggaggaagaggaggaggaggaggaggaggaggaggatgatgaggaagaagagggggatgacgaggggcagaaatcccgggaggcccccatattaaaggagttcaaggaagaaggtgaggaaatacctcgggtgaaaccagaggaaatgatggatgaaaggccaaagacacggtcccaggagcaggaggttctcgagaggggaggcagattcacaagatcccaggaagaggcccgcaaatcgcatttagcccgccagcaacaggaaaaagagatgaaaactacctctcctctcgaagaggaggaacgcgaaattaagagttcacaggggttgaaggaaaaatctaaaagccccagtccccccaggctaactgaggaccgaaagaaggcatcactggtggcgttgccagagcaaacagctagtgaagaagagacccctccccctctacttactaaggaggcttccagtccaccgccccacccccagcttcactctgaagaggagatcgagccaatggaaggacccgccccagccgtcttaatacaactgtccccccccaacactgatgcagacactcgtgagctgctggttagccagcacacagttcagctggttggcggactttcaccactctcaagcccttccgatactaaagctgaatcgcctgcagaaaaggtgcctgaggagtcagttctgcccctggtgcagaagagtactctggccgactactcagctcagaaggatctcgagcccgaatccgaccgcagcgcccagccgctgcctttaaagattgaagaactggccctcgccaagggcattaccgaagagtgcctaaagcagccttcattggagcagaaagaaggccgaagagctagccatacgttacttccttcccatcgacttaaacagagcgcggactcttcgtcaagcagatcctcatcttcctctagttctagtagtcgctcacgctcacggagtccagactccagtggctctaggtcccattccccactcaggtccaagcagcgcgacgtcgcccaggcacggacccatgccaaccccaggggcaggcccaagatgggatctcggtcaacttccgaatctcgaagccgctcaaggtcacggtcacgcagcgcatcatcgaacagtcgtaagagcctgagtccaggggtctcccgcgatagctccactagctatacggagactaaagatcctagttcgggccaggaggtggcaacaccaccagtcccccaactgcaggtttgtgagcctaaagaacggacctctacttcttcatcttccgtgcaagctagacggctgtcacagcctgagtctgctgaaaagcacgtgactcagagactgcagcccgagaggggatcacccaagaaatgcgaggccgaggaggccgaaccaccagccgctactcagccacagacatccgaaacgcagacatcccaccttccagaaagcgagagaatccaccataccgtagaggaaaaggaggaggttaccatggatacctcggagaacaggcccgaaaatgatgtgccagagccaccgatgccaatcgcggaccaggtgtccaacgatgatagacccgaaggatcagtcgaggacgaggagaagaaagaatcatcgctccccaagagctttaagcggaaaatctccgtcgtctctgctaccaagggagtgcctgctggaaacagtgacaccgaaggcggtcaaccagggcgcaagcgtcggtggggagcttcgactgcaacaacacaaaagaagccatcgattagcataacgaccgagtccttgaagagtcttattcctgacatcaagccacttgctgggcaagaagcagtagtggacttgcacgctgatgactcccgcataagcgaggatgagacggagcggaacggagatgatggcacacacgacaagggcctgaagatctgcaggactgtgacacaggtcgtacccgccgaggggcaggaaaatggacagcgggaggaggaagaggaagagaaggagccagaagcagaacccccggtgcctccacaggtctcagtggaggtggctctccctcctcccgcggagcacgaagtgaaaaaggtaaccctcggggacaccttgacaagaagatctatctctcagcagaagtccggcgtatcgatcacaatcgacgatcctgtgcggaccgcacaggtgcccagccccccaagaggaaaaatctcaaacattgtacacatatcaaacctcgtacgaccatttactctaggccagctcaaagagctactgggcagaacaggcaccctggtggaagaagctttctggattgacaaaattaagtctcattgcttcgtaacctattctactgtagaggaggcagtggccactcggacagcgctgcacggagtgaaatggcctcagtccaaccctaaatttttgtgcgcagattacgctgagcaggacgagctggactaccaccggggacttctagtggatagaccaagcgagactaagacagaagaacaggggatcccccggccattgcatccaccacccccccctccagtgcagcccccacagcacccacgtgctgagcaacgagagcaggagcgagcagtgcgggaacagtgggctgagcgcgaacgcgaaatggagaggagggaaaggacgcgtagcgagagagaatgggatagggataaggtccgggaaggtcctcgttctcgcagccgaagtcgcgatcggcgcaggaaagaacgagctaagtctaaggagaagaaatccgagaagaaagagaaggctcaggaggagccgcctgccaaattactagacgacttgtttcggaagactaaggccgctccatgtatttattggctccctctaaccgactcccagatcgtacagaaagaagcagaaagagccgaacgcgccaaggaaagggagaaacggcgtaaagagcaggaagaggaagaacagaaagagagggagaaagaagctgagagagagaggaaccgacagcttgagagagagaagcggagagagcatagcagggagcgtgatagagagcgggaaagggaacgtgagagagaccggggtgatagagacagggatcgcgaaagagaccgggaaaggggaagggagcgggatcgtcgtgataccaagagacattcgcggagcagaagtaggtctactcccgtccgcgatagaggaggccggaggtag

SEQ ID NO: 26254 - DNA, 231 bp, synthetic construct
  source 1..231: mol_type = other DNA; note = Synthetic coding sequence
atgctgctggagaacctgaccgacaacgagagcgagaacaccaacctgaaaaaaaaagtgttcgaaaaggaggcccatatccaggagctatcctgtctctttcaatcagaaaagtctctcgaaaccaagatcgccaaatggaatttgcagtctcgaatgaataagaatgaggctatagtcatgaaagaggctagccgtcagaagacggtagccctcaagaaggcaagctag

SEQ ID NO: 26255 - DNA, 1749 bp, synthetic construct
  source 1..1749: mol_type = other DNA; note = Synthetic coding sequence
atggaggtgcgggccagcctgcagaaggtgagcggcagcagcgactcagtggcaactatgaactccgaagagttcgtcctggtgcctcagtacgcggatgacaactctactaaacacgaggaaaagccccagctgaagattgtgtcgaacggagacgaacagttagaaaaggccatggaagagattttgcgggactcagagaaacggccatcatctctgctcgtggactgccagagttctagtgagattagtgaccattcgttcggtgacatcccagcatcccaaaccaataagccgtctttgcaattaatactagaccccagtaataccgagatttcaacaccaaggcccagtagtcctggcggtctgcccgaagaagatagcgtgctgtttaataaattaacatacctgggatgtatgaaggtgagcagtcctaggaacgaagtggaggctttacgggccatggctacaatgaaatcgtcatcccagtatcccttccccgtgacgctctacgtgcctaacgtgccagaaggatctgtcaggatcatagatcagtccagtaatgtcgagatagcctcatttccgatctacaaagtgttgttttgcgcacgcggacacgacggaactaccgagtcaaactgttttgcattcacagagagttcacacgggtcagaggagttccaaattcatgttttttcctgcgaaattaaagaggcagtgtctaggattctgtactctttctgcactgccttcaagcggtccagcagacaggtctcagatgttaaagatagcgtgatcccgactccagactcagatgtcttcacattctcagtgagcctggaggtgaaggaggacgatgggaagggcaacttccgactgctggttataccaatcccttttgagtacttctcccctgttcccaaagacagagacaaattctatttcaagctgaaacagggcattgagaagaaagtcgtgatcaccgtccagcagctgtccaataaggaactggccattgaaagatgcttcggcatgctgctgtcgcccggaagaaatgtgaaaaactctgacatgcacctcctggatatggagtcaatgggtaaatcctacgatgggagagcgtacgtcatcaccgggatgtggaatccaaacgcccccgtgtttcttgcgctcaatgaagagactccgaaagataagcaggtatatatgactgtggccgtggacatggtcgtgaccgaggtggttgaaccggtcagatttctgcttgagacagtggtcagggtctatcctgccaacgaaagattctggtacttttccaggaaaaccttcacggagacattcttcatgagactgaagcagtccgaagggaaaggacacactaacgccggagatgccatatacgaagtggtgagtctgcaacgggagtccgacaaggaagaaccagtgactccaacatcaggtgggggaccaatgagcccacaggacgatgaggcagaggaggagagcgacaatgaactttctagtggaacaggagacgtgtccaaggactgtcccgagaagattctgtacagttggggggaactcctggggaaatggcatagtaatctgggcgcccgccccaagggactgtctaccctggtgaaatccggcgtgcccgaggcccttcgcgccgaggtctggcaacttctggctggttgtcacgacaatcaagcaatgctggatcgttatcgtatcctcattactaaatag

SEQ ID NO: 26256 - DNA, 138 bp, synthetic construct
  source 1..138: mol_type = other DNA; note = Synthetic coding sequence
atggacgccgacagcgacgtggccctggacatcctgatcaccaacgtagtctgtgtgtttagaacccggtgccaccttaacttaaggaagattgctctcgagggagccaatgtgatctacaagcgggacgttggatag

SEQ ID NO: 26257 - DNA, 762 bp, synthetic construct
  source 1..762: mol_type = other DNA; note = Synthetic coding sequence
atggaggacgccccccagcggctgcggtggcaggcccacctggagttcacacacaaccatgacgtaggggatcttacctgggataagattgcagtgtcactgcctcgctctgagaagctgagaagtctggtgttggcaggcattccacacggcatgcggccccagctgtggatgcgcctgagcggcgcgttgcagaagaaacgaaactcggaactgtcatatagagaaatcgtaaagaatagcagcaacgatgagaccatcgccgcgaagcagatcgagaaggatttgctgaggacaatgccctcgaatgcctgttttgcaagcatgggctcaatcggggtcccccgcctgcggcgtgtgctcagggcacttgcttggctctatcctgagattggatactgtcaaggcaccggaatggtggctgcctgtctcttactgttccttgaagaggaggatgcattttggatgatgtctgcgatcatcgaggatctgttgcctgcatcctacttctcaacgaccctcctgggagtacagaccgatcagagagtgctgaggcatctcattgttcagtaccttccccgattagacaagctgctccaggaacatgacatcgagctgagcctgatcaccttgcactggttcctgaccgccttcgcttcagtggtggatatcaaactgctactcagaatctgggatctgttcttctatgagggaagccgcgtgctgtttcagctgaccctgggaatgttacatttaaaatag

SEQ ID NO: 26258 - DNA, 336 bp, synthetic construct
  source 1..336: mol_type = other DNA; note = Synthetic coding sequence
tgacccctggtgaaggtgcagatcttcggcgtgcggctggacaccgcccgccaggaaacaaactacgtggagaataacggatttaacccgtactggggccaaaccctttgtttccgtgtcctagttccggagttagcgatgctcagatttgtcgtcatggattatgattggaagtcgcgaaatgacttcatcggacagtacactctcccatggacatgtatgcagcagggttaccggcacatccaccttctgagtaaagacggtatctccctgcgacccgctagcattttcgtgtatatctgtattcaggaggggctggaaggtgacgagtcgtag

SEQ ID NO: 26259 - DNA, 552 bp, synthetic construct
  source 1..552: mol_type = other DNA; note = Synthetic coding sequence
atgatgcagatctgcgacacctacaaccagaagcacagcctgttcaatgccatgaatcggtttatcggcgctgttaataacatggatcaaaccgttatggtcccttccctactccgcgacgtgcccttggccgaccccggccttgacaacgacgtgggcgtggaggtcggcggttccggggggtgtctggaagaaagaaccccccctgtgccagatagcggctcagcaaacggctcattttttgctccttcacgtgacatgtattcacactacgtgctgctcaaaagcatccggaatgacatagaatggggagtgctgcatcaaccgccccctccagcagggagcgaggaaggctctgcctggaaaagtaaggacatactggtggacctggggcacctggaaggcgcagatgctggagaagaggatctggaacagcaattccattaccacctccggggcctacatactgtgctgtcaaaattaacacgcaaggcaaacatactgactaacagatataaacaggaaataggcttcggcaactggggtcactag

SEQ ID NO: 26260 - DNA, 1215 bp, synthetic construct
  source 1..1215: mol_type = other DNA; note = Synthetic coding sequence
atgatgctgagcaccgagggccgggagggcttcgtggtgaaggtgcgtggtctgccgtggtcgtgctcagcagatgaggttatgcgattcttttcagactgtaaaatccagaatggaacaagcggtattcggtttatttatactagagaggggcggccctccggtgaagccttcgtggagcttgaatcagaagaagaggtcaagctggcgctcaaaaaagaccgggagactatgggccatagatacgtggaggtgtttaagtccaacagcgtggaaatggactggatgactctcccggtggatttccagggacgtagcactggggaggccttcgtccaattcgcttcacaagaaattgctgaaaaagcgctgaagaagcacaaggaaagaatcggccaccggtatatcgaaattttcaagagtagtcgggccgaggtgcggacacactatgatcctccgcgcaagctcatggccatgcaacgccctggcccgtacgaccggccgggagccggaagaggctataactctatcggtaggggcgcagggttcgagcggatgagaagaggagcatacggtggagggtacggtgggtacgacgattatggaggttataatgacggctatgggttcggcagcgatcggtttggcagggatctgaattattgtttctcaggcatgtccgaccaccggtacggagatggcggtagcagtttccagagcactaccgggcattgcgttcacatgcgtggtctaccgtatcgggcgacggaaaatgatatttataacttcttcagcccgcttaatcccatgcgagtgcatattgaaataggacctgacggaagagtcacgggcgaagctgatgtggaattcgccacacacgaagatgccgtcgctgcaatggccaaggataaggctaacatgcagcaccgctatgtggagctgttcctcaactccaccgctggaacatctggtggtgcttatgaccactcctacgtggagttgttcttgaattccactgcaggagctagcgggggggcatacggcagccaaatgatgggcggaatgggcctgagtaaccagtcttcttatgggggccctgcgtctcagcagctgagcggcggatatggtggcgggtatgggggtcagtcatctatgtcagggtacgaccaggtgctgcaggaaaatagctccgactatcagtctaacctggcctag

SEQ ID NO: 26261 - DNA, 1545 bp, synthetic construct
  source 1..1545: mol_type = other DNA; note = Synthetic coding sequence
atgagcatcagcagcgacgaggtgaacttcctggtgtaccggtacttacaggagagtgggttctcccactctgctttcacctttgggatcgagtcccatatctcccagtccaacattaatggtgctctggtgcctccagctgccctgattagtatcatccagaagggcttacaatatgtggaggccgaagtaagcattaacgaagatggaacgctcttcgatgggcgcccaattgagagtctgtctttgatagatgcggtcatgcccgacgtggttcagaccagacagcaggcttaccgggataaactcgctcagcaacaggctgcggcggccgccgccgccgccgcagccgctagtcagcaggggtcagccaaaaacggcgagaacaccgctaatggtgaagagaatggcgcccacaccatcgctaacaaccacactgatatgatggaggtagatggagatgtggagatcccgcctaacaaggccgtggttttaaggggccacgaatcagaggtattcatatgcgcgtggaatccagtatccgacctcctagcatcaggctccggcgatagcactgcgcgcatctggaatttgtccgaaaacagtacatcagggtcgacacagttggtactgagacattgcatacgagaaggagggcaagatgtgccttccaataaagacgtgaccagtctggattggaattctgagggaactctactagcaacgggctcatatgatgggtttgctcggatctggactaaggatggcaacttggccagcaccctcggccagcacaagggaccaatctttgctctgaaatggaacaagaagggcaatttcatcctttccgccggtgtggacaagaccaccatcatttgggacgcccataccggagaggcaaagcagcagtttccctttcacagtgccccggctctcgacgtggattggcagagtaataacacttttgcctcttgttctaccgacatgtgcatccacgtgtgcaagcttgggcaggatagacctataaagacctttcagggacacaccaacgaggtcaatgccatcaaatgggatcctactggtaacctgcttgcttcttgcagcgacgacatgacccttaagatttggtcaatgaagcaggataactgtgtccacgatctccaggcacataacaaagaaatatacaccattaaatggtctcccacagggccaggaacaaataatccaaatgccaacctcatgctggcctctgcgtctttcgatagtacggtcaggctatgggacgtcgacagagggatttgtatccatacactcactaagcaccaggagcctgtttacagtgtcgccttcagtcccgatggaagatatcttgctagcggatcttttgacaagtgcgtgcacatttggaatacccagacaggagcactggtgcatagctatagaggcactggaggaatcttcgaggtgtgttggaatgcagcgggagacaaggtcggtgcatctgcttcagacgggagtgtgtgcgtactggatctgagaaaatag

SEQ ID NO: 26262 - DNA, 2928 bp, synthetic construct
  source 1..2928: mol_type = other DNA; note = Synthetic coding sequence
atgaagttcgtgagcgaggacctgcaccggtgcgccctgctgaccgctgacagcttcggcgatccattcttccctcggaccacacagatcctgctggaatatcaactggggcgctgggtgccccggctcagagagcctagagatctttacggcgtgagttcaagtggtcctctgtcaccgacacgatggccataccactgcgaggtcattgatgagaaagtccagcatattgattggacacccagctgccccgagccagtctacattccaacaggtttggagaccgagccactgtatccggactctaaggaggcaactgtggtttaccttgccgaggacgcgtataaagagccctgctttgtttactccagagtgggagggaaccgcacccccctcaaacagccagtagattaccgtgacaatacactgatgttcgaagcccgatttgagtctggaaacctccagaaggtagtgaaggtcgcagaatacgaatatcagttgaccgtgagaccagatttgtttaccaataagcacacccagtggtactactttcaggtcaccaatatgcgagccggaatagtgtatcggtttactatcgttaatttcacaaaaccagctagcctgtacagtagggggatgaggccgttattttacagcgagaaggaggctaaggcccatcatatcggctggcagcggattggtgaccaaattaaatattatagaaacaatccaggacaggatggcagacactatttcagcctgacctggacatttcagttccctcacaataaagacacatgctacttcgcccactgttacccttatacatacacaaacctgcaggaatatctgtcaggaatcaataatgatcccgtgcgtagcaagttctgcaaaatccgcgtgctgtgtcatacactggctcgtaatatggtatatatcctcactataacaacacccctcaagaattccgattctcggaaaagaaaagctgtgatattgactgccagagttcaccccggagaaactaactcctcttggatcatgaagggattcctcgactacatactgggtaacagctcagacgctcaactcctgcgggacactttcgtgtttaaagtggtgcccatgctgaacccagatggggtgattgtgggcaactatcgctgctccctggctgggagagacctcaaccggaactacacctcactgctgaaggagtcattcccatccgtatggtataccagaaacatggttcatagactcatggaaaaaagagaggtgatcctgtactgcgatcttcacggccacagccggaaggaaaatattttcatgtatgggtgtgatggctcagacaggagcaagacattgtatctccagcaacggattttccccctcatgcttagcaaaaactgtcctgataaatttagcttctccgcttgcaaatttaatgtgcagaagagtaaagaaggtactgggagagttgtgatgtggaaaatgggtataaggaactcttttaccatggaggcgactttttgcgggtccacccttggcaataaacgtggcacgcacttctctaccaaggacctggaatcaatgggatatcacttttgcgattctctattagattactgcgaccccgataggaccaagtactacagatgtcttaaggaactggaagagatggagagacatattaccctcgagaaggtcttcgaagatagcgacactccggtcattgacatcaccctggacgtagaatcatctagcaggggcagcgactcctcagagtcaatcgactctctgacttacctcctgaagctgacatcacaaaagaagcacctgaaaaccaaaaaagaaagaaactcaactattgcaagtcatcaaaatgcccgcggccaagaagtgtacgatcggggccaccttctgcaacggcatacccagtccaattccgacgtgaaggacacccgtccaaatgaacccgacgactacatggtcgactattttaggaggcagttacctaaccaaggtctagcccactgtaagctcaggctgcctggatctagacactcccctgccagcgccagccgcgtggccggcactaccgggacccgacaccacacctggttgatctttgtgttcttggtggagatggggaaaaagattccactgaaaggaaccgacctttacggaaattgcttcaaggttacaagcctccaatctcctatgggaaagcagacttcgacctggaccgagaagacgaggattccaacagaggatctccatcacaacctaaagtccaagattaaagagtgcatttcctttcagagtaaaaagaccggcattaattggaccgatgatgaaaagcgatcctataaagacaaaggaatagttcagacccaggaaatcctgcaatacctccttcctatcgtccactccaccaaaaacatgcaaaccacccagatcaagcagttgtttaaccccaggaccaatttccaaatacagcaccaacttaatccagccacgtgcagaaatattaagaaatactctacatcttggaccgcgccccgcaatcaccccttcgtgatccagggggatgtgatggccaatagttcagagtgggtacagtctaagccgcaccgtagcctagaatctttgagtcccctgaaaggtccaaaaaaaaacaagcatagccagatttgggcaatcaaaaatgaggatatcaaacccttgtctagtaagtgggagaccgcttccagcagtttcgggatggatgctaacgtgttgaagtacaagagtctgcaggccgaggaaacgaaccagcagagctcgaagcataccgctttgcacctcaccaagaacaaagatgaacaggccaataagaatgacggccagcctacgttgtacttaaagttccagagagagtcatag

SEQ ID NO: 26263 - DNA, 1626 bp, synthetic construct
  source 1..1626: mol_type = other DNA; note = Synthetic coding sequence
atgagcagcagcggctacccccccaaccagggcgccttcagcaccgagcagagccggtatcctccccattctgtgcagtataccttcccaaatactaggcatcagcaagagttcgctgtgcctgactaccggtccagtcatctggaggtaagccaggcctcccagttgttacagcagcaacagcaacagcagctgcggcgacgcccaagcctgctgtccgaattccatcctggttccgatcggccacaggagaggcgcacctcatatgaaccattccatccaggccctagtcccgttgatcacgactctctggaatcaaaaaggcctagactggaacaagtatcagattctcatttccagcgcgtgtcagctgccgttctccctttggttcaccccctgcccgaggggctgcgcgcatctgccgatgccaaaaaagatccagctttcgggggcaaacatgaagccccctcatctccaatttctggtcagccttgcggcgacgatcagaacgccagtcccagtaaactgagtaaggaggaactgatacagagcatggacagggtagaccgagaaatcgctaaggtggagcagcagatccttaagctcaagaaaaaacaacagcagctggaggaggaggcagcaaagccgcctgagcctgaaaagccagtttcccccccccctgtagagcagaaacataggtccatcgtgcagatcatttacgacgagaataggaagaaagcggaggaagctcacaagattttcgaaggcctgggccccaaggtggaacttccactgtacaatcagcctagcgacacaaaagtgtaccatgagaacattaaaaccggggtcccagcccgccgaatgatgaaaaaccaggttatgcgcaagaaacttatcctcttctttaagcgccgcaatcatgcaagaaagcaaagagagcagaaaatctgtcagcggtacgaccaacttatggaggcgtgggaaaaaaaggtggaccggattgagaacaatcctcggcggaaggctaaggaatccaagacacgcgaatattacgaaaaacagttccctgaaattagaaagcagagggaacagcaggaacggtttcagcgcgtggggcagcggggggcagggctgtcagcgacgattgctcgatcagaacacgagatttctgaaattattgacgggcttagcgaacaggagaacaatgagaagcagatgcgacaactttcagtgatcccacctatgatgtttgacgctgaacaaagacgggtgaaatttattaacatgaacgggttgatggaggatccaatgaaggtgtacaaggaccgtcagttcatgaatgtttggacagatcatgagaaagagatttttaaagacaaatttattcagcatccgaagaatttcggcctgatcgcatcctacctcgaacgtaaatccgtgccggattgcgtgctctactactacctcacaaagaagaatgagaactacaaggctctcgtgaggaggaattacggaaagcgcaggggcagaaatcaacagatagctcgcccttctcaggaggagaaagtggaggaaaaggaggaagacaaggctgaaaagaccgaaaaaaaagaggaggagaaatag

SEQ ID NO: 26264 - DNA, 840 bp, synthetic construct
  source 1..840: mol_type = other DNA; note = Synthetic coding sequence
atgaagttccccttcctgcccatcctggtgatgaagttcatcgagaaagcccagaatatgagcaagtacgtcttaatcgacacacccgggcagatagaggtgtttacttggagcgcaagtggaaccatcataactgaagcgttagcaagctccttcccaaccgtagtgatttatgtgatggatacgtctcggtcaactaaccctgtgactttcatgagcaacatgttgtacgcctgctctatcctgtacaaaaccaagttgcccttcatcgtcgtgatgaacaagaccgacattatcgatcacagctttgctgtggagtggatgcaagatttcgaagcctttcaggatgcactgaaccaggaaaccacgtatgtctccaacctgacacgcagtatgagcctagtgctagatgagttttatagttcactgagagtggtgggcgtctcagcagtgctgggcacaggactcgacgagcttttcgtgcaggtcacatccgccgccgaggagtacgaacgggaataccgtcccgaatacgagcgcctgaagaagagccttgctaacgccgaaagccagcaacagcgcgagcaactcgaaaggctccggaaagatatggggtccgtcgcactggatgctgggactgccaaggactcactttcacccgtgttgcatccttctgatcttattctgacccgtggcacattggatgaggaggatgaagaagccgactccgataccgacgacatcgatcaccgcgtcaccgaggaaagccatgaggaacccgccttccaaaacttcatgcaggagtcaatggcccaatactggaaacgaaacaacaagtag

SEQ ID NO: 26265 - DNA, 1230 bp, synthetic construct
  source 1..1230: mol_type = other DNA; note = Synthetic coding sequence
atgaaggacacccaggacatccaggaggccagcaaggccatgcagaataaggtccacgagcaggaggacaaaaatgagaaacaaaagcagagggaggataaactgggagtgtattccctcgtacatttctccccgaagatgctgggatccgtggcaactactttgccattgtcatctagcaattcctctggcatgcctctcggctactacctgagttccccccaaatcagcagagtgactatatcaacaactggccagctgaccagcaaagcaacagttgggtcgtgttccagagtcgagaattccctagacgcatctccattcagcgtcccaaagaagcaagatgagtcacctatgataggagatggagaagactatttcctttctctcttcggggattccaagaagctgacagctcactccaactacactcaaaagactcttaaatatttcagcatgattttggaagaggtcggccaatttacgagctcgtccctcggggacgtagagatcgcagaggtgaatgtaaagggcctttttgtcaaactcatcaacagctccctcgacaaagagatggctattggggatcatatcctacagcaaaatgtcaacggacagacaatatccctgtaccgttttctgccaaacatagtaatgcaggcaaatagcacagtgaccgtgtgggctgcagcttctgaagcaaagcatcaaccgccttctgacttcttatggaaagagcaggacaagtttcgagccagccctgattgcattacaatcctgtgtaagcccaacggtcaggctatcgcctggtatactcccatccactggaagcaggcatgggaaaaactagatgcggacgtggagttcaaccggtgtagcgtcgtgtcgccaacctttcgtaagcgggtgttccaatggacagcatccacggctacaataaccaaggagaagcaggaccagccaaaaaaggatatctctaactatcaggttgagcaggctcaggtcctcttgaagcgcgaaaaagaaatcccacctacagtgtttcccaatagatcgccctggtgtcagaatccctatgtctccgcacacccttattgcccgctgatcgagccccacaatacgagcacagccggagggagactagacagacaaccacgcacgcgctccacacgaccaaatcgagcttctggatccaagaaaaagaagaccagtgagtcgcagaagcagtag

SEQ ID NO: 26266 - DNA, 2442 bp, synthetic construct
  source 1..2442: mol_type = other DNA; note = Synthetic coding sequence
atgagcgagcagggcgacctgaaccaggccatcgccgaggagggcgggacggagcaagagacagcaactcccgaaaacggcattgtgaaaagtgagtcactggatgaggaagaaaaactggaactccaacgacgtttggaggcgcagaatcaggaaagacgaaagtcaaaatcgggtgctggtaaagggaaactaactcggagtttggccgtgtgcgaggaaagtagcgccaggcccggtggggaatctttgcaggaccaggagtctatacacctccagctttcatctttctcatctctccaggaagaggacaagagcagaaaagacgacagcgagcgggaaaaagagaaagacaagaacaaggataaaacatcagagaagcctaaaattcggatgcttagcaaagactgttcccaggaatataccgattccactggcattgacctgcatgagtttctgatcaacactctcaagaataacagccgagatcgcatgatcctgctcaagatggagcaggaaattatcgatttcattgcggacaataacaaccactataagaagtttccgcagatgtcgtcgtatcagcggatgctagtgcaccgggtagcagcttacttcgggctcgaccacaatgtagatcagaccgggaagtcagtgatcattaataaaacctcttcgacgagaattcccgaacaacgattttgtgaacacctcaaagacgaaaaaggagaagagagtcagaaacgattcatacttaagcgggataacagcagcattgataaggaggataaccagtctgtatgttcccaggaatcactgtttgtggagaatagccgcctcctcgaagattctaatatctgcaatgagacctacaaaaaaagacagctgttccgcggcaatagggatggaagcggacggacgagcggttcccgccaatctagcagcgagaatgagcttaaatggtctgaccaccagagagcatggtcatcaacagatagcgattctagcaaccggaacttaaaaccagccatgactaagactgcgagctttggaggaattaccgtactcactaggggggacagcacctcgtccaccaggtcaaccggcaaactttctaaggcaggcagcgagagcagcagctccgcaggctcctctggatcgctctccagaactcatcctcctctgcagagtacccctctcgtctcaggcgtggcagccggatcccccggctgcgtgccgtaccctgaaaacggcatcggagggcaggtcgctccttcgtcaacttcgtatatcctgcttcccttggaggctgcaaccggcatcccccctggatctattctacttaatccgcacacaggacaaccattcgtgaatccagacggcactccagccatctacaatcctcctaccagtcaacagcctttacgaagcgccatggtaggacagtcgcagcaacagccaccgcagcagcagccgagcccacagccccaacagcaggtccagcccccgcaacctcagatggccgggccgttagtgacacagagtgtacaggggctgcaggctagttctcagagcgtgcagtatcccgccgtgagctttccgcctcaacacctcctgcccgtgtctcccacacagcactttcctatgagggacgatgtagccacccagttcggtcagatgacgctgtccaggcagtccagcggcgagacccctgagcctccgtcaggtcctgtgtacccttcaagtctgatgccacagcccgcccagcagccgagttacgtgatagcaagtacgggccagcaactgccaaccggtggtttctccggatcaggcccccccatttctcagcaagtactccagcctcccccctccccccagggattcgtgcagcagccgcctcccgcccagatgccagtctattactacccctcaggtcaatatccaacatccactacgcagcagtatcgaccaatggcccccgtgcaatacaatgcacaacgctcccagcagatgcctcaggctgcacagcaagcaggatatcagcctgtgttatctgggcaacagggatttcagggattgatcggagtccaacagcctccccagtcacaaaacgtgataaacaaccagcaaggaacaccagtacagtccgtgatggtaagctacccaacaatgtcctcctatcaagtcccaatgacccagggcagccaggggttacctcaacagtcctatcagcagcccatcatgttaccaaaccaggccggccagggaagcctcccggcaactgggatgccagtttattgtaacgttacacctccgacaccacagaacaatctacgcctcataggcccgcattgcccaagctcaacagtaccagtgatgagtgcatcgtgcagaactaactgtgcatctatgtccaatgctgggtggcaagtgaagttttag

SEQ ID NO: 26267 - DNA, 1773 bp, synthetic construct
  source 1..1773: mol_type = other DNA; note = Synthetic coding sequence
atgcccagcccccagctgctggtgctgttcggcagccagaccggcaccgcacaagatgtcagcgaacgactgggaagagaagcccgaagaagacgccttgggtgcagagtgcaggcgctggactcttaccccgtggtaaaccttattaatgaacctttggtgatctttgtatgcgctacaactggccagggtgacccacctgacaatatgaaaaacttctggcggttcatttttagaaaaaatctgccttctactgcgctatgtcagatggatttcgccgtgctgggcctgggggactcctcttatgctaaattcaatttcgtggccaaaaagctacaccgaagactgctccaactcgggggctcggctttactgccggtttgtctaggtgacgaccagcatgagctgggcccagatgccgccgtggatccttggctgcgtgatctttgggacagagtactgggcttatatcctccaccgccgggattaacagaaatccctcctggtgttcccttacccagcaaattcaccctgttgttcttgcaagaggccccctcaactggatctgaaggacaacgggtcgcccacccaggcagccaggagcccccaagcgagtctaagccctttttggcaccgatgattagtaatcagagagtgaccgggccgtcccattttcaagacgtgcgccttatcgagttcgacattctaggctccgggatttccttcgctgccggcgatgtagtgctgattcagcccagcaatagcgccgcacacgtccagcgcttctgccaggttctgggccttgatccagatcaactgttcatgctgcaacccagagaacccgatgttagctcaccaacccgtttaccccaaccttgttcaatgagacacttggtgtcccattacttggatatagcctctgtgccacgccgtagtttctttgagctgctcgcgtgcctgagcctacacgagctcgaaagggaaaaactccttgagtttagctcagctcagggacaggaggaactcttcgaatattgcaataggccgaggagaacaattttagaagtactgtgcgattttccacacaccgctgctgcgatcccgccagactatcttttggacctcatcccagtgatccgccccagagcgttctccattgcaagttcactgctgattttggtggcggtggtgcagtttcagacccgtctgaaagaaccacggcggggcctctgctcttcctggctagcttctctggacccaggtcaagggcctgtgcgtgttcctctgtgggttcgacccggcagtttagcgttccctgaaacacctgataccccggtgatcatggtcgggccgggtaccggagtcgcaccattccgtgcagcgatccaagaacgcgttgcacagggccagactgggaacttcttgttcttcggctgtaggtggcgggaccaggatttttactgggaggcagagtggcaagagctggagaagagagactgcctgacgcttatccctgcatttagcagagagcaagaacaaaaggtatacgtgcagcatagactgcgggagctagggagtttagtgtgggagcttctggaccgacagggcgcatacttctacctggcagggaacgctaagtctatgcccgccgatgtaagcgaggcactgatgagtatcttccaagaagaagggggactttgctctcctgatgcggctgcttatcttgcacgcctgcagcagacgcgtcggttccagactgaaacctgggcttag

SEQ ID NO: 26268 - DNA, 2436 bp, synthetic construct
  source 1..2436: mol_type = other DNA; note = Synthetic coding sequence
atgcccctgagcagccccaacgccgccgccaccgccagcgacatggataaaaattctgggagcaatagtagctctgccagttctgggtcatccaaagggcagcagcctcctcgatctgctagcgccggaccggctggtgagtcaaagcccaaatcggatggcaaaaactcttccggcagtaagcggtacaaccggaaacgtgagctttcttatcccaaaaatgagagcttcaataaccaaagccgtaggtccagctctcaaaaaagcaagaccttcaataagatgccaccccagcgcggaggtggcagctccaaacttttttcttcatcgttcaacgggggcagaagggatgaagtcgccgaggcccagcgggctgaatttagtcccgcgcagttcagcgggccaaagaagatcaacttaaatcatctgctgaactttacattcgaaccgcgcggtcagaccggccattttgagggaagcggacacgggtcttgggggaaacggaataagtgggggcataagccattcaacaaggagctcttccttcaggcgaattgtcaattcgttgtcagcgaggatcaggactataccgctcacttcgctgacccagataccttagtcaactgggattttgtggaacaggtgcgtatctgcagtcatgaggtgcccagttgtcccatctgtctataccctcccacggctgccaagattacaagatgtgggcatattttttgctgggcttgtatcctccattaccttagtctgtcagaaaaaacatggtctaagtgtcctatctgttattcttcggtccacaagaaagacctgaagagtgttgttgcaacagagtctcatcaatacgtggtgggtgatacaattaccatgcagcttatgaaaagggaaaaaggcgttttggtggccctccccaagtctaagtggatgaacgtggaccaccccatacacctaggtgacgagcaacactcccaatacagtaaactgctgctggctagcaaagagcaagtgctgcaccgagttgttttggaggaaaaggtcgccctagagcagcagctagccgaggagaaacataccccggagagttgctttattgaagctgctatccaagagttaaagacccgggaagaggcactcagcgggctagccggcagtcgcagagaggtcaccggggtggtggccgccctggaacagctcgttcttatggctcccctagcaaaggagtctgtgtttcagcctcgtaaaggggtcctggagtacctgagcgcgttcgacgaagaaaccactgaggtgtgtagccttgatacaccatctaggcctctcgccttacctcttgtcgaagaagaggaggccgtgtcagagccagaaccagagggtcttcccgaagcctgcgatgaccttgaactcgcagacgataatctgaaagaaggaactatctgtaccgagagtagtcagcaggaaccaatcactaagtcggggttcacgcgcctgagctcttccccatgctactatttctaccaagctgaggacggtcagcacatgtttttacacccagtcaacgtccggtgtctcgtgagggaatatgggtccctggagcgcagcccggaaaaaatttcggcaacagtagttgagatcgccggatacagtatgtccgaagacgtcaggcagcgccatagataccttagtcacctccctcttacatgtgaattctctatttgcgaactggccctacagccccccgtcgtttctaaagagacgttggagatgttctctgacgacattgagaaaaggaaaaggcaaagacagaagaaggcccgcgaggagagaagacgagagagaaggattgaaatcgaggaaaataaaaaacagggaaagtatcctgaggtccacatccctctagagaaccttcagcaattccctgcattcaattcttacacttgctcctctgattcagccctcggtcctactagtactgagggccacggcgccctgtccatttctccccttagccgatctccagggtctcatgccgacttcctgctcacacccctgtctcctactgcgtcacagggcagtccatccttctgcgtaggttcgctcgaggaggactccccgttcccatctttcgcccagatgctgcgagtgggcaaggcgaaggctgatgtgtggcccaaaacagctccaaagaaggacgagaatagcttagtcccacccgcaccagtcgatagcgatggcgagtcagacaactctgatcgcgtgccagttcccagttttcagaattcgtttagccaggctatagaagctgcctttatgaagctagacacccctgccacgtcagacccgttatctgaagagaagggcggcaagaagcgcaaaaaacaaaaacagaaactgctgtttagtacctctgtcgtgcataccaagtag

SEQ ID NO: 26269 - DNA, 189 bp, synthetic construct
  source 1..189: mol_type = other DNA; note = Synthetic coding sequence
atgcccgagatccgggtgacccccctgggcgcctgccccgtgctgtcctggaatctcgtattaccacctggcagaggcagcagggcaccgtccagcaccgacactcgcactgggttccacgtgcttccgcacggcgtgtcggccagctctgagggcgcccctagacccggagtagacaccgtcctgtag

SEQ ID NO: 26270 - DNA, 948 bp, synthetic construct
  source 1..948: mol_type = other DNA; note = Synthetic coding sequence
atgagcggcctggtgctgggccagcgggacgagcccgccggccaccgattatctcaggaggaaatcctcggaagcacccggctggtttctcagggattggaagcgttgagatccgaacatcaggccgtactccagtcgctgtcacaaacaatagaatgtcttcagcagggcgggcatgaggaaggccttgtgcacgagaaggctagacaactccgaaggtctatggagaacatcgaactgggattaagcgaggcacaggttatgctggccttagcctcgcatctctcaaccgtcgaatccgagaagcagaagctgcgggcccaagtgcggcggttgtgccaggaaaaccagtggttgagagatgagctagccggaactcagcaacgccttcagaggtcagaacaggcagtagcacaactggaggaagaaaagaaacatctggaattcttgggccagctacgacagtatgatgaagatggacacacctccgaagaaaaagagggcgatgctacgaaagacagtctggatgatttatttcctaatgaggaagaggaagatccttcaaatggcctgtcccgcggacagggtgccacagcggcacagcaaggggggtatgagattcctgcccgcttacgaacgttacataatttagttatacagtatgcggctcaggggaggtacgaagttgcggtgcccctctgtaagcaggctctggaggacctcgagcggacctccggccgcggtcatcccgatgtcgctaccatgctcaacatccttgccctggtgtatcgtgaccagaataaatataaggaggctgcacacttactgaacgatgccctttccatccgagaatccacattggggcccgatcaccccgcggtctcgattccctgtcctccccaccccacccccagaactcctcatcactgctgttttgggctaagctag

SEQ ID NO: 26271 - DNA, 2055 bp, synthetic construct
  source 1..2055: mol_type = other DNA; note = Synthetic coding sequence
atggagaacctgcagaccaacttcagcctggtgcagggcagcaccaaaaaactcaatggcatgggagatgatggaagcccaccagcaaagaaaatgattacagacatccacgcaaatggaaaaactatcaataaagttcctaccgtgaagaaggagcatctagacgattatggggaagcaccagtcgaaactgatggagagcatgttaaacgaacctgcacatcggttccagagacactccacctgaacccttccctgaagcacaccctagctcagttccatctcagctcccagagttctttaggcggcccagccgctttttctgcacggcacagccaagagtcgatgtcacccaccgtcttcctgcccctgccgagcccacaagttctcccaggcccactgctaatccccagcgacagttctaccgaactcactcagacggtgctggaaggggaatccattagctgcttccaagtcggtggtgagaagcgtctctgtctgccccaggtgctcaactctgtgttgcgggagtttacattacagcagattaatacagtgtgcgatgaactttacatctactgttctcgctgtactagcgatcagcttcatattctgaaagtcctcggcatactaccgttcaatgcaccgtcctgcggcctgatcacactgacggacgcccagagattatgtaacgcgcttctgaggccaaggaccttcccacaaaacggatctgtgttacctgccaagtccagtctggcccagctgaaggagaccggctcagcctttgaagtcgagcatgaatgtctgggtaagtgccagggactttttgcgccccagttttacgttcagcccgacgccccctgtattcagtgtttagagtgctgcgggatgttcgctccccaaaccttcgtgatgcactcccatcgatccccggataagaggacttgccattgggggttcgagtctgccaagtggcactgctacctccacgtcaatcaaaagtatctcggtactcctgaagaaaagaagctgaaaatcatactagaggagatgaaagagaaattcagcatgcgtagcggaaagcggaatcaaagcaagaccgacgctcctagtgggatggagctgcaaagctggtacccagtcataaaacaggaaggtgatcacgtgagtcaaactcatagcttcctgcacccgtcctactacctgtacatgtgtgacaaagtggtcgcccctaatgtgtctctgacctctgctgtgtcccagagcaaggaacttacaaagactgaagcatctaaatccatctcccgtcaatctgagaaagcacactcatctggcaagttgcagaagacggtgtcatacccggacgtgagccttgaggagcaggagaagatggaccttaaaacttccagagagttgtgtagtcgtttagacgcatccatcagcaataacagcacatccaagaggaagtcagaatctgcaacttgcaacctggtgcgtgacatcaataaggtcgggatcggcttggtagcagccgccagctcaccactgttagtaaaagatgtgatctgcgaggacgacaaaggaaagatcatggaggaggttatgcgcacttatctgaagcagcaggaaaagctgaaccttatcctgcaaaaaaagcaacaactccaaatggaagtcaagatgctgagtagttctaagagcatgaaagagctgacagaggaacagcaaaacttgcaaaaggagctggagtctctacagaacgaacacgcccagaggatggaagagttctatgtggagcagaaggacctggaaaagaaattggagcaaataatgaagcagaagtgcacctgtgattctaatttggagaaggacaaggaggccgaatatgctggtcagctggcagaacttaggcaacgcctggatcacgccgaggctgatcgtcaggagcttcaggacgagttaagacaggagcgtgaagcacgtcagaagctagagatgatgatcaaggaactgaaactgcaaatactgaaatcttccaaaaccgccaaggagtag

SEQ ID NO: 26272 - DNA, 4050 bp, synthetic construct
  source 1..4050: mol_type = other DNA; note = Synthetic coding sequence
atggaggagaacgagagccagaagtgcgagccctgcctgccctacagtgcggaccggcgtcaaatgcaggaacaggggaaggggaatctccacgtaacaagccccgaggacgcagagtgccgcaggactaaagagagactcagcaacggtaatagccgagggtctgtctccaaatcctccaggaatataccccgaagacataccctaggcggcccccggtcctccaaagagattctcgggatgcagaccagtgagatggatcgtaaacgagaggccttcctggagcacctgaagcagaaatacccccatcatgcctcagcaattatggggcatcaagagcggcttagggaccagacaagaagtcctaaactgagccacagcccgcagccaccttctctgggagatccagtggagcatctaagcgagactagtgccgattccttggaggcaatgtcagagggggatgctcctacaccattcagccgcgggagccgcacccgcgctagtctccctgtggtgaggagcaccaatcagacaaaagaacgaagtttaggcgtcttgtacctgcagtacggggacgagaccaagcaacttcgaatgcccaatgaaatcacgtctgcagatacgatccgggcactcttcgttagcgcttttcctcaacagctgacaatgaagatgctcgagagcccaagcgtggccatctacatcaaggatgagtcgcggaatgtgtactacgagctgaacgatgtgaggaacatccaggatcgctctctgcttaaagtctacaacaaagaccccgcccatgcattcaatcatacacctaagacgatgaacggcgatatgaggatgcagcgagagttagtatatgcgaggggggacggtcctggagcccctaggcctggaagcaccgctcacccaccccacgctattccgaacagccctccgagtaccccggtgccacattccatgcccccctccccgtcgcggatcccatacggcgggaccagatctatggtggtgcccgggaatgcaactattcctcgagacaggataagctcactcccagtgagtcgcccgatttccccctctcccagcgcaatactggagcgacgggatgtcaagcctgacgaggatatgtccgggaagaacattgctatgtatcgcaacgaaggcttttacgccgatccatatttgtaccacgaggggcgcatgtcaattgctagctcccacgggggccaccctcttgatgttcccgaccacattattgcctatcatcgtacagcaattcgtagcgcctccgcatactgcaacccgtccatgcaggccgagatgcacatggagcaatctctgtacagacagaagtcccggaaataccctgacagccatctgccaacgctgggatcaaagacgccacccgccagcccgcatcgggtaagcgacctgagaatgatagatatgcacgcccactataacgctcacggaccccctcacacaatgcaacccgaccgcgcaagcccgagtaggcaagccttcaagaaagagccaggaactttggtttacatagagaagcccagaagcgctgctgggctcagcagcctcgtagatctgggtccaccattaatggagaagcaagtgtttgcgtattccacggccactattcctaaggaccgcgagaccagtgaaaaaatgatgaagaccacagctaaccggaaccacactgatagcgcagggacaccacatgtctcgggcggaaagatgcttagcgccctagaatctaccgtgcccccctcccagccgccacccgtaggaacaagtgccattcacatgagccttcttgaaatgcgccgtagcgtggccgagctgaggcttcagttgcagcaaatgagacagttacaactccagaatcaagagttgctccgggctatgatgaagaaagccgagcttgagatttctggaaaggtaatggaaacaatgaaacgcttggaggaccctgtacagaggcagagagtgctggtagaacaagagagacagaagtatttgcacgaagaggagaaaatcgtgaagaaattgtgtgagcttgaagactttgttgaggacctgaagaaggacagcactgccgctagtaggctagtaacactcaaggacgtcgaggatggggcatttctgctcaggcaagtaggtgaggctgtagcaacgttgaagggggaattccctactctgcaaaataagatgcgcgctatcttgaggatcgaggtggaggccgttcgcttcctcaaggaggagccacacaaactggattcactcttgaaacgagttagaagtatgaccgatgtgctgacgatgctgagacgacatgtgacagatggcctcctgaagggaaccgacgctgcccaggccgcacagtacatggcaatggaaaaagccacagctgctgaagtcctcaagtcccaagaagaagccgcgcacacatcgggtcaaccattccattctactggtgccccaggggacgccaagtccgaggttgtgcctctatctgggatgatggtccgacatgcccagagctctcctgtcgtgatccaacccagccagcacagtgtggccctgctcaaccctgcccaaaatctacctcacgtcgcctcctctcctgcagtaccacaagaagccactagtacactacagatgagccaagctccccagagcccacagatacccatgaacgggtccgctatgcagtctctgttcatagaggaaatccactccgtgagtgctaaaaacagagcagtctcaatcgagaaagccgagaagaagtgggaagagaaaagacagaacttggaccactacaatgggaaggaatttgagaaactgctggaggaagcacaagccaacatcatgaaatcgatcccaaacctggagatgccacccgccaccgggcccctaccccgaggcgacgccccggttgataaggtagagctgtctgaggacagtcccaactctgagcaagacctggagaaactaggtggcaaaagcccgccccctccgccccctcccccccgccgctcctacctccccgggtccgggctgactaccacaagatcaggcgacgtggtatacaccggacgcaaagagaatataaccgctaaggcaagttcagaggacgcaggcccttctccacagacaagggctacgaagtaccccgctgaggagccagcatccgcgtggactcccagcccccctcctgtgactacgtcttccagtaaagatgaagaagaggaggaagaggagggtgataagatcatggccgaactccaggctttccaaaagtgcagtttcatggacgtcaattccaactcccatgctgaacctagccgcgcggactcgcacgtgaaggataccaggtccggcgccaccgtgcctcccaaggagaagaagggatcgtccggggcaccacagacaagccgaatgccagtccccatgtccgccaaaaacagaccaggcactctggacaaacccggcaaacagtctaaattacaggacccacgacagtatagacaggccaatggctctgccaagaagtctggcggtgattttaagcccacttctcctagcctgccagcatccaagatcccagcgctcagcccaagttctggcaaaagcagcagtctcccctcatcctcaggtgacagtagcaatctgcctaaccctcccgccaccaagcccagtatcgcctctaatccactctctccccagactggccccccggcacattccgcctcactcatcccttctgtgagtaacggttcactcaaatttcaaagtttgacccacacagggaaggggcatcatctgagcttcagcccccaatcccaaaatgggcgagccccaccacctctatccttctctagcagccctccatcaccagcctcatctgtgtccctgaatcagggagccaaaggaacaaggaccatacacactccctctctcacaagctacaaagcgcagaacggttcctcatcaaaagccaccccctcaaccgccaaagagacctcatag

SEQ ID NO: 26273 - DNA, 177 bp, synthetic construct
  source 1..177: mol_type = other DNA; note = Synthetic coding sequence
tgaatcatccacaagctggccatgcagctgcggcacatcggcgacaatattgaccatcgaatggtaagggaagacctgcagcaggatggccgcgacgcactagatcacttcgtgttctttttcttcaggagagtgcaggtccttttgcattttttttggaacaaccatttattgtag

SEQ ID NO: 26274 - DNA, 429 bp, synthetic construct
  source 1..429: mol_type = other DNA; note = Synthetic coding sequence
atgcccgaggaccaggtgggcaagctggaggccaccgagaacaccatttccgccatggctgctgcagcagctgaacagcagcagttttatttgctgctcggaaatctcctgagcccagataacgttgttaggaagcaggcggaagagacctatgagaacattcccgggcaaagtaaaattacattcttgctgcaagctatccggaacacgaccgcagccgaagaagctagacaaatggccgccgtcttgctgcgaaggcttctcagcagcgcattcgacgaagtttaccctgccttgccatccgacgtccagaccgctatcaaatctgaactgttgatgataatacagatggagacccagtctagcatgaggaaaaaggtctgcgacattgcagccgaacttgcacggaatctgattggcgtctattag

SEQ ID NO: 26275 - DNA, 93 bp, synthetic construct
  source 1..93: mol_type = other DNA; note = Synthetic coding sequence
atgggcagccggaagaaggagatcgccctgcaggtgaacatcagcacccaggagttgtgggaagagatgctgtcatccaagggcttaacctag

SEQ ID NO: 26276 - DNA, 645 bp, synthetic construct
  source 1..645: mol_type = other DNA; note = Synthetic coding sequence
atggccggcgagaacttcgccacccccttccacggccacgtgggccgcggtgccttttcagacgtgtacgagcccgccgaagataccttcttgttactgaacgctctggaagcagcagccgctgagttagccggggtggaaatttgccttgaagtgggcagtggatcgggtgtcgtttccgcctttctggcgagcatgattggaccccaggctctttacatgtgcacggatatcaatcctgaggctgccgcttgtaccctggagacggctaggtgtaataaggttcacatccagcctgttataaccgacctcgtgaaggggttactgccacgccttaccgaaaaagtcgatctgctagtctttaatcctccgtacgtggtcaccccacctcaggaggtcggctcccacggcatagaagctgcttgggctggaggcaagaacgggcgggaagtgatggaccgctttttccctctggtgccagatcttctcagccccaaggggctgttctatctggtgacaatcaaggagaataatccggaagaaattctcaaaatcatgaagacgaaagggttgcagggaactacagccctgagtcggcaagccggacaggaaaccttgtcggtcctcaaatttactaagtcctag

SEQ ID NO: 26277 - DNA, 1158 bp, synthetic construct
  source 1..1158: mol_type = other DNA; note = Synthetic coding sequence
atgggccggtggtgccagaccgtggcccggggccagcggccccggacctctgccccaagtagagccggggccctgttgctgcttctgctgctgctgagaagcgccggttgttggggtgcaggcgaggctcctggcgccctgagtactgccgatccggcagatcaatccgtacagtgtgtgccgaaggcaacctgcccaagctcgcgcccacgcctgctgtggcagactcccacaacacagaccttgccatcaactacgatggaaacccagtttccggttagcgagggcaaggtggacccataccggagctgtggcttttcctatgagcaggacccgacgctccgggacccagaagctgtggctcgcaggtggccatggatggtcagcgtgcgggccaatggaacgcatatttgcgccggaacaatcatagcgagccagtgggtgcttacagtggcccattgtttaatctggcgtgacgtgatttatagcgtccgcgtgggatcaccctggatcgaccaaatgactcagactgccagcgatgtgcctgtgctgcaagtcatcatgcactcacggtatagagcacagcgcttttggagctgggtgggtcaggccaatgatatcggcttgctgaaactaaagcaagagctgaaatacagcaactatgtgcgaccaatctgcctcccaggtaccgattatgttctgaaggatcactctcgctgcaccgtcaccggatggggcctttctaaggccgacggcatgtggcctcagttccgaacaatccaagaaaaagaggtaatcatcctaaacaataaggagtgcgacaacttctatcacaactttacaaaaatccctaccctggtacagataatcaaaagtcagatgatgtgcgcagaggacacacaccgcgaaaaattttgttacgagctgactggtgagccactcgtgtgctccatggaagggacatggtatctggtcgggctggtcagttggggggcggggtgccagaaatcagaggcccctcctatatacttgcaggtcagctcatatcaacattggatttgggattgcctgaacgggcaagcgctggctctgcctgcaccttcaagaacccttctgttagcgctacccttgccactgtcactcctggcagcactctag

SEQ ID NO: 26278 - DNA, 255 bp, synthetic construct
  source 1..255: mol_type = other DNA; note = Synthetic coding sequence
atgagcggcctggtgctgggccagcgggacgagcccgccggccaccgtttgtctcaggaagagattctggggagcacgaggctggtttcccagggcttggaggctctacgaagtgagcatcaagctgtactccagagcctgagtcagaccattgagtgcctgcaacagggaggacatgaggaaggacttgtccatgagaaggccagacagctaagacgcagtatggagaacattgaactggggctgtcggaatag

SEQ ID NO: 26279 - DNA, 483 bp, synthetic construct
  source 1..483: mol_type = other DNA; note = Synthetic coding sequence
atgagcgtgaacagcgagaagagcagcagcagcgagcggcccgagccgcagcagaaagctccactcgttcccccaccacccccaccaccacctcctcctcccccccccttaccggaccctactcccccggagcccgaagaggaaatcctgggctccgacgatgaagaacaggaggatccagctgactactgtaagggggggtaccacccggtgaaaattggcgatctgttcaatggcagataccacgtgatccggaagctgggatggggtcacttttctacagtttggctgtgttgggacatgcaaggaaagcgctttgttgccatgaaggtggtcaaatctgctcagcattacaccgaaaccgctcttgatgagatcaaattgttgaaatgtgttcgggaaagtgacccctctgatcccaacaaggacatggttgtccagcttatcgacgacttcaaaattagtggtatgaacggcatctag

SEQ ID NO: 26280 - DNA, 66 bp, synthetic construct
  source 1..66: mol_type = other DNA; note = Synthetic coding sequence
atgaaccccgccagcgcccccccccccctgcccccccccggccagcaggttatccacgtgacatag

SEQ ID NO: 26281 - DNA, 1212 bp, synthetic construct
  source 1..1212: mol_type = other DNA; note = Synthetic coding sequence
atgagcggcagcgacggcggcctggaggaggagcccgagctgagcattaccctgactctacggatgctgatgcatggcaaagaagtgggctccatcattgggaaaaagggcgagacagtgaaacggatccgtgagcaaagctcagcccggatcacaattagtgaggggtcgtgccccgagagaatcaccactatcacaggatctacggccgcggtgtttcatgcagtttcaatgattgcatttaaactggacgaagacctgtgcgccgccccagcgaatggaggcaatgtatcccggccacccgtgactttgaggcttgttatcccagccagtcaatgcgggagtctcattggaaaggcaggaacaaaaattaaggaaattagagaaactacaggtgctcaggtgcaggtagccggcgacttgctccccaactccacagaacgggcagtaactgtttcgggggtgccagatgcaataatcctttgcgtgcgacagatctgcgcagtgattctggagtcgcctcccaagggagctaccattccatatcatccttcactgtcccttggtactgtgcttttgagtgccaaccaaggcttcagtgtacagggccaatatggcgcagttacacccgccgaggtgaccaagctgcagcagctgagtagtcatgctgtcccgtttgccactcctagtgtggtgcccgggttggatcctggtacacaaacgtcaagccaggaatttttagtgcccaacgacctaatcggatgcgtgattggtcggcaaggtagcaaaatctctgaaattcggcaaatgtccggggctcacataaagattgggaatcaggccgaaggcgcgggtgaacggcacgtcacgatcaccggaagccctgtgtccattgccttagcccagtacctgatcacggcgtgcctcgaaacagccaaatctacatcaggcggaacaccaagttccgcgcccgcagatcttccagcccccttttcgcctccattgactgccctgcctactgctccccctggcctcctggggacaccttacgcaatctcccttagtaattttattgggctcaagccaatgccatttctggcattgccaccagctagccccgggccccctcccggactcgcggcatacactgctaaaatggctgctgccaacggatccaagaaggctgagcggcagaagttcagcccttactag

SEQ ID NO: 26282 - DNA, 5106 bp, synthetic construct
  source 1..5106: mol_type = other DNA; note = Synthetic coding sequence
atgggcaacagcgacagccagtacaccctgcagggcagcaagaaccactctaacacgataaccggggccaaacagattccgtgctcgctcaagatccgaggaattcatgcaaaggaggagaagtctctgcatggttgggggcacgggtcaaacggtgccggctacaaaagtaggtcattggccaggtcttgtttatcccatttcaagtccaatcagccttatgcttccaggttgggagggccaacttgtaaggtgagccgcggagtggcctattctacccacagaactaatgccccaggaaaagacttccaaggaatttccgctgcatttagcacagagaacgggttccactctgtcggtcatgagcttgctgacaaccatattacatcccgggattgtaacgggcacctgctgaattgctatggtcgcaatgagagtatagcgtccaccccgccaggggaggataggaaaagtcctcgagtgctgatcaaaacattgggaaaactggatgggtgcttgagagtggaatttcataatggcggcaacccaagcaaggtaccagctgaggactgctcggagcctgtgcagctgctccgctactctccaactctggcttctgagaccagtcctgtgcccgaggcccggcggggctcaagcgccgactccctcccctctcacaggccctctccgactgattcccggctcaggagtagcaaggggagttcactgagctcggagtctagttggtatgatagcccttggggaaatgccggcgagctatcggaagctgaaggttccttccttgcaccaggaatgccagaccctagcctccatgccagctttccccctggggacgcaaagaaacctttcaaccaatcctccagcctgtcaagcctgcgcgaattgtataaagacgcaaatttgggcagcctgagtccctcaggaattcgactgtctgacgagtatatgggaacgcacgctagcctcagcaaccgtgtgagtttcgccagcgacatcgacgttccaagtcgcgtggcgcatggggatccgatacagtattcgagctttaccctgccttgccggaagccgaaggcttttgtggaggatacagccaaaaaagattctctgaaggccaggatgcgaagaatctcagattggactggatcgttatcaaggaaaaagaggaagctccaggaacctcgctctaaagaggggtccgattatttcgacagcaggagtgacggattgaatacagatgtccaggggagctcccaggcttcagccttcctgtggtcgggtggatccacccagatcctcagtcagcggagtgaaagcacacatgcgattggttcggaccccctacggcagaatatctatgaaaacttcatgcgtgaattagaaatgtcacgcaccaacaccgagaacattgagactagcacagaaacggcagagtcgtcaagcgaaagtctgagctcccttgagcagctagatctgctgttcgagaaagaacagggagtcgtgcggaaggccggctggctgttctttaaacccctggtgacggtccagaaggagcgcaagttggagctggtggccaggcggaagtggaagcagtattgggtgactttgaagggctgcaccctgctgttttatgagacctatggcaagaatagtatggatcaatcctccgcccctcgttgcgcattgttcgccgaagactcgattgtacagtccgttcctgaacaccctaagaaagagaacgttttctgtctaagcaactcattcggggacgtctacctgtttcaagccacctcccagacagacctggaaaattgggtgactgcggtgcactctgcgtgcgcaagcctctttgcaaaaaagcatggcaaggaggacactcttcggctgcttaagaaccaaacaaaaaatcttctacagaagattgacatggacagtaaaatgaaaaaaatggcagagctacagctgtcggttgtgtctgatccaaagaatcggaaggccatagagaatcaaattcagcaatgggagcagaacctggaaaagttccatatggatttgtttcggatgaggtgttatctagcctctcttcagggcggtgaattgccaaaccctaagtcattattagctgccgcctccaggccatctaagttggctctgggccggctcggaatcctgtctgtcagttccttccatgcattggtgtgcagtcgagacgatagcgccttgagaaaacgcaccttgagtttgacccagcgaggtcggaacaagaaggggatcttctctagcctcaaagggctcgacaccctcgcccgtaaggggaaggaaaagagaccaagtatcacgcaggtggacgaattgctgcacatatacggttctactgtcgacggggtgccacgagataatgcgtgggagatccagacatacgtgcattttcaggacaaccatggggtgacagtcggaatcaagcccgagcacagagttgaggacattttgactctcgcatgcaaaatgcgacagttggagccaagccactacgggctgcagttacggaagctagtagatgacaatgttgaatattgtatacccgccccatacgagtacatgcagcagcaagtgtatgacgaaatcgaagtattccccctaaatgtgtacgacgttcagctgacaaaaaccggctctgtatgcgactttggcttcgctgtgacagcccaagtggacgaacggcagcacttgagtcgcatttttattagcgatgtgcttcctgacggtcttgcatatggcgaagggttgagaaagggtaatgagattatgacactaaacggagaggcagtctccgacctcgacttgaagcagatggaggctctgttcagcgagaaaagtgtcggcctgacactcatcgccaggccgcccgatactaaggctacgctctgtacatcttggtctgacagcgacctgtttagccgagatcagaagagtttgcttccacctcccaaccaatcccaattgctcgaggaatttctggacaattttaaaaagaacacagctaatgacttctccaacgttcctgacattacgacaggcctgaaacgctcccaaacggacgggacactggaccaggtctctcatcgagagaagatggaacagacttttcgctctgcagagcaaatcaccgctctgtgcaggtcattcaatgactctcaggccaatggcatggaaggtcctcgggaaaaccaggacccacctcctcgctcacttgcacggcatcttagcgacgccgacagactgcgcaaggttatacaggagctagtggataccgagaagtcctacgtgaaggacctttcttgcctgttcgagctgtatctggagccactgcaaaacgaaacgttcctgacccaagatgagatggaaagcctctttgggtccctgcctgagatgctggaattccagaaggtgttcctggaaacacttgaagacggtatctcagcatcaagcgatttcaacacactcgaaaccccttctcaatttcgcaagctcctgttttccctcggagggagttttctatattacgcggatcatttcaagctgtacagtgggttctgcgctaaccacattaaagtacagaaagtactagagagagcaaagacagacaaagcgttcaaggcgtttttagatgccaggaatcccactaaacagcactcttctactctcgaatcatacctcataaaacccgttcagagggtgctcaagtacccgctcttgcttaaagaactggtttcattgactgatcaggaatcggaagaacattatcacttgacagaagccctcaaggcaatggagaaagtggccagtcacataaatgagatgcaaaaaatatacgaagattacggaaccgtcttcgaccaattagtagcagagcaatctggtactgaaaaagaggttacggaattatctatgggagaactgttaatgcattccaccgtgagttggctgaacccttttctgtccctgggcaaagcccgcaaggacctagagcttactgttttcgtgtttaaacgggcagtaattctagtttataaagaaaattgcaaactcaagaaaaagctccccagcaatagtagacctgcacataactccactgatctggatccgttcaagttcagatggttgatccccatttccgcactgcaggtgaggttgggcaatccagccggcactgagaacaactcaatttgggagctgatccacacaaagtctgagatagaggggcggccagaaacaatatttcagctgtgttgcagcgatagcgaaagtaagacaaatatcgtgaaggtgatcaggtctatactacgggaaaacttcagacgccacatcaagtgtgaactgcctcttgagaagacctgtaaggatcgactggtccctctgaagaaccgcgtacctgtctctgccaagcttgcctcatcaaggagtctaaaggtcctcaagaattcctcaagcaacgaatggacgggtgaaactggtaagggtacgctgctggacagcgatgaagggtctctgagttctggaacgcagtcatctggatgtcctaccgcagaaggcagacaggattctaagtccacatccccaggaaagtaccctcatcctggattggccgattttgcggataacctgatcaaagaatccgacatcctgtcagatgaggacgatgaccatcgccagacagttaaacaggggtctcctaccaaggatatcgaaattcagttccagaggctgcgcatttccgaggacccagatgtccaccccgaggcagaacagcagcccggtcccgaatccggtgaggggcagaaaggcggggagcagcctaagcttgtacgcgggcatttctgcccgatcaaacgcaaggcaaactcgactaagcgtgaccggggcacattactgaaagctcagatcaggcatcaatcacttgactcccagagtgaaaacgctactatcgatctgaactctgtgctggagagggagttcagcgtacagtcacttacaagcgtagtgtcagaagagtgtttttacgagactgaatcccatgggaaatcctag

SEQ ID NO: 26283 - DNA, 408 bp, synthetic construct
  source 1..408: mol_type = other DNA; note = Synthetic coding sequence
atgggcaagagctgcaaggtggtggtgtgcggccaggccagcgtgggcaaaacttccatccttgagcagttgctctatgggaatcacgtggtgggctcggaaatgatagagacccaggaggacatctacgtaggctccatagaaaccgatcgcggcgtgcgggaacaggtgaccattgtagtactcggcaataaatgtgatctccaagaacagcgcagagtagacccggacgtagcccagcactgggccaaatcggagaaagtaaaactatgggaggtctccgtggcggatcggcgttctctgctggagccctttgtgtaccttgcctccaaaatgactcagccacagagcaagagcgcttttccactctcaagaaaaaacaaaggatccgggtcacttgatggatag

SEQ ID NO: 26284 - DNA, 3693 bp, synthetic construct
  source 1..3693: mol_type = other DNA; note = Synthetic coding sequence
atgccccggaagggcacccagcccagcaccgcccggcggcgggaggagggtccgcctcctccctcacctgacggcgcatcgagtgatgctgaaccagaaccgccgagcgggcggaccgagagcccggctaccgccgctgagactgcttctgaagagctagacaaccggagccttgaggaaattcttaacagtatccctcctcctccaccaccagcaatgacaaacgaagccggggctcctcggctcatgatcacgcacatcgtaaaccagaactttaagtcttatgcaggcgaaaagatcttaggacccttccataaaaggttctcctgcattattggcccgaatggcagtggcaagtcaaatgtgatcgactccatgctgttcgtgtttggctatcgcgcacagaagatcaggagtaagaaactttcggtgctgattcacaactccgacgagcacaaggatatccagtcttgtaccgtggaagtgcactttcaaaaaatcatagacaaggagggagacgactacgaagtgattcccaacagcaatttttacgtgtctcggaccgcctgcagggataacacaagcgtgtatcacatctccggtaagaagaagacctttaaggacgtcggcaatctcttgaggagccacggcatagatctcgaccataacaggttcctcatcttacagggagaagtggaacagattgctatgatgaagccaaagggccagaccgaacacgacgagggcatgttagagtatttagaggatattataggctgtggccggctgaatgagcccatcaaggttctttgcaggcgcgtggagattctgaacgaacatcggggcgaaaaacttaaccgcgttaaaatggtggaaaaggagaaagacgcgctggaaggtgaaaagaacatagcgatcgagtttctgactcttgaaaatgaaatttttaggaagaagaatcatgtctgccagtattatatttatgaactgcagaaaagaatagctgagatggagactcagaaggagaagatccacgaggacacaaaggagattaacgaaaaatctaacattttaagcaacgagatgaaagccaagaacaaggacgtaaaggatacagaaaagaaactgaacaagatcaccaaatttattgaggaaaataaggagaagtttactcagctggaccttgaggacgtgcaggttcgggagaagctcaagcatgccaccagtaaggcgaagaaactagagaagcagctgcaaaaagacaaggaaaaggttgaggagtttaagtctattcctgccaaatcaaataatattattaacgaaactactacaagaaataacgctctggaaaaggagaaggagaaagaagagaagaaactcaaagaagtgatggattctctgaaacaggaaactcagggcctccagaaagagaaggaatcaagagagaaggagctgatggggttcagcaagtcggtgaatgaagctcgttccaagatggacgttgcccagtccgaactggacatctacctttctcggcacaacactgccgtatcccagctgaccaaagccaaggaagcactcattgcagcatccgagacacttaaggagcggaaggccgctattcgggatattgagggaaaactgccccaaaccgaacaagaattaaaggaaaaggaaaaagagctgcaaaaactgacacaggaggagaccaacttcaagtcgctggttcacgacttattccagaaggtggaggaggcgaagagcagcctggctatgaaccgctcaaggggcaaggtgctcgatgcaattattcaggagaagaaaagtggtagaatcccagggatctatggcaggctcggagatctgggagccatcgatgaaaagtacgatgtggccatttcgagctgctgtcacgccctggactacatcgtggtggattctatcgacatcgctcaagagtgcgtgaacttcctcaagaggcagaatattggggtagcgacatttataggattggacaaaatggccgtctgggcgaaaaaaatgacagaaatccaaactccagagaatacaccccgcctgtttgatctagtgaaggttaaagacgagaagataagacaagcgttctacttcgccttaagggacacactcgtcgcggataacttggaccaggccacgcgagtggcttaccagaaagatagaagatggagggtcgtgaccctccagggccaaatcatcgagcagagcggcacaatgacaggcggcggtagcaaagtcatgaagggacgcatggggtccagccttgtaattgaaatttccgaagaggaggtcaataaaatggaatcccagctacagaacgactccaagaaagccatgcagatacaggagcaaaaggtgcagctcgaggagagagtggtcaaactcagacattccgagcgagagatgcgcaacactctggaaaaatttacagctagcatccagagactcatcgagcaggaggagtacttaaatgttcaggtaaaagagctagaggcaaacgtcctcgccaccgcccctgacaagaaaaagcagaaacttctagaagaaaatgtctccgcctttaagaccgaatacgacgccgtggcagagaaagccggcaaagttgaggcggaagtgaagagacttcacaatacaatcgtagagattaataaccacaaactcaaagcacagcaggacaaattggacaagataaacaagcagctggacgagtgcgcgtctgccatcaccaaagcgcaggtcgccattaagaccgctgataggaacctgcagaaggctcaggacagtgtcctgcgcacagagaaagagattaaggacactgagaaggaagtggatgacctgacagccgaactcaaatcactggaggataaagcagccgaagtcgtcaaaaataccaatgcagccgaaatcagtaagatttcactacatccaatagaagacaacccaattgaggagatctccgtgctaagcccagaagacctggaagctattaaaaaccccgacagcataaccaatcagatcgccttgctggaagcccgctgccacgagatgaaaccgaatttaggggccatcgcagagtacaagaagaaggaagagctgtacctccaaagagtggcagagctggacaagattacttacgaacgtgatagcttcaggcaggcatacgaggacctgagaaagcagcggctgaacgaattcatggctgggttctatattatcaccaataaattaaaggagaactaccagatgttgaccctgggaggggacgcggagcttgagttagtggatagtcttgatcccttctccgaaggaatcatgttcagcgtgaggcctccgaagaaaagttggaaaaaaatctttaacctaagcgggggggaaaagaccctatcaagcctagcccttgtctttgctctgcaccattacaagcctacacccctgtattttatggatgaaatcgacgctgcgctcgactttaagaacgtttctattgttgctttctatatttatgaacaaactaagaacgctcagtttatcattattagccttcgcaacaatatgtttgagatttctgataggctaattggcatatacaagacatacaatattacaaaaagtgttgcagtcaaccccaaagagatagctagcaagggcctgtgctag

SEQ ID NO: 26285 - DNA, 267 bp, synthetic construct
  source 1..267: mol_type = other DNA; note = Synthetic coding sequence
atgcccgaggaccaggtgggcaagctggaggccaccgagaacaccatctcagccatggcagcagcagctgcagagcagcagcaattctaccttctgctcgggaacctgcttagccccgacaatgttgtgagaaaacaggccgaagagacatatgagaatataccaggccagtccaagatcacctttctcctccaggccattaggaacaccaccgctgcagaagaggccaggcagatggccgccgtgttgctccggaggctgctttag

SEQ ID NO: 26286 - DNA, 3627 bp, synthetic construct
  source 1..3627: mol_type = other DNA; note = Synthetic coding sequence
atggacagcctgcccgacgagttcttcgtgcggcaccccgccgtggaggatcagagaaaggaagaaaccgaaaataaactcgagaagtcttctggtcagctgaataaacaggaaaacgatatacccaccgacctagtccccgtgaacctgctcctggaggtcaaaaagcttttgaacgcaataaacaccttacctaagggtgtggtacctcatattaaaaagttcctgcaagaagatttcagcttccagaccatgcagagagaagtggctgcaaacagtcaaaatggggaagagattgtgcctgcgcttactttacggttccttatcacgcaactggaagctgctcttaggaatattcaggccgggaattataccgcccaccagattaatatagggtattacctcacactgcttttcctttatggagtagcactgacagagcggggaaagaaggaggattacacagaggctgagaacaagtttctggtaatgaaaatgatgatacaggagaatgaaatttgcgaaaatttcatgagcctagtatacttcggacgtggactcttgagatgtgcgcagaaacggtacaacggcggactcctggaattccacaaatcattgcaagagataggcgacaaaaacgatcactggtttgacatcgaccctactgaggatgaggatctacctactacctttaaggatctcctgaacaactttattaagacgacggagtccaacattatgaagcagaccatctgctcatatctcgactgtgagcgatcctgcgaagccgacattttaaaaaacacatcttataagggctttttccagttgatgtgcagcaaatcctgttgtgtctactttcacaaaatatgttggaagaagttcaagaatttaaagtaccctggcgagaacgaccaatccttttctggcaagaagtgcctgaaggaggggtgcacgggcgacatggtccgcatgctgcagtgtgacgttcccggtattgtgaaaattctcttcgaggtggttaggaaggatgaatatattacaatcgaaaatcttggtgcctcatatcgtaagcttatcagtttgaagatcaccgatacagatattcggccgaagattagtcttaaatttaatacaaaagatgaaatgcctatcttcaagctggattataactacttttatcacctcctgcatatcataatcatctctggaaccgacatcgtgagacaaatcttcgatgaggctatgccgcctcccttgcttaagaaagagctgttgatccataagaacgttctcgagtcatattataatcatctgtggaccaaccatccccttggcgggtcgtggcacttactctacccccctaacaaggagcttcctcaatctaagcagtttgacttgtgtctgcttctggccctgatcaaacacctgaacgtctttcctgctccaaaaaagggatggaacatggaaccaccgtccagtgatatctcgaagagtgccgatattctcaggctgtgcaaatatagagatatcttgttatcagaaattttgatgaacggcctgaccgaatcgcagtttaattcgatctggaagaaggtgagtgacattttgttgcggctgggcatgatgcaagaggatatcgacaaggtgaaagaaaacccaatcgagaacatttccttggactaccatcaattgtccgtttatctcggaatcccagtgcctgaaattatccagagaatgctgtcctgctaccagcagggcattgctttgcagtccataactgggtcccagcgaattgaaatcgaagagctgcagaacgaggaggaagaactaagcccccccctgatggagtataacatcaatgtcaaaagccaccctgagattcagtttgctgagataaacaaggacggtacttctatcccatccgaatccagtaccgaatctctgaaggacctccaggaggtgaagtctaagcagcggaaaaagaagaagacaaagaacaaaaagaataaggacagcaaggaggatcaagtgccttacgtggttgaaaaagaggagcagttacgtaaagagcaggcaaatccccattctgtgagcagactgatcaaggacgatgcgagtgatgtgcaggaagacagtgccatggaggataaattctacagtctggacgagcttcacatactcgatatgatcgaacaaggcagtgctggtaaagttaccaccgactacggcgagacggaaaaggagcgactcgcgcgccagcgccagctgtataaactgcactaccagtgcgaagacttcaagagacagttgcgtaccgtgacattcaggtggcaagagaatcagatgcaaataaagaagaaggataaaattatcgcatcactgaaccagcaggttgcgtttggcattaataaagtgagtaagctccaacgccagatacacgcgaaggacaacgagattaagaatcttaaggaacagctatccatgaaaaggtcacaatgggagatggaaaaacataatctagagagcactatgaaaacctacgtttcaaagctcaatgctgaaacttcccgggctttaaccgcggaggtttacttcctacagtgtaggagagatttcggacttttacatctggagcagactgaaaaagaatgtctaaatcagttagcacgcgtcactcatatggccgccagcaacttagaaagcctccagctcaaggcagctgtagattcctggaacgccatcgtagccgatgtgcgcaacaaaattgcctttttacggacccagtacaatgaacagatcaataaagtaaagcagggttttgctctatcaaccctgccccctgtgcaattgccaccgccccctccatcccccgagattctcatgcagcaattcctaggccggcccctagtgaaggaatctttcttcaggccaatcctgacggtgcctcaaatgcccgcggtgtgccccggagtggtttccgccacgggtcaacctcgcgcccctctgatgaccgggatcgcctgggcccttccagcccctgttggcgacgcggtccctcccagtgccggactgcgatcagacccatctattatgaactgggaacggattactgatcggctgaagaccgcattcccccagcagacaagaaaagagcttaccgattttctgagaaagctgaaagacgcatatgggaaaagtctctctgaactgaccttcgatgaaatcgtttgtaagataagccagtttatcgacccgaaaaaaagccagtcacaggggaagagcgtcagcaacgtcaactgcgtatcgccctcacatagtcccagccagccagacgccgcccagcctcctaagcccgcgtggcgacctctgactagtcagggacccgctacctgggagggcgcctctaaccccgatgaagaggaggaagaggaggaaccttgcgtcatctgtcacgagaatttgtctcctgagaatctctctgtgttgccttgcgctcacaaattccatgcccagtgcatcagaccatggctgatgcagcagggaacatgcccgacgtgccgactgcatgtactcttgccagaggaattccctggacatccctcgcgacagctgcccaagatttag

SEQ ID NO: 26287 - DNA, 1743 bp, synthetic construct
  source 1..1743: mol_type = other DNA; note = Synthetic coding sequence
atggtgctggtgggcacccaggacgccatcagcgccgccaaccccagagtgatcgacgacagcagggcgcgcaaactctcaactgatttgaagcgctgtacttattatgagacatgtgcgacatatggcttgaatgtggagcgcgtatttcaggacgtcgcccagaaggttgtagcgctgcggaagaaacagcagcttgcaatcggaccctgtaaatctctgcctaactcacctagccactccgcggtgagtgccgcctccattcctgcagtccacattaatcaggccacaaatggcgggggctccgcgttttccgactacagtagctccgttcccagtactccctcaataagccaacgcgaacttagaatagaaactattgccgcttctagcacccccacaccaataagaaaacagtctaagcgccgcagtaacattttcaccagtcgaaagggggctgatctagatcgcgagaaaaaggccgcagagtgcaaggtggactcaatcggcagcggacgcgcaatcccgatcaaacaggggatcttgcttaagcggtcaggcaagtccctcaacaaggagtggaagaaaaaatacgtgacactgtgtgataacgggctgctgacctaccacccttccctgcacgattacatgcaaaacattcatgggaaggaaatagatctcctcaggaccacagttaaagtcccagggaagagacttccacgcgccacccccgccacggcgcccgggacttcccctcgagctaatggactgtccgtggaacgctcaaacactcaactgggaggaggaactgaagcagaagagtctttcgagttcgttgtggttagtctgaccggccaaacctggcactttgaggctagtaccgccgaagaacgagagctgtgggtccaatcggtgcaggcccagatattagcatccctgcaggggtgtagaagcgccaaagacaaaacaagacttggaaatcagaacgctgccctggccgtacaggcagtacgcaccgtgaggggtaatagcttctgcattgattgcgacgcgccaaatccggattgggccagcctgaacctgggcgcgctcatgtgcattgaatgctctggcatccaccgacacctgggcgcacatctgtcgcgagtgagatcactggatctagatgactggcccccggagcttcttgccgtaatgaccgccatgggtaacgctctggccaacagcgtttgggaaggcgcgcttggtgggtattccaagccaggcccagatgcatgccgagaggaaaaggagaggtggatccgcgcaaagtacgaacagaaactctttctggccccattaccttctagcgatgtaccattggggcagcagctgctgagggctgtggtcgaggatgacctgaggctcttagtgatgctgctggcacacggcagtaaggaggaggtgaatgagacctatggagatggcgatggccgcaccgcactccacctgtcctctgccatggccaacgtcgtgttcactcaactgctcatctggtatggcgtcgatgtgagatctagagacgctcggggcttgacgcccttggcctatgccaggcgcgccggatctcaagagtgtgccgatattcttattcagcatggctgccctggcgaaggctgtggcctcgcgccgacaccgaacagagagccggcgaatggtactaatcccagtgctgaactgcacaggtcgccaagccttctatag

SEQ ID NO: 26288 - DNA, 312 bp, synthetic construct
  source 1..312: mol_type = other DNA; note = Synthetic coding sequence
atggccgagctgatccagaagaagctgcagggcgaggtggagaagtaccagcagctgcagaaggatctctcaaaatcaatgagtggcaggcagaaattggaggcacagctcacggagaataacattgtaaaggaggaactcgccctcctggacggtagtaacgtcgtattcaaactccttggccctgtgctcgtcaaacaggaactcggagaagcacgggctaccgtcgggaagcgactggactatataactgctgagatcttcctcagaacaatacccgatccaggcgatgtccctgacagcttcttttag

SEQ ID NO: 26289 - DNA, 453 bp, synthetic construct
  source 1..453: mol_type = other DNA; note = Synthetic coding sequence
atgaccagccggaagaaggtgctgctgaaggtgatcatcctgggcgattctggcgtcgggaaaacttctttgatgaaccagtatgtcaacaagaaattcagtaatcagtataaagctacaatcggagcggattttttgaccaaggaagtcatggtcgacgacagacttgtgacaatgcaaatctgggatactgctggacaggagagattccaatcccttggcgttgccttttacaggggagccgactgttgtgtccttgtgtttgatgtaacagcaccaaataccttcaagacactcgatagctggcgcgacgagttcctgattcaggcttcccccagagaccctgaaaactttcctttcgtcgttctggggaacaaaatcgatttagagaataggcaagtcgcgacaaagcgggcacaggcatggtgctattccaagaacaatataccatag

SEQ ID NO: 26290 - DNA, 540 bp, synthetic construct
  source 1..540: mol_type = other DNA; note = Synthetic coding sequence
atgaccgacctggtggccgtgtgggacgtggccctgagcgacggcgtacacaagattgagtttgaacacggtacaacttcggggaaaagagtcgtgtacgtggatggcaaggaggaaattagaaaagaatggatgttcaaacttgtgggaaaagagaccttttatgttggtgccgcaaagaccaaggccactatcaatatagacgcgatctcagggttcgcctacgagtacaccctggagatcaacgggaagtccctcaagaaatatatggaggatcgttcaaagacgacgaacacatgggtccttcacatggatggagaaaactttcggatcgttcttgaaaaggatgccatggatgtatggtgcaacggcaagaagctggagactgcaggtgaattcgtcgatgatggcacagagacacatttttccattggcaaccatgactgctacataaaggccgtgagctcagggaaaaggaaagagggaattattcatacactcatagttgataatagggagattcctgagatcgcgagctag

SEQ ID NO: 26291 - DNA, 171 bp, synthetic construct
  source 1..171: mol_type = other DNA; note = Synthetic coding sequence
atggacagcagcatccacctgagcagcctgatcagccggcacgacgatgaagccacacggacgtccacttcagaaggcctggaggagggcgaggttgagggcgagaccctactgattgtggaaagcgaggatcaagcctccgtggatctgtcgcatgatcagtcaggatag

SEQ ID NO: 26292 - DNA, 153 bp, synthetic construct
  source 1..153: mol_type = other DNA; note = Synthetic coding sequence
atgtgcagcaccagcggctgcgacctggaggagatccccctggacgatgacgatctgaacaccatcgagttcaaaatccttgcctattacacgagacatcacgtgttcaaatctacacccgctctcttttctcctaaactcctcagaacatag

SEQ ID NO: 26293 - DNA, 1203 bp, synthetic construct
  source 1..1203: mol_type = other DNA; note = Synthetic coding sequence
atgaaccccgccagcgcccccccccccctgcccccccccggccagcaggttatccatgtcacccaggatctggacaccgacctggaggcgctattcaacagtgtcatgaacccaaagccctctagttggcgtaaaaaaatcctcccagagtctttcttcaaggagcccgatagtggatcccactctcgtcaatcctctacagactcttctggcggacaccccggaccgcgcctagctggtggagctcagcacgtgcggtcacacagttctcctgcttcccttcagctcggaaccggcgcgggagcggccggaagccccgcacagcagcacgcccatctgagacagcaatcttatgatgtcacagacgagctccccctgccccccgggtgggagatgactttcaccgccactgggcaaaggtattttttgaaccatatcgaaaagattactacatggcaggacccacgcaaggccatgaaccagcctctcaaccacatgaacctgcacccagcggtgtctagtactccagtcccgcagcggagcatggccgtgtcccaacctaatctggtgatgaaccatcaacatcagcagcagatggcccccagtaccctgagtcagcaaaaccaccccacccagaatccgccagccgggcttatgtcaatgcctaacgccctcaccacacagcagcagcagcaacagaagctccggctccagagaattcaaatggagcgggaacgcattcggatgcgtcaggaagaactgatgaggcaagaggctgcactgtgtagacagctgcccatggaggcagagactttggcacccgttcaggcagccgtcaatccacctacaatgacacccgacatgaggtctattacaaataattccagcgaccccttcctgaatggcgggccctatcatagccgcgagcagtctacagattccggtcttgggttagggtgctatagtgtccccaccaccccagaagattttctgtccaatgtggacgagatggacaccggcgaaaacgcagggcagaccccaatgaatattaatcctcagcagacacgattccccgatttccttgattgcctgcccgggacaaatgtcgacttgggcacactcgagtcagaagatctaataccgttattcaacgatgtagaaagcgctctgaataaatcagagccattcttgacctggctgtag

SEQ ID NO: 26294 - DNA, 513 bp, synthetic construct
  source 1..513: mol_type = other DNA; note = Synthetic coding sequence
atgccccggaagggcacccagcccagcaccgcccggcggcgggaggagggaccaccccccccttcacccgatggggcaagttctgatgctgaaccggagcctccaagcggaaggacggaatcccccgccacagcggcagagaccgcttcagaggagttagacaatcggtctctggaagaaattttaaattcaatcccccccccacctccgcctgcaatgactaatgaggccggagcacccagacttatgatcacacacattgtgaatcagaactttaagtcttatgctggagagaaaatcctcggcccctttcataagagatttagctgcatcattggccctaacggcagcggcaagtccaatgttatagattctatgttgttcgtgtttgggtatagagctcaaaagattaggtccaaaaagttgtcagtattgattcataattcagatgagcacaaggatattcagagttgtacggtggaggtgcatttccaaaaaataattgacaagtag

SEQ ID NO: 26295 - DNA, 504 bp, synthetic construct
  source 1..504: mol_type = other DNA; note = Synthetic coding sequence
atggagaaggccgtgaacgacggcagccacagcgaggagctgttctgccacctcaagactataagcgagaaagaagatttgcccaggtgcacttctgaatcccatctgtcatgcctgaagcaggacatcttgaacgaaaagactgagctagaagcaaccctgaaagaggctgagctggtcacacacagtgtggaactgttgctgcctttgttcaaggacacaattgaaaagattaactttgagaacgccaatctttcagccttaaacctgaagatttcggaacaaaaggaaattcttattaaggagctggacaccttcaaaagcgtgaagctagcactggaacacctactccgcaagcgagattacaagcagactggcgacaacctgagttccatgttactggagaacctgacggacaatgaatcagaaaatactaatttgaagaaaaaggttttcgagaaagaggcccacattcaagaattgtcttgccttttccagtcttag

SEQ ID NO: 26296 - DNA, 2376 bp, synthetic construct
  source 1..2376: mol_type = other DNA; note = Synthetic coding sequence
atgagcaaccagcaggagaagtacgaggcccagaacatcgtgaactcaacagaggaatccgacgatgccttcgacaccgtgacaattcccgttccttccgaggaaccccaggaaagcgaccagactgaggagcatgagtccggtatagaacagtttagcgagagtcatgccattcacgtggaggaacagagtgatcagagcttttcttctcttgaacctgacaacgaacagcttatggaagaagtcattagccctaggcaggtttcatatacaccacagcaccatgagaagcagtacgcaatgcagcgccccaatgacgacagcttagccttcttggataagatcaagagcgtgaaagaaagcctgcaggaatctgttgaagactccctggccacggtgaaagtggttctcatcccagtcggccaggagatcgtgatcccatttaaagtggataccattctcaagtatctgaaagaccacttctctcaccttttaggaattccgcatagtgtgcttcagatcagatacagcggcaaaattctcaagaacaatgagacattggttcagcatggtgtcaaacctcaagaaatagttcaagtggagatcttttccactaatcctgacctgtatcccgtgcgcaggattgatggtcttactgatgtgagccaaattattacagtaactgtacagactggactcgaccagtatcaacaagtgccagtggagatcgtgaagtccgattttcataagccattcctgggaggatttcgccataaagtgacaggagtggagtaccataatgccgggacgcagacagtccccaagagaattccggagcgcctgagcattttctgtcgagacacacagacggtattccagaaaaagaacctacaacagacaacgaatactaccagcacccagatgaccaatatcggtgtatatgtgagcaatatgacagacaaactggtcactcctggcaagtatttctcggcagcagaatatcacgcccagcgactgaaggcagtgatcgtcattcagacctactatcgccagtggcatgccaaaattttcgtggagaatttgcggaggcagaagtcccttcgtctagaatgggagacccagcaggagctccgcaagattagggagaaggaggagtggatcaagcttgattaccataggaggcataacccaaaaaccaacgaagactttgaatttctgtacaacgcgctcgaattttggagacaggaggagctcacaaggatcaaccagtcattcactggagccgagaggaaggctgctttatgtgaactgctagagaaggaaactcaaatcattgcctcaataggtcgacaccgatacattgcctacatggcaaaccaagaggcagccattcaggcatttctagataaatgctccgctcccaaaatctggcgcactcctaacggaaagacgatcgaaatggatacacagtttaccattcgcgcgcgcgaactccagaacatctacaagtgtatcatgctgaagaacatatcccaggatgaacgtctggacgttctcctgaccttaaaacacaccgtgaaggaacatgagtgtaaactgacccaggagattcttgaactgatcgatcgggaagtagatctgatgatgcggggcgtaaaacaccataacttggaaggattgcggaagaggatcgctacccttttttttcattatattaaaacgcctctttttaatccggaagtggcaaagtacctgaaagttcctcaggacccactcaagttctacaaaaagatctacttctgtcactcctgccaactttatctgccgagtaccgagttttctgttagcagcacctctcgacgcatttatcggtgtcggaattgcataaacctgcaaaatgaggcccagaagcgcgaatcctttctgaagtataaatgcctgctccaacagctctattataccgaagcagattatgaggacgactcaaagatcgccttcctgatgcagcttcaagacattcagtacctcactgagaacatctgggcatcccaatcggtgttgtccgcatgtgacaatctcagtgatttggtgatggtgcgatggaacaagtcgctggagtggtcaccatggaactgcatcttgctgacaaaggacgaagcagctgcccatctcaaactgacatccattgaagaaggctatgaacgttcatttatccataagataaaacacaagcacatattggccaagaactacttttctcaggtacccgttctggccagcttcatcctggacgacggggagatcgatgagatcaggtggaagtatcacagcgacacgaccccgaaaataatagagagtcagcgtccgccccattag

SEQ ID NO: 26297 - DNA, 687 bp, synthetic construct
  source 1..687: mol_type = other DNA; note = Synthetic coding sequence
atgaccgaccagacctactgcgaccggctggtgcaggacaccccctttcttactggccatgggaggttaagtgaacaacaggtcgacaggattatactgcagctcaatcgctactaccctcagatcctcacgaacaaagaggcagaaaaattcagaaatcccaaggcaagccttcgagtgaggctgtgtgaccttctcagtcatttgcagcggtccggcgagcgggactgccaggagttctaccgcgcgctgtacatccacgcccagccgttacacagtaggctcccttctcggcacgccttacgtaagttccatatcacaaatcacgcctgcttggtgctggccagaggaggccatccgtctctccctctcatggcttggatgtcatctatgactacacaggtttgctgcagcccagggctcgcgtcccccttggcgagcgcacccccccagagacctccaagcggacctgaaggcagagtgtggcaggctcaagcggttcagatgttggtgtctgtctcacactttttgcccctcccacccagcctctcccacgggagtttccatacagcttggggcattctgtacgtccattcatgcccgagcttttcaaacctcatcccacggggatccttacatgtatgcgtggattctaaccttgtgcctaccgccgcctggcgcagctag

SEQ ID NO: 26298 - DNA, 948 bp, synthetic construct
  source 1..948: mol_type = other DNA; note = Synthetic coding sequence
atgcccggcctgagctgccggttctaccagcacaagttccccgaggtggaggacgtcgtgatggtgaacgtgaggtccatcgctgagatgggcgcttacgtctcactgctggagtacaacaatatcgaaggaatgatcttgttgtccgagctatctcgccgacggattagatcaatcaataaactgatccgaatcggtcgtaacgagtgtgtcgtagttatccgggtagacaaggagaaaggctatatagatctgagcaagagacgcgtctcgcccgaggaagctataaagtgcgaagataagtttactaaatctaagaccgtgtacagtatacttcgacatgtggccgaagtgctggagtataccaaggacgaacagctcgagtctctctttcaacggaccgcctgggtctttgatgacaaatataagaggcccggctatggtgcatacgatgcttttaagcatgcggtgtcagatccttcaattctcgactccctcgacctgaatgaagacgaaagagaagttctgatcaataacatcaataggagattgacccctcaggctgtaaagatacgtgcagatatcgaagtggcatgctatggatatgagggtatcgatgcagttaaggaagctttgcgtgctggcctgaattgtagcacagagaacatgcccataaaaattaacctgattgcgccgccacggtacgtaatgacgaccaccactctggaacgaacagagggcctgagcgtgttatcacaggctatggccgtgatcaaggagaaaatcgaggagaagaggggcgtattcaacgttcagatggaaccaaaggttgtgactgataccgacgagaccgagcttgccaggcagatggaacgactcgaacgggaaaacgcagaagttgacggcgatgacgatgcagaagagatggaagccaaagccgaggattag

SEQ ID NO: 26299 - DNA, 1203 bp, synthetic construct
  source 1..1203: mol_type = other DNA; note = Synthetic coding sequence
atgaaccccgccagcgcccccccccccctgcccccccccggccagcaggtgatccatgtcactcaggacctggacacagatctcgaagcgttgtttaacagcgtcatgaacccaaagccctcctcctggcgcaagaaaatactacctgagtccttttttaaggagcccgacagtggaagccactcacggcagagctccacagattccagcggcggccaccccggcccgaggctggctggaggggcccaacatgtgaggagtcattcaagcccggcttcactgcagctaggcacgggcgctggcgccgcggggtctcccgcacagcaacacgctcacctccgccagcagtcctatgacgtgaccgacgaactaccccttcctcctgggtgggaaatgacatttaccgccactggccaaaggtactttctgaaccatatagagaaaatcaccacatggcaggatccaagaaaagcaatgaatcaaccactgaatcacatgaatctacaccctgccgtgtcctccacaccggttccgcagcggagtatggcagtcagtcagcctaacctcgtaatgaaccaccaacatcagcagcagatggccccctcaacgctgagccagcagaaccaccctacccagaatcctccagctgggctgatgtctatgcctaacgcactgactacccagcagcaacagcagcagaagctgcgcctccagcgcattcagatggaaagagaacggatccggatgaggcaggaagagctaatgagacaggaggccgccctctgccgccaacttcccatggaagcagaaaccctggctcccgtccaggcagcagtgaatcctcccaccatgactcctgacatgcgttcaatcactaacaacagttctgatcctttcttgaatggtggcccataccactcccgggaacagtccacagattccggcctgggcctgggctgctatagcgtcccgactaccccggaggatttcctgtcaaacgtagacgagatggacacaggagaaaatgctggccagacaccaatgaatataaatcctcagcaaacgcgatttccagatttcctcgactgcttgcccggcacaaatgtcgatctggggactctcgagagtgaggatcttattccactgttcaatgatgtggagagcgcacttaataaaagcgagccctttctcacttggctctag

SEQ ID NO: 26300 - DNA, 381 bp, synthetic construct
  source 1..381: mol_type = other DNA; note = Synthetic coding sequence
atggtgctgatcctgggccggcggctgaaccgggaggacctgggcgtcagggactccccagctaccaaacgcaaagtgttcgaaatggaccccaagagtctgactgggcacgaatttttcgattttagcagtggatctagccacgccgagaacattctgcagatctttaacgagttccgcgactcgcgtttgtttacagatgtcatcatctgcgttgaggggaaagaattcccctgtcaccgcgcagtgctctccgcttgctcgtcatacttccgagcaatgttctgcaacgaccacagggaatcccgagagatgctggtggagattaacggcatactggctgaggccatggaatgttttctgcaatacgtgtacacctag

SEQ ID NO: 26301 - DNA, 312 bp, synthetic construct
  source 1..312: mol_type = other DNA; note = Synthetic coding sequence
atggccgagctgatccagaagaagctgcagggcgaggtggagaagtaccaacagctgcagaaggacttgtcgaagtcaatgtcagggagacagaagctggaggctcaattaacagagaataatatagtcaaagaggagttggccctcctggacggatcaaacgtggtgtttaaattactgggccccgtgttagtgaagcaggaattgggcgaggcccgggctaccgtgggcaaacggttagattatattaccgcagaaattttcctgcgcactatcccagatccaggagatgtccctgactcttttttctag

SEQ ID NO: 26302 - DNA, 237 bp, synthetic construct
  source 1..237: mol_type = other DNA; note = Synthetic coding sequence
atggtgctgatcctgggccggcggctgaaccgggaggacctgggcgttagagacagccctgcaactaagagaaaggtgttcgagatggaccctaaaagtctgacaggccatgagtttttcgacttcagttccggctcatctcacgccgagaatattctgcagatttttaatgagtttagagatagccgtctgtttactgacgtgatcatttgtgtggagggtaaggagttcccatag

SEQ ID NO: 26303 - DNA, 1320 bp, synthetic construct
  source 1..1320: mol_type = other DNA; note = Synthetic coding sequence
atggccgccaacctgagccggaacggccccgccctgcaggaggcctatgtgcgggttgtgaccgagaaaagtccgacagactgggccctttttacctatgagggcaatagcaacgacatccgggtggccggcaccggcgaagggggtctggaggagatggtagaggaattgaattcgggcaaagttatgtacgcgttctgtcgtgtgaaggatccgaactcagggctgcctaagtttgtcctcattaattggacaggcgagggggttaacgacgtgcggaagggtgcctgtgcctcacacgtgagtaccatggcttcctttcttaagggggctcacgtgaccatcaacgccagggcagaagaggatgttgagccagagtgcatcatggagaaagtggctaaagctagtggcgctaactactcttttcataaggagtctggcagattccaagacgtggggcctcaggcacccgttggctctgtatatcaaaagacgaatgcggtaagtgagatcaagcgggtgggcaaagattccttctgggctaaagccgaaaaagaagaggagaacagacgccttgaggaaaaacgtcgcgccgaggaggcccagaggcagcttgaacaggaacgtcgcgagagggaactgcgtgaagcggcccgtagagagcaacgctaccaggagcagggtggagaagctagccctcagagtagaacttgggagcagcagcaggaggtagtgtcgcgtaaccggaatgaacagggttctacatgtgcaagtttgcaggagagcgctgtgcatccgcgggaaatatttaagcagaaagaaagggcaatgtcaactacaagcatttcctcaccacaacctggaaagctgcgctccccttttcttcaaaaacagttgacccaacctgaaacgcactttggtcgcgagccggccgccgctatttctcgcccacgtgcagacctgccagcagaggaacccgcccctagcacccccccatgcctggtacaagctgaagaggaagctgtgtatgaagaaccccccgaacaggagactttctacgaacagccacctcttgtgcagcagcagggcgccggctccgagcatatcgaccaccacattcaaggccaaggcctttccggtcagggcctgtgtgctcgcgccctgtacgattaccaagctgccgatgacactgaaattagtttcgacccagaaaatctcatcactggaattgaagtcattgatgaagggtggtggcgcggttatgggccggacgggcactttggcatgttccctgccaattatgttgaactcatcgaatag

SEQ ID NO: 26304 - DNA, 219 bp, synthetic construct
  source 1..219: mol_type = other DNA; note = Synthetic coding sequence
atgagctaccagcagcagcagtgcaagcagccctgccagcccccccctgtctgccccgcccccaagtgccccgagccgtgtcccccccccaagtgtccagagccctgtcccccttccaagtgcccacagagctgtccaccccaacagtgccagcaaaagtgcccgcccgtgacaccgtcgcctccgtgccagcctaagtgcccccccaaatccaaatag

SEQ ID NO: 26305 - DNA, 342 bp, synthetic construct
  source 1..342: mol_type = other DNA; note = Synthetic coding sequence
atgagcgccatccagaacctgcacagcttcgaccccttcgccgacgctagcaagggtgacgacctcttaccagcgggaacagaggactatatccacatccgtattcaacagcggaatggaagaaaaacactcacaacggtccagggtattgccgacgactacgataagaagaaacttgtcaaggccttcaagaaaaaattcgcctgcaacggcaccgtaatcgaacaccccgagtacggcgaagtgattcagcttcaaggggaccaacgcaaaaacatttgccagtttctcgtggagatcggcctggctaaggatgaccagttgaaagtccatgggttttag

SEQ ID NO: 26306 - DNA, 927 bp, synthetic construct
  source 1..927: mol_type = other DNA; note = Synthetic coding sequence
atggccagcagcaacaccgtgctgatgcggctggtggccagcgcctactcaatcgctcagaaggctgggatgatagttcgacgcgttatcgctgagggggacctgggaattgtagagaaaacctgcgccacagacctccagactaaggcagatcggctggcccagatgagcatatgcagtagccttgcccgtaaattccccaagttaaccataatcggagaagaagacctcccaagcgaggaagtggaccaggaactgattgaagactcccagtgggaggaaatcctgaagcagccatgtccatcacagtattcagcaattaaagaggaagatcttgtggtctgggttgatcctctcgatggtaccaaagagtataccgagggcctgcttgacaacgtcaccgtgctgattggtattgcctatgagggaaaggctatagccggcgtcatcaatcagccatattataattacgaggctgggccggacgccgtgttgggcagaaccatttggggagtactgggtctgggggctttcggattccagcttaaggaagtgcctgcagggaagcatatcattaccaccactcgctcccatagtaacaaactggtgacagactgcgtcgccgctatgaatccagacgcggtgctccgggtgggcggggcaggcaataaaattatacagctgattgaaggcaaagcttcagcttatgtgttcgccagcccaggatgcaagaagtgggatacatgtgcgcccgaggtcatcttgcatgcagtcggaggaaaactcactgacattcatgggaatgtgcttcagtaccataaagatgtaaagcacatgaattctgctggcgtgttggctacgctgagaaactatgactactacgccagtcgcgtgcccgaaagcatcaagaatgcccttgtgccttag

SEQ ID NO: 26307 - DNA, 1809 bp, synthetic construct
  source 1..1809: mol_type = other DNA; note = Synthetic coding sequence
atgatcgagaagatgcagggcagccggatggacgagcagcggtgcagctttcccccccctttgaaaacagaggaggattatataccctatccctcagtgcacgaggtgctcgggagagagggacccttccccctaattctgttaccccagtttgggggctattggatcgaggggacaaaccatgaaatcacttcaatcccagagaccgaaccgctgcagtctccaacgactaaagttaaacttgaatgtaatcccactgctagaatttacagaaaacactttctgggaaaagaacacttcaattattattcacttgacgccgctctgggtcacctagtgtttagcttaaagtacgatgtcatcggagaccaagagcacctgcgactcctgctgcgaacaaaatgccggacctatcacgatgtgataccgatctcatgcctaactgaatttcccaatgtggtccagatggctaagcttgtttgtgaggacgtcaatgtcgacaggttttacccagttttgtatccaaaggccagtaggctgatcgtgacttttgacgagcacgtcatcagtaacaacttcaagttcggcgtgatctatcagaagctgggacaaacttccgaagaagagctgtttagcacaaacgaagagtcgcctgctttcgttgagttcttagaatttttgggacagaaggttaaactccaggattttaaaggcttccggggcggcctagatgtgacgcacggccagaccggaacagagtccgtatactgtaatttcagaaacaaagagatcatgttccacgtcagcacgaagcttccctataccgaaggagacgcccagcaactgcagcggaagagacatataggcaacgatatcgtggccgttgtgtttcaggacgaaaacactcccttcgtcccagatatgattgcttccaacttcctgcacgcatacgtcgtagtccaggctgaggggggcgggcccgatggtcctctatacaaagtttccgtgactgcccgagatgacgttcccttttttggacctcctctgccagacccggctgtcttccgcaagggtcccgaattccaagagtttcttctgacaaaactgatcaatgccgaatatgcatgttataaagcagagaaattcgcaaagctggaggagaggacccgagccgctcttctggaaacgctgtacgaagaactgcatatccattcccagagtatgatgggccttggtggggatgaggataagatggaaaacgggagcgggggcggtggcttctttgaaagctttaagagggtgatacgctctcgctctcagtccatggatgcgatgggcctgagtaataagaaacctaacacagtcagcaccagccacagtggctcattcgctccgaataatcccgacctggcaaaagccgctgggattagcctgatcgtgcctggaaaatcgcccacgagaaagaagtccggtcccttcgggtcccgccgttcctccgccatcggcattgagaatatccaggaagtccaggagaagagagagtcgccgcctgctggtcagaaaacccctgacagtgggcatgtttcccaggaacccaagagtgaaaacagttctacacagagctcccctgagatgcccactacaaaaaaccgcgccgagactgccgcccagagagccgaggcactcaaagatttctcacgatcttccagctctgccagttcatttgcttctgtggtggaagagaccgaaggagtggacggggaagacacagggctacacgtggcagggggccaatgccagcatcattag

SEQ ID NO: 26308 - DNA, 177 bp, synthetic construct
  source 1..177: mol_type = other DNA; note = Synthetic coding sequence
atgggccgggtgtgggacctgcccggcgtgctgaaggtggagggctttcgggctacaatggcacaacggttggtgcgggtgctccagatatgcgctgggcatgtgcctggagtatcagcccttaacctgctgagcctgctcaggagctctgagggaccttctttggaggatttgtag

SEQ ID NO: 26309 - DNA, 2199 bp, synthetic construct
  source 1..2199: mol_type = other DNA; note = Synthetic coding sequence
atgctgccctgcgccgccggcgcccggggccggggcgccatggtggtactcagagcaggtaagaagaccttccttccgcctctgtgccgcgccttcgcgtgccggggctgccagctggccccagagcgaggggcagagaggagagataccgcaccatcaggggtgtccagattctgccctccacgaaagagctgccatgactggatcggccctcctgataagtacagtaacttgaggccagtccatttctacatccccgaaaatgagtcccctctcgaacagaaactgcgcaaactgaggcaggaaacccaagaatggaatcagcagttttgggcgaaccagaatctgacctttagcaaagagaaggaggagttcattcactcacgcctgaagaccaaggggcttgggcttcgtactgagtctggtcagaaagccaccttaaatgcagaggagatggctgatttttacaaggaatttttgtctaagaacttccagaaacacatgtattacaatcgaatgtacgataacatgtctacaatggtatatataaaagaagacaaacttgaaaaactgacacaagatgagatcatttctaaaacaaagcaggtgatccagggtctagaagctttgaagaatgaacacaactcaatacttcagtctctgttggagactctgaagtgcctgaaaaaggatgacgaatctaacctcgtcgaagagaagtccaacatgatccgcaagtcgttggagatgctcgagttaggactctcggaagcacaggtaatgatggccctttcgaaccatcttaacgccgtagaatccgaaaaacagaagctgcgagcccaggtgcgtcgactctgccaagagaaccaatggttgcgagacgaacttgccaatacgcaacagaagttgcagaaaagcgaacagagcgtagcccagctggaggaagagaaaaagcatttggagtttatgaaccagctaaagaagtatgacgacgatatcagcccttcagaggataaggataccgactctactaaggagccccttgatgacctgtttcctaacgatgaggacgatcccggacagggcatacagcagcaacacagctccgcagccgccgctgctcagcagggaggctatgaaattcccgcaagacttcggacgttgcacaaccttgttatccagtatgcaagccagggacgctatgaggtggcagtgcccctgtgtaagcaggcgttagaagacctcgagaaaacatcaggtcacgatcaccctgacgttgcgactatgttgaatatcctagccctggtgtaccgtgaccagaacaaatacaaggatgcggccaacctgctcaatgacgcgctggccattagggagaagaccctggggaaggaccatcctgccgttgccgccacacttaataatctggcagtcctctatggtaagcgcggaaagtacaaggaggctgagcctctgtgtaaaagggccctggagattcgcgaaaaggtgttagggaaggaccacccggatgtcgctaaacaattgaacaacctggccttattgtgccaaaatcagggcaagtacgaggaagtggagtactactaccaacgcgcactcgaaatttatcagaccaagttgggtcccgatgacccgaatgttgctaaaacaaagaacaatctagcatcatgttacctgaagcagggaaagtttaagcaggccgagacactttataaagaaattctgaccagagcccacgaaagggaattcggcagtgtggatgacgagaataaacctatctggatgcatgccgaagaacgggaagagtgtaaaggaaagcaaaaggacggaacaagctttggtgagtatggcggttggtacaaggcctgcaaagttgattcgcctacagtgaccactactctgaaaaatcttggcgctctatataggcgccagggaaagtttgaggctgccgagacacttgaagaggccgctatgagaagtcgcaagcaggggctcgataacgttcacaagcagagggttgctgaggtgctgaatgatcctgagaacatggagaagaggcggtctcgtgaaagtctgaacgtggatgtggttaagtacgagtctggacctgatggtggcgaggaggtcagcatgtccgttgagtggaacggcatgcgtaaaatgaagttgggcctcgtcaattag

SEQ ID NO: 26310 - DNA, 249 bp, synthetic construct
  source 1..249: mol_type = other DNA; note = Synthetic coding sequence
atgagcggcctggtgctgggccagcgggacgagcccgccggccaccgactgtcccaggaagagatccttgggtcaaccagacttgtgtcacagggccttgaagctctgcggagcgagcatcaggccgttcttcagagcctgagtcagaccatcgaatgcctccagcagggcggccatgaagagggtctggtgcatgagaaggcaaggcagctgcggcgtagcatggaaaatatcgagctcgggctgtag

SEQ ID NO: 26311 - DNA, 222 bp, synthetic construct
  source 1..222: mol_type = other DNA; note = Synthetic coding sequence
atggtgctgatcctgggccggcggctgaaccgggaggacctgggcgtcagagattctcccgcaacgaaaagaaaggtgttcgagatggatcccaagagtctgacaggacatgagttctttgatttctcctctgggtcctcacatgcagagaacattttgcagatcttcaatgagttcagagactcccgattattcaccgatgtgatcatatgtgtcgagtag

SEQ ID NO: 26312 - DNA, 1191 bp, synthetic construct
  source 1..1191: mol_type = other DNA; note = Synthetic coding sequence
atgaacttccaggccggcggcggccagagcccccagcagcagcagtcgctagccgctcctggcggcggaggagcagctgcacagcaacttgtgtgcggcgggcagttcggcggggctgggccgggcgcaggcgggggaggaggacccagccagcaactcgcgggcgggccccctcagcagttcgcattgtcaaattccgctgctatcagagctgagatacagcgatttgaatctgtgcatcctaatatatacgctatatacgacctcatcgaacggattgaggacctggccctgcaaaaccaaattcgggaacatgtgataagcatcgaggacagcttcgtgaacagccaggaatggacactatccagaagcgtacccgaactgaaagtcggcattgtcgggaacctctcctccggaaaaagcgcactggtgcataggtatctgacgggcacctatgtacaggaggagtctcctgagggggggagatttaagaaagagatcgttgtcgacggccagagttaccttttgctgattcgggacgagggcggaccccctgagctgcagtttgccgcatgggtcgacgcagtggtatttgtcttctcgctggaggatgaaatctccttccagaccgtttataactacttcctgagattgtgttctttcagaaacgccagtgaggtgcctatggtcctggttgggacccaggatgcaatttcagctgccaacccaagggtgatagacgactctcgggccaggaagcttagtaccgatctgaagcggtgcacatactatgaaacatgcgcaacctacggtctcaatgtggagcgggtcttccaagatgtggcccagaaagtggtggcacttcgtaagaagcaacagctggctattggcccctgcaagtctttgcccaactcacccagtcattccgcggtctccgctgcttccatccccgcagttcatattaatcaggctacgaatggcggcggtagcgctttcagcgactactcatccagcgttcctagtaccccatctatctcccaacgagagctcaggatcgagactatcgccgcaagctccacccctactcctatccgcaagcagtctaagaggcgctcaaatatctttaccatatgcgcaacggtcagtaacttctcttccacaaagcgaccctttcagctcctgccaaactag

SEQ ID NO: 26313 - DNA, 1110 bp, synthetic construct
  source 1..1110: mol_type = other DNA; note = Synthetic coding sequence
atggacagctgcctgatggtgtggcacatgaagccccagagccgggcctaccggtttactgggcacaaggatgctgtgacttgcgtgaatttttctccaagcggtcacttgctggcatcaggatcacgagataaaacggttagaatctgggtgcccaacgtgaaaggtgagtctaccgtgtttcgggctcacacagccacggtgcgttcagtgcacttttgttccgacggccagagctttgtcacggcctcagacgataagacggttaaggtgtgggcaacgcaccggcagaagtttctcttttccctcagccagcatatcaactgggtaaggtgcgctaaatttagcccagatgggaggctgattgtcagcgctagcgatgataagacagtcaagctgtgggacaaatcttcgcgggagtgtgtgcacagttactgcgaacacggtggctttgtcacctatgtcgactttcacccgtccgggacatgtatcgcagctgctggaatggacaatactgtgaaagtttgggacgttagaacgcacaggctgctgcagcattatcagctgcactctgcggcggtgaatggcctcagtttccatccatccggcaactatcttatcaccgcgtcctcagatagcactctcaaaatccttgatttgatggaaggccggctcctctacactctgcacggccatcagggacccgccaccactgtggccttctcaaggaccggcgagtacttcgctagcggcggaagtgacgaacaagtcatggtatggaaatcaaactttgatatcgtggaccatggagaggttaccaaggtgcccaggccaccagctacacttgcaagcagtatggggaacctccccgaagtggattttcccgtaccacctggcagaggcagatccgtggaaagcgtgcagtcccaaccgcaagaaccggtgagcgtcccccaaaccctcacgagcacattggagcacatagtgggtcagcttgatgtccttactcagacggtgtccatcctcgagcagcggctgacactgaccgaggacaagttaaagcagtgtctggagaatcaacaacttatcatgcagcgggcgaccccctag

SEQ ID NO: 26314 - DNA, 312 bp, synthetic construct
  source 1..312: mol_type = other DNA; note = Synthetic coding sequence
atggccgagctgatccagaagaagctgcagggcgaggtggagaagtatcagcagcttcaaaaggacctgtcaaagagcatgtctggccgtcagaagctggaggcccaactgacggaaaataacatcgtgaaagaggagttggccctgctagacggttctaacgttgtttttaagctgctgggccccgtgctggtcaagcaagagcttggagaagctagggccacagtcggcaaaagattggattatattaccgccgaaatcttcctgcgaaccattcccgaccctggcgacgtgcctgattcttttttttag

SEQ ID NO: 26315 - DNA, 270 bp, synthetic construct
  source 1..270: mol_type = other DNA; note = Synthetic coding sequence
atgagcgagcagggcgacctgaaccaggccatcgccgaggagggcggaacagagcaggagactgcaaccccagagaacggcattgtcaagagcgaaagcttggacgaggaagaaaaactcgagctgcagcgccgtcttgaagcccaaaatcaggagagacggaagagcaagagcggtgccgggaagggaaagttgacacgttctctggcagtatgtgaagagtccagtgcccgcccaggtggcgagtcactgcaggatcagacattatag

SEQ ID NO: 26316 - DNA, 1140 bp, synthetic construct
  source 1..1140: mol_type = other DNA; note = Synthetic coding sequence
atgtggcacctggacttcggcctgcacaccggcaagaccttccagccactaccattcattatcgtggtgtatcctggcgcaggaaggagatggggtctcgtgttatccctggcgtcgcacaggagacgaaccgaggccggcggaggtacagggccaacaagcgatactggttgggggtgcatgctgaggtgcgggcaaatgattttcgcccaggcccttgtgtgtcgccacctgggaagggattggcggtggacccagagaaagcgccaacccgacagttattttagcgtgttgaacgcatttatcgaccgaaaagatagttattactcaattcatcagatagcacagatgggagtgggcgagggcaagtccatcggccagtggtacggccctaacacggtggctcaagtgttgaagaaactggcagtgttcgacacttggtctagtctggcagtgcatattgctatggacaatacggtagtgatggaagaaattcgcagattatgtaggacatccgtcccctgcgcgggagctaccgcttttcccgccgattctgacagacactgcaacggatttcccgccggtgcagaggtaacgaaccgccccagcccgtggcgaccattggtgctcctgatacccttgaggttgggtcttaccgatatcaatgaggcctatgtcgagactctgaaacactgtttcatgatgccccagtcccttggagtgattggaggaaagccaaattcagcgcactatttcataggctacgtgggagaggaactaatatacctcgacccccatacaacacaacctgctgtggagcctaccgatggatgtttcattcccgatgaaagctttcactgtcagcaccccccatgccgcatgtccatcgctgagttagaccccagtatcgctgtgggcttcttctgcaaaaccgaggacgacttcaacgactggtgccagcaggtgaaaaaactcagcctccttgggggggctctcccaatgttcgaactggtggaactgcagcctagtcatctggcctgcccagacgtgctgaatctgagtcttgactcctctgacgttgagcggctggagaggttcttcgactccgaagacgaggacttcgagatcttgagcctgtag

SEQ ID NO: 26317 - DNA, 1683 bp, synthetic construct
  source 1..1683: mol_type = other DNA; note = Synthetic coding sequence
atgagcgagcacagccggaacagcgaccaggaggagctgctggacgaagaaatcaacgaggacgagatcctagccaacctgagtgccgaggaactgaaggaactgcaaagtgagatggaggtcatggcaccggatccctccttacctgtggggatgatccagaaagaccaaaccgacaagcccccaacaggaaactttaaccacaagtcacttgtggattacatgtattgggagaaagcctccagaagaatgctggaggaagaaagggtcccggtcacttttgtgaaatcagaggaaaagacgcaggaagaacatgaagaaatagagaaacgaaacaagaatatggctcagtacttgaaggaaaaattaaataacgagattgtcgccaacaagcgcgaatcaaaaggaagctctaacattcaggaaaccgatgaggaggatgaggaggaagaggacgatgacgatgacgatgaaggagaggatgacggcgaggagtcagaagagacaaacagggaagaggaggggaaagcaaaggaacaaattcggaactgtgaaaataattgtcagcaggtaactgacaaggcctttaaagaacagcgggatagaccggaagcacaggagcaaagcgaaaaaaaaataagcaagctcgatccaaaaaaactggccctagatacgtccttcttgaaggtgtcaaccagacccagcggtaatcaaactgacctcgacggatctttgcgcagagtgcggaagaatgatcccgacatgaaggaactgaatctgaacaacatcgaaaatatccccaaagaaatgttattagattttgtcaatgccatgaagaaaaacaaacatatcaagacattctctttggctaatgtgggcgccgacgaaaatgtggctttcgccctcgcgaacatgctgcgcgaaaatcggagtatcaccacactcaacatcgagtccaacttcatcacgggcaaaggaatcgttgccatcatgagatgtctacagttcaatgaaacccttaccgagctgaggtttcataaccaaaggcatatgttgggacaccatgctgagatggagatagctcgactcctgaaggctaacaacactcttctgaagatgggctatcattttgagctgccagggcctcggatggtggtcacaaacctcctcacaagaaaccaggataagcaacgacagaaaagacaggaagagcagaagcagcagcaactgaaggagcagaagaagttgatcgcaatgttggagaacggcctaggtctccccccagggatgtgggaattattgggtgggcctaaacctgattcgcgaatgcaggagttcttccagccccctcctccccgcccccccaatccccagaatgttcctttcagccaacgcagcgagatgatgaagaagccctcacaagccccaaagtaccgaaccgatccggattccttccgcgtcgttaagctcaagagaatccagcgaaagagccgaatgcccgaggctagggaaccccccgagaaaaccaacctcaaggatgtcattaaaaccctgaagcccgttccacgaaaccgaccacccccgcttgtggaaatcactcctcgcgatcagttgctgaatgacattagacattcctccgtcgcctatctgaaacctgtgcagttacctaaagagttggcgtag

SEQ ID NO: 26318 - DNA, 330 bp, synthetic construct
  source 1..330: mol_type = other DNA; note = Synthetic coding sequence
atgaaccccgccagcgcccccccccccctgcccccccccggccagcaagtgatacatgtgacccaggatcttgacaccgacctcgaagctttattcaatagcgtcatgaaccccaagccctccagctggcgtaagaaaattttacctgagtctttctttaaggagccagattcaggatcccattctcgccagtcaagtaccgactcttctggagggcaccccgggccgcgcctggctggaggggcccagcacgtgcgatctcattcatcccccgcttccctgcagctgggcactggtgccggagccgccggctcgccagctcagcagtag

SEQ ID NO: 26319 - DNA, 609 bp, synthetic construct
  source 1..609: mol_type = other DNA; note = Synthetic coding sequence
atgggcagccggaagaaggagatcgccctgcaggtgaacatcagcacacaagagctgtgggaggagatgctctccagtaaaggactcactgtggtggatgtgtaccagggatggtgtggcccttgtaaacccgtggtcagtctatttcagaaaatgcggatcgaagtcggattggacttgctccattttgccctggccgaagccgacagattggacgtgctggaaaaataccgtgggaaatgtgaacccacttttctcttctatgctggcggtgagttagttgcggtcgtccggggcgctaatgcccctctcctgcagaaaactatcttagaccaactcgaggcagagaagaaggtgctggccgaaggcagggagagaaaagtcataaaagatgaggcactgtccgatgaagacgagtgtgtgtcccatggcaagaacaacggcgaagacgaagacatggtgtcttccgaacggacctgtactttggctatcatcaaaccagacgccgtggcgcatggcaagaccgacgagatcatcatgaagatccaagaagctggcttcgagattctgacgaatgaagaacggacaatgacagaagctgaagtgtag

SEQ ID NO: 26320 - DNA, 195 bp, synthetic construct
  source 1..195: mol_type = other DNA; note = Synthetic coding sequence
atggccccccagaaggaccggaagcccaagcggagcacctggcggttcaatcttgatctcacgcatcccgtcgaggatgggattttcgattctgggaatttcggaacgttcccttccgaatacttggggttctcaagcctggtcctgcattttttttgtttcaaaattggagcaattagcaccggtgagggctag

SEQ ID NO: 26321 - DNA, 372 bp, synthetic construct
  source 1..372: mol_type = other DNA; note = Synthetic coding sequence
atggagaacctgcagaccaacttcagcctggtgcagggcagcaccaaaaaactgaatggcatgggagacgatggatctccccccgctaagaaaatgatcacggatatccacgccaatgggaagacaatcaacaaggtacctacggtcaaaaaggagcacctggatgactacggagaggccccggtcgagacagatggagagcacgtcaagcggacctgtaccagcgtcccagaaacgttacatctgaacccttccctgaagcatacactagcgcagtttcatctgtccagtcagagtagtctcggtggcccagcagctttctccgcccgccactcgcaggagtccatgtcgccaacggtgttcctcccctag

SEQ ID NO: 26322 - DNA, 201 bp, synthetic construct
  source 1..201: mol_type = other DNA; note = Synthetic coding sequence
atgaaccccagcatgaagcagaagcaggaggagatcaaggagaacattaagaacagcagtgttccccgccgcactctgaaaatgatacaacctagtgccagtgggtctctggttggtcgggagaacgagcttagcgccggcctgtcgaagcggaagcaccggaatgaccaccttactagcaccacgtccagccccggctag

SEQ ID NO: 26323 - DNA, 1614 bp, synthetic construct
  source 1..1614: mol_type = other DNA; note = Synthetic coding sequence
atggtgctgatcctgggccggcggctgaaccgggaggacctgggcgtccgcgactctccagctaccaagcgaaaggtgttcgaaatggatccaaaaagcctcacagggcacgagttctttgatttttcttctggctcttctcacgcggagaatatcctgcagatcttcaacgagtttcgtgattctcgcctgttcacggatgttattatttgcgtggagggtaaggaattcccctgccatcgagctgtgctttcagcctgttctagctatttccgcgccatgttttgtaatgatcacagagagagtcgcgagatgcttgtcgagattaacggaattctggccgaagcaatggaatgcttcctgcagtatgtttacaccggaaaagtcaaaataaccacagagaacgtgcagtacctttttgaaacatctagcttatttcagatttctgtactacgagatgcctgcgccaagttcctcgaggagcagctggatccttgtaactgccttggaatccagagatttgccgacacccacagcctgaaaactctttttaccaaatgtaagaacttcgcgctccaaacctttgaggatgtgagtcagcatgaagagtttctggaattggacaaagacgagctaatagactacatatgcagcgacgagctcgtgataggcaaagaggagatggtttttgaagccgttatgagatgggtgtaccgtgcagtggatctgagaagaccactgcttcatgaactactgacgcacgttagactcccgctcctccatcctaattattttgtgcagaccgtggaagtggatcaattaatacaaaacagccctgagtgctaccagctgttacacgaagccaggcggtaccatattcttgggaatgaaatgatgagcccgaggactagacccagacggtccactggctattccgaagtgattgttgtagtcggcggatgtgagagggtcggtggcttcaaccttccttacacggagtgttacgaccccgtaaccggtgagtggaagtccttggcaaagctgcctgaattcaccaaatccgagtacgctgtatgtgcactgaggaatgatattctggtcagtgggggaaggattaattctcgtgacgtctggatctacaattctcagttaaatatctggattagagtggcatccctgaacaagggccgctggcgacataagatggcagtcttgctggggaaggtgtatgttgtgggggggtatgacggacagaatagattgagctcagtcgagtgctatgattccttctccaatcgctggaccgaagtggctccgttaaaggaggctgtgagttctcccgccgtgacctcctgtgtgggaaagctgtttgtgatcggaggcggccccgatgataacacctgtagtgacaaggtgcagagctacgatccagagacaaactcttggcttctccgcgctgccattccgatcgcaaagcgctgcataaccgctgtctcactgaacaacctcatctatgtcgctggcggactcaccaaagctatttactgttatgatcctgtggaggattattggatgcacgtccagaacacctttagtcgacaggtaattacatag

SEQ ID NO: 26324 - DNA, 1611 bp, synthetic construct
  source 1..1611: mol_type = other DNA; note = Synthetic coding sequence
atgcggctggaggagctgaagcggctgcagaaccccctggagcaggttaatgatggaaagtatagcttcgaaaacatccagcgcgcctggcgcgaatacctgcaaaggcaagaaccactgggcaagcgatccccgagtccaccctctgtcagcagtgagaaactgagcagctccgtgagcatgaacaccttttctgattcgagcacaccagactatcgagaggatggcatggatctgggcagtgacgccggctcatcctcctcaagctctcgcgccagcagccagagcaacagcacaaaggtcaccccttgttcagagtgtaaatcttcctctagccctggcgggtctctcgatttagtctcggctctggaggattacgaggaaccttttcctgtttaccagaagaaagtgatcgacgagtgggcacctgaggaagatggcgaggaggaagaggaggaggatgagcgggaccaaaggggatatcgcgacgaccgcagccctgccagggagcctggggacgtctccgctcgcaccagatcaggcggtggcggtggtagatctgctaccaccgcaatgccacccccagtgcctaatggaaacctgcaccaacacgatcctcaggatctccgtcacaacggtaacgtcgtagtggcgggcaggccatcatgctcacgcgggcctaggagagctattcagaaaccacagcccgcgggaggcaggaggtccggcagaggaccggccgccgggggactatgcctgcaaccccccgatggcgggacctgtgtgcccgaggagccccccgttcctcctatggattgggaagccctggagaagcatctcgcaggtttacagtttcgcgagcaagaggtcaggaaccaggggcaggctcgcacaaatagcactagcgcacaaaaaaacgaacgggaaagtatcaggcagaagctggctctgggttccttttttgatgacggcccagggatctatacaagttgcagtaagtctggtaagccctcgctgtcatcaaggctgcaatcaggcatgaatctgcagatttgttttgttaatgactctgggtcggacaaggattcggatgccgacgatagcaaaaccgaaaccagcctcgatactcctctatcccccatgtcgaaacagtcaagctcctactctgatcgagacaccacagaagaggaatccgaatcactggacgacatggattttctgacccggcaaaagaaattgcaagccgaagcaaagatggcactggccatggccaaaccgatggccaagatgcaggtggaggtggagaagcagaataggaaaaagagtccagttgcagatcttctgccgcacatgccacatatctctgagtgcctgatgaagcgatccctgaagcctacggatttaagggatatgacgattggacagctccaggtaatcgtcaacgatttgcactcacagatcgaatccctcaatgaggaactggtgcagttgctgctaattcgggacgaactgcataccgagcaggacgcaatgctcgtggacatcgaagatcttacccggcatgcggagtcacagcagaagcatatggctgagaagatgccagcaaaatag

SEQ ID NO: 26325 - DNA, 630 bp, synthetic construct
  source 1..630: mol_type = other DNA; note = Synthetic coding sequence
atgagcgagaacgccgcccccggcctgatcagcgagctgaagctggccgtgccctgggggcacattgctgctaaggcatggggatctcttcagggcccacctgtgttatgtctgcacgggtggttggataacgctagctctttcgacaggttgatcccactgctcccacaggacttttactacgtggccatggactttggcggccacggccttagctcccattacagcccaggcgtgccttattacctccagacattcgtctcagagattagacgcgttgttgccgctctgaaatggaataggttttccatcttaggacattctttcggaggcgttgtcggcgggatgtttttttgcacttttcctgagatggttgacaaactgatcctgctggacacacccttgttcctcctggaaagtgacgagatggaaaatcttctgacatataagaggcgcgccatcgagcacgtacttcaagtagaggctagtcaagagccctcacacgtgttcagcctgaagcagctgctgcagcgactattgaaatcaaattcccacttgagcgaggagtgtggagaattgctcctacaacggggcaccactaaagtcgcaacaggccgggaacagcactag

SEQ ID NO: 26326 - DNA, 201 bp, synthetic construct
  source 1..201: mol_type = other DNA; note = Synthetic coding sequence
atgcccgaggaccaggtgggcaagctggaggccaccgagaacaccattagtgcaatggcagctgccgctgcagaacaacagcagttttacttgcttctcggcaatctgctttcccctgataatgttgtaaggaagcaggcagaggaaacttacgagaacatccccggacagtccaaaatcactttcctccttcaagcctag

SEQ ID NO: 26327 - DNA, 2061 bp, synthetic construct
  source 1..2061: mol_type = other DNA; note = Synthetic coding sequence
atggccatcagccagcaccagttctacctggaccggaagcagagcaaagcaaagattcctagtgccagatcactggatgagatcgccatggacctcacagagacaggaacacaacgagcctccaaactggtcacattggagaccaagagccagtttattatggcgtctaacggatcgttgatatcgagcggtagtcaagacagcgaagtatccgaagagcagaaaagggagaagattcttgaactaaagaaaaaagagaagctgctgcaggagaaattgctcaagaaggtggaggagctgaagaagatttgccttcgcgaagctgagctcacaggcaagatgccaaaagagtaccctctcaatataggcgaaaaaccaccccaggtgcggcgacgggtgggaaccgcgtttaagttggacgataatctgctcccctcagaagaggatccagccctacaggaactggaatctaattttctgatacagcagaagttggtggaggcagctaagaagctggccaacgaaccagacctctgcaagactgtgaagaagaaaaggaaacaagactacacagatgcgatgaaaaagctgcaagagattgagaacgcaattaacgagtacaggattcgttgcggcaaaaagcccagccagaaggctactgtgcttcccgaggacatcatcccctctgagagcagtagtctatccgataccaccacatacgatgacccgtctgacgccttcacattcccaggacagaggagctctagcgttcctcattcacctcgaatactgcctcctaagtccctgggcatcgaaagaattcattttaggaaatcctccatcaatgaacagttcgtagatacccgtcagtctcgggaaatgctgtctacccactcgtctccatataagaccctcgagagacgaccacagggaggcaggtcaatgccgaccaccccagtcttaactagaaacgcatactcctcctcccatctcgaacctgaatctagcagtcagcattgtcgccagaggtcagggagcctcgagtctcaatctcacctgttgtccgaaatggatagcgataaaccctttttttctctttcaaaatcacaacgctctagctcgaccgaaattctggacgatggatcaagttatacctcccagtcatcaacagagtattattgtgtgacacccgtaacgggtccttattacacaacccagacactggacacccgcacacggggacgacggcggtcaaagaagcagaacgtgtctacgagcaacagcggaagcatgccaaatctggcacagaaggactctctgcgcaatggtgtctatagcaagtctcaagaaccaccaagcagttcctactacattgctggttacactccatacgcagagtgcgacttttattacagtggcggttacgtttacgaaaacgatactgagggccaatattccgtgaacccaagctaccgcagcagtgctcattacggctatgaacggcagagggattactccagaagtttccacgaggacgaagttgacagagtgccacataatccctacgctaccctccgactccctcgcaaggcggccgctaaatcagagcatatcacaaagaacattcacaaggctctggtggccgagcatctaagagggtggtatcagcgagcgtcagggcagaaagatcagggccactctccgcaaacgtcgtttgactccgacagaggcagccagcggtgcctgggctttgccggactccaagtgccttgtagcccctcctcccgggcatcctcatacagcagcgtgtcttctactaacgcgagcggaaattggcggacccagctgaccattgggctgagcgactatgagacacccgcccactcctcctacacttcatgctatgggaatgtgtacaatccattgccaagtccttcgagacagtacaccgagatttcacagctggacgggactgatggaaaccagttggaggataacctagagtctagcgagcagcgactgttttggcacgaggactctaaaccagggacactggtgtag

SEQ ID NO: 26328 - DNA, 219 bp, synthetic construct
  source 1..219: mol_type = other DNA; note = Synthetic coding sequence
atgatggaggagatcagcatcatggtggcctacgacgcccacgtgttctcccagttgcacgacgaggacttcctgaccagcctggtggccattagcaagcctaggtcaatggtgccaacaaagaagctcaagaagtatgagaaagagtaccagaccatgcgggaatcccagttgcaacaagaggaccccatggatcgctacaaattcgtttatctttag

SEQ ID NO: 26329 - DNA, 1965 bp, synthetic construct
  source 1..1965: mol_type = other DNA; note = Synthetic coding sequence
atggacagcctgcccgacgagttcttcgtgcggcaccccgccgtggaagatcagagaaaggaagagactgagaataaactggagaagagcagcgggcaattgaataaacaagagaacgatataccgactgacctggtccccgtgaatcttctcctggaagtgaaaaagttactgaacgccattaacaccttgccaaagggtgtcgtacctcatatcaagaagttcttgcaggaggactttagtttccagaccatgcagagggaggtggccgccaactctcaaaatggagaggagattgtgcctgccctcaccttgagattcctgatcacccaattagaagcagccctgcggaacatccaagccgggaactacactgcacaccagataaacatcggatattacctcaccttattgttcctgtacggggtcgcgctcacagagcggggaaagaaggaggattacacagaggctgagaacaaatttctggtcatgaaaatgatgattcaagagaacgaaatctgtgagaacttcatgagcttagtgtatttcggtcgggggttgttgcgatgtgctcagaaaagatacaacggaggattgctggaattccataagtccttgcaagagattggggacaagaatgaccactggttcgacatagaccccacggaagacgaggacctcccgacgacgtttaaagatttactgaataatttcattaaaacaactgagagcaacattatgaagcagacaatttgctcgtatcttgactgcgagaggagctgtgaggccgatatccttaagaatacttcctacaaggggttctttcagcttatgtgctcaaagtcgtgttgcgtctacttccataagatctgctggaagaagtttaagaatctgaagtaccccggtgaaaacgaccaaagttttagcggtaagaagtgccttaaggagggctgcaccggcgatatggttagaatgctccagtgtgacgtgcctggtatcgtcaagattttgtttgaggtagtccgtaaagatgagtacataacgattgagaacctgggcgctagctaccgtaagctgattagcctaaaaataaccgacacagacataagaccaaagataagcctgaagtttaatactaaggatgagatgcccatctttaagctggattataactatttctaccaccttctgcacatcatcattatctctggaacagacatcgtaagacagatcttcgacgaagcaatgccaccccctttgctgaagaaagagctgctgattcataaaaatgtcttggaaagctactacaaccatctgtggacaaaccatcctctgggggggtcttggcacctgctctaccctccaaacaaggagctgccgcaaagcaaacagttcgacttgtgcctcttacttgctcttatcaaacatctgaacgtctttcccgcacccaagaagggctggaacatggagcctcctagcagtgatatttcaaagtcagccgacattcttcgcctgtgtaaataccgtgacattctgttgtctgagatacttatgaatggactcaccgaatcccagtttaatagcatctggaaaaaggtgtccgacatcctgctccgcctggggatgatgcaggaggacatcgataaagtgaaagagaatccaattgagaatataagcttagactatcaccagttgagtgtctacctgggaatccccgttccagaaatcatacaacgaatgctgtcatgttaccaacagggcattgcccttcagtctatcactggaagccaacgcatcgagattgaagagctccagaatgaggaagaggagctgagtccacctctgatggagtataacataaatgtgaagtcccatcctgaaattcaattcgcggagatcaataaggatggtacatctatccctagtgagtccagcaccgagagcctgaaagacctgcaggagtag

SEQ ID NO: 26330 - DNA, 570 bp, synthetic construct
  source 1..570: mol_type = other DNA; note = Synthetic coding sequence
atgaaccccgccagcgcccccccccccctgcccccccccggccagcaggttatacatgtgacacaggacctagatacggatctggaggctctcttcaattcagttatgaaccccaagccaagtagttggcgaaaaaagattttaccagagagtttctttaaggagccagactccggtagccatagccgccaatcaagcacagattcttccggcggccatcccgggcctagacttgccggcggagctcagcacgttcgatcgcacagcagtcccgccagtctacagcttggtaccggagccggtgcggccggctcacccgctcaacaacacgctcacctgcggcaacaatcttacgacgtgaccgacgagctgcctctgcctcccgggtgggaaatgacctttactgccacaggccaaaggtacttcttgaatcacatcgaaaagatcaccacctggcaggatcctcggaaggccatgaaccaacctctgaaccacatgaacttacatcccgccgttagtagtacccctgttccccagaggagcatggccgtctctcagcccaatctgtag

SEQ ID NO: 26331 - DNA, 849 bp, synthetic construct
  source 1..849: mol_type = other DNA; note = Synthetic coding sequence
atgggccccctgccccggaccgtggagctgttctacgacgtgctgtccccatactcatggctcggttttgagatcctctgcaggtaccaaaacatctggaacattaacctgcagctccggccttctctcatcacagggataatgaaggactccggtaataagccgccaggtctccttccccgtaagggactttacatggccaatgacctcaagttgctgagacaccaccttcagatccccatccatttcccaaaagatttcttgtcggtgatgctggagaaggggagcctcagtgccatgcgattcctcacagccgtgaacctagagcatcccgagatgctggagaaggcttcaagagaactttggatgagagtttggtcacgtgtgagtgttggactttgggagagcagtggtcgcacactcgacgatttcctcactttcccccggcacgtgttcagggtgatgatacttcctccccctggcgggtccaccgtactccccgtgacccccctcagtccccatcgcctgcccgctgtgttcagctcctcccaaaacgaggatatcacagagccacagtcgatcctggctgccgcagagaaggcagggatgtcagcagagcaggcccagggactccttgaaaagatcgctacccccaaggttaaaaatcagctgaaagagacaacagaagcagcatgtcgctatggagcctttggcttgccaattaccgtggctcacgtggacggacaaacccatatgctgttcggtagcgaccggatggaacttttagctcatcttttgggagaaaaatggatgggcccaattccacctgcagtaaatgcccgactgtag

SEQ ID NO: 26332 - DNA, 1221 bp, synthetic construct
  source 1..1221: mol_type = other DNA; note = Synthetic coding sequence
atggaccagctggagaacgccaagatggagcacaccaacgccagcttcgacacttttttttgtgagacccgagccggaaagcatgtgccccgggcactgtttgtagacctagaacccacagtgatagatggaattcggacaggacagcatcgcagcctatttcacccagagcaattgctatctgggaaagaagacgctgcgaacaactacgctcgcgggagatatagcgtgggcagcgaggtaatagacctggtgctagaacgcacaagaaagctcgccgaacagtgtggcgggctccaggggtttcttatcttccgctcgtttgggggtggcaccggctccggcttcacttccctgctgatggagcgcttgacaggggaatactcacgaaaaacgaagcttgagttttctgtgtacccggctcctcgtattagcacggcggtagttgagccctacaactctgtgctgacgacccactccaccaccgagcacacagattgtacattcatggtggataatgaggccgtctatgatatctgccatcggaaactgggcgtggagtgtccttcgcacgcatccattaacagactcgtggtgcaggtcgtttcctctattacagcatctcttcggttcgagggccctctcaacgttgatcttatcgagtttcagaccaatttggtgccttacccaagaatccacttcccaatgactgcgtttgctccaatcgttagtgcagacaaggcataccacgaacagttctctgtaagcgacatcacgactgcttgtttcgagtctagtaatcagcttgtgaagtgcgatccccgcttaggcaaatatatggcctgctgccttttgtatagaggagacgtggtgcctaaagaagttaacgcagctatagcagccactaaaagccggcattctgtgcagttcgtcgactggtgtcccactgggttcaaagtcgggattaacaaccgccctccaactgtcatgcctgggggcgatctggccaaggtacacagaagcatttgtatgctttccaacactaccgccatcgtggaagcgtgggcccgacttgaccataagtttgacctgatgtacgccaagagagctttcttgcactggtatctacgggagggaatggaggaagccgagtttttggaagcacgcgaggatttagcggccctagaacgtgattacgaagaagttgctcagagcttctag

SEQ ID NO: 26333 - DNA, 1860 bp, synthetic construct
  source 1..1860: mol_type = other DNA; note = Synthetic coding sequence
atgagcggcctggtgctgggccagcgggacgagcccgccggccaccgcctgagccaggaagagattttaggcagcacacgcctcgtatcccagggcctggaagccctcaggagtgagcaccaggcagtgctgcagtccctctctcaaacgattgagtgccttcagcagggcggccacgaagaagggctggtgcacgaaaaagctcggcaattgaggcggtcaatggaaaatatcgagctgggcctttccgaggcccaggtgatgttggctctggcatcacacctgtccactgtggagtctgaaaagcagaaactgcgtgctcaggttcgtcggttgtgtcaggagaaccagtggctgagggacgagctggccggaacccagcagcggcttcagcgatcagaacaggccgtggcacaactagaagaggaaaaaaaacatctggagtttctgggccagctcaggcagtacgacgaggatgggcacacgagcgaggaaaaggagggcgatgccaccaaggactctctcgacgacctttttccaaacgaggaggaagaagatcccagcaacggattgtctcgggggcagggggcgactgctgcccagcaaggcgggtatgagatacctgctcgtctcagaacacttcacaacctggtaatccagtatgccgcccaagggaggtacgaggtggccgtccccttgtgtaaacaggctttggaggatttggaaagaacatcagggcggggtcatcccgacgttgccacaatgctgaacatcttagctcttgtatatagagaccagaacaaatacaaggaagcagcccacctgctcaatgacgccctgtctatacgcgagtcaacactggggccagaccaccctgcagtggcagctactttgaataatctggctgtcctgtatggtaagcggggcaaatataaggaagccgagcctttgtgtcaaagggctcttgagattcgggagaaggttctcggtacaaaccatccagacgtggctaaacaactgaataacctcgccctgctgtgtcagaaccagggcaagtatgaagcggttgagaggtactaccagagagcgcttgctatctatgagggacagctgggccccgataaccctaatgtcgccagaactaagaacaacctcgcaagctgttatctgaagcaaggtaagtacgctgaagccgagacactgtacaaggaaatcctgactagggcccacgtacaggagtttgggagcgtcgatgacgaccacaaaccaatttggatgcacgcagaagaaagggaagaaatgagtaagagcagacatcacgaaggaggcactccctatgccgaatacggggggtggtacaaagcttgcaaagttagctcccctactgtgaacactaccttgcgcaacctcggagccctttatcggcggcagggcaagctcgaagctgccgaaaccctcgaggagtgcgcgcttagaagtcgcaggcagggaacagatcccatcagtcagactaaagtagctgagctgctgggggaatccgacggcaggagaacgagccaggaaggaccgggtgatagcgttaaattcgaggggggcgaagatgccagtgtggccgtggagtggagtggcgatggatccggcactctgcaacggtcagggagtcttggtaaaattagagatgtccttaggaggtcctcagagcttctcgtgcgcaagcttcaaggcaccgaaccccgcccatcttccagcaacatgaagagagccgctagtctgaactatttgaaccagccttctgccgcccctctccaggtctcaaggggcctgtccgcctccacgatggatctatcgagttctagttag

SEQ ID NO: 26334 - DNA, 294 bp, synthetic construct
  source 1..294: mol_type = other DNA; note = Synthetic coding sequence
atgggcaagagctgcaaggtggtggtgtgcggccaggccagcgtgggaaaaacttccatcctggaacagttgctttatggcaatcatgtagtgggctctgagatgatcgagacgcaagaagatatatatgtggggagcattgaaacggatcggggagtcagagagcagatagccgaatccctctttagtgtgtggagttgctctagacggagactgacgaatccccgcacaaggcgcaggtccccaagctggtccctggctacttccgtgacctatcgctcctcgggagtctag

SEQ ID NO: 26335 - DNA, 387 bp, synthetic construct
  source 1..387: mol_type = other DNA; note = Synthetic coding sequence
atgaccgacctggtggccgtgtgggacgtggccctgagcgacggcgtgcacaagattgagtttgagcacggcacaacgagcggaaaaagagttgtgtacgtcgatggtaaggaagaaattagaaaagagtggatgtttaaactcgtgggtaaggagaccttttatgttggagcagccaaaacaaaggccaccataaatattgatgctataagtggctttgcatacgaatacacattggagatcaacgggaaatccctgaagaaatacatggaggacaggtcgaagactactaacacctgggtcctgcatatggacggcgagaacttccgcatcgtactcgaaaaggacgcgatggacgtgtggtgtaatggcaaaaagctagagtag

SEQ ID NO: 26336 - DNA, 879 bp, synthetic construct
  source 1..879: mol_type = other DNA; note = Synthetic coding sequence
atgaccgtgagcaagttcatggccatccagaaggccctgcagcccgactggttccagtgtctgagtgatggggaggtgagttgtaaagaggcgacgtctataaaacgcgtgcggaaaagtgtcgatcgcagcctgctgtttctggataattgcctgcgtctgcaggaggaaagcgaggtgctgcaaaagagcgttatcattggagtcatcgaagggggcgatgtgatggaagaacgtttgcggtctgcccgcgaaactgcaaagcgacccgtgggaggcttcttattggacggcttccagggcaaccctacgacactggaggccaggctgagactcctgagctcagttaccgcagagctccccgaggacaagccacgcctgatcagtggggtgagccgccccgacgaggtcttagaatgcatcgagcggggtgttgacctgtttgagtctttctttccctatcaggtgaccgaacgcggatgtgccctcacattttcctttgactaccagcccaatcccgaggagacactgctacagcagaacgggactcaggaggagatcaagtgcatggatcagatcaagaagattgaaaccactgggtgtaatcaggaaatcacatctttcgagataaatttgaaagagaagaaataccaggaggatttcaacccactggtcaggggatgtagttgctactgctgtaaaaatcatacacgagcctatattcaccatctcctcgtgacgaacgagctcctggctggggtcctactgatgatgcacaattttgaacattactttggcttctttcactatatcagggaggctctcaagtccgacaagctggcccaactcaaggagctcatccacagacaggcctcgtag

SEQ ID NO: 26337 - DNA, 600 bp, synthetic construct
  source 1..600: mol_type = other DNA; note = Synthetic coding sequence
atgcggttccggttctgcggcgacctggactgccccgactgggtgttggctgagatttctaccctagccaagatgtcatctgtgaaactgagactcctgtgctcgcaggttctaaaggagttactgggccaggggatagactacgaaaaaatcctgaagctgactgcggacgctaaatttgaaagcggcgacgtgaaagctaccgttgctgtcctttccttcatcctatcctccgccgctaaacattcagtagatggcgagagcttgagttccgagctgcagcagctcggactgcccaaggaacacgccgcctccctgtgccggtgttacgaggagaagcagtcaccccttcagaagcaccttagggtgtgcagcctgcggatgaatcgactcgctggcgtggggtggcgggtggactataccctttcgtcatcacttctacagtccgttgaagagcctatggtccacctgaggttggaggttgcagccgctcccggtacccccgcccaacccgttgccatgagccttagcgccgacaaattccaggtgctgctggccgagttgaagcaggctcaaacccttatgtcaagccttgggtag

SEQ ID NO: 26338 - DNA, 354 bp, synthetic construct
  source 1..354: mol_type = other DNA; note = Synthetic coding sequence
atgcccgaggaccaggtgggcaagctggaggccaccgagaacaccataagcgcgatggctgcggccgctgctgaacagcagcagttttatctgttgttagggaacctgctttcacccgacaatgtggttcggaagcaagcagaggagacatatgaaaatattccaggacaaagcaagatcaccttcctcctacaagctatcaggaataccaccgcagcagaagaggcacggcagatggccgccgttctcctgaggagactcctctcttctgcattcgatgaggtgtatccagctctgccgagtgacgttcagaccgccattaagtcagaactattaatgatcatccagatgtag

SEQ ID NO: 26339 - DNA, 888 bp, synthetic construct
  source 1..888: mol_type = other DNA; note = Synthetic coding sequence
tgaaccaagctggccaccggcagcaaggacaccaccgtgatcatctggcaggtagaccccgacacccatctcctcaagcttttgaagaccctggagggtcacgcctacggggtgagctacattgcctggtccccagatgacaattacctggtcgcctgcggtcccgacgattgtagtgaactgtggctctggaacgtacagacgggagagttgcggacaaagatgtctcagtcacatgaagactctctcaccagcgtggcatggaacccagatgggaaaaggttcgtgacgggcggccaaagaggccagttctaccaatgtgacttggatggcaacctgttggattcatgggagggtgtccgggtgcagtgcctttggtgtctctcagatggtaaaaccgtgctggccagcgatacacaccagcggattagaggctacaatttcgaagacttgacagataggaatatcgtgcaggaagaccatcctattatgagtttcacaatcagtaagaacgggcgcttggcgttactaaatgtggcaactcagggggtacatttgtgggacctgcaggacagagttctggtgcgcaagtaccagggagtgactcaggggttctataccatccacagttgtttcgggggccataacgaggatttcatcgctagtggttccgaggaccataaggtctacatctggcataaacggtcagagcttcctatcgcggaactgacagggcacaccaggaccgtgaattgtgtgtcttggaatccccaaatcccctccatgatggcctccgcaagcgatgacggcacagtaagaatctggggaccggccccatttatcgaccaccagaatattgaggaagagtgttcctccatggactcctag

SEQ ID NO: 26340 - DNA, 1053 bp, synthetic construct
  source 1..1053: mol_type = other DNA; note = Synthetic coding sequence
atggcccggtggatccccaccaagcggcagaagtacggcgtggccatttacaactacaacgctagccaggacgttgagctgtccctgcaaatcggcgacacggtgcacatcttggaaatgtatgagggatggtatagggggtacactctgcaaaataagtccaaaaaaggcattttccccgaaacctatatccatttaaaggaagctacagttgaggatcttggccagcacgagactgtaattccaggggaacttccgctggtccaggaattgacatctacacttagagaatgggccgtaatttggaggaagctatatgttaacaacaagttgaccttgttccgccagctgcagcagatgacctattcattaattgagtggaggtcacagattctgtccggaactcttcctaaggacgaactggcggagttgaagaaaaaagtgacagccaaaattgaccacggtaatcggatgctgggtctagacttagtcgtgcgcgacgacaatggaaatatcctggatcctgatgagacgagcacaatcgcgctctttaaggctcacgaggtggcctcgaaacgtatagaggagaagatccaggaggaaaagtcaatcctccagaacctcgacctgagagggcagtctatattcagcactatccatacttacggcttgtacgtgaactttaaaaactttgtttgtaacatcggggaggacgcggaactattcatggcactttacgatcctgaccaatccactttcattagcgagaattacctgatccgatggggttccaatgggatgcctaaagagatagaaaagcttaataacctccaggccgtatttacagacctgtcaagtatggatcttataaggccccgcgtcagtcttgtttgtcaaatagtgcgcgtggggcatatggaacttaaggagggtaaaaaacacacctgtggtctgagacggccctttggcgtggcagtgatggatatcactgacatcatccacggtaaggtagatgatgaggaaaagcagcactttattccttttcaacagtag

SEQ ID NO: 26341 - DNA, 360 bp, synthetic construct
  source 1..360: mol_type = other DNA; note = Synthetic coding sequence
atgcccgaggaccaggtgggcaagctggaggccaccgagaacaccataagtgccatggccgccgctgccgccgaacagcagcagttttacttgctgttgggcaaccttctgagtccggacaatgtggtgaggaagcaggcagaggagacctacgagaatatcccaggacagtctaagataacattcctcctccaagccattagaaacaccacggccgctgaggaggcccgacaaatggctgccgtgcttttaaggcgactgttgtcgtcggctttcgacgaggtgtaccccgccctgccctcagatgttcagaccgccatcaagagtgagctcttgatgatcattcagatggagacctag

SEQ ID NO: 26342 - DNA, 279 bp, synthetic construct
  source 1..279: mol_type = other DNA; note = Synthetic coding sequence
atgagcggcctggtgctgggccagcgggacgagcccgccggccacaggctctcacaggaggagatccttgggtctacaagactggtgtcacaggggctggaggccctgaggtctgaacatcaggccgtgctgcagagcctgagccagactatcgagtgcctgcagcagggcggacacgaggaggggctcgtgcatgagaaggctaggcaactaagacggtcaatggagaatatcgagttgggacttagtgaagcccaggtcatgcttgcccttgcctag

SEQ ID NO: 26343 - DNA, 405 bp, synthetic construct
  source 1..405: mol_type = other DNA; note = Synthetic coding sequence
atggtgctgatcctgggccggcggctgaaccgggaggacctgggcgtaagggattctcctgccacgaaaaggaaggtcttcgaaatggaccccaagtcactcaccggccatgagttctttgatttctcttctgggagctctcacgccgagaatatcctacaaattttcaatgagtttcgcgactccagactgttcaccgacgtaattatctgtgtcgagggtaaggaattcccctgccaccgtgctgtgctgtctgcttgctcttcgtatttcagagctatgttctgcaacgatcatagggagtctcgggaaatgctggtcgagattaatgggattttagccgaagcaatggaatgtttcctccagtacgtatacaccgggaaggtaaaaatcactacggagtag

SEQ ID NO: 26344 - DNA, 312 bp, synthetic construct
  source 1..312: mol_type = other DNA; note = Synthetic coding sequence
atggccgagctgatccagaagaagctgcagggcgaggtggagaagtatcagcaattgcagaaggatctctctaagagtatgtcggggagacagaagttggaggctcagctgacagagaataatatagtgaaggaagagttggcacttttggacgggtcaaatgtggtttttaagctgctggggcccgtactcgttaagcaggaacttggcgaagccagggccacagtaggcaaacgtctggactatataacagccgagatctttctgcgcaccattccagaccccggggatgtgcccgactctttcttctag

SEQ ID NO: 26345 - DNA, 1923 bp, synthetic construct
  source 1..1923: mol_type = other DNA; note = Synthetic coding sequence
atgggccggcggagcggcctgctgggcctgcggcccggccccgagccggtagccttggagagggtgatcaacaaggtacacctgaaggccaaccacgtggttaaacgtgatgttgatgaacatttacgcatcaaaactgtctacgacaaaagcgtcgaggagttactccccgaaaagaagaacctggtgaaaaataaactctttcctcaggctatctcctatcttgagaaaacttttcaggttcgccgaccagcaggcaccattctactctcgaggcaatgcgctaccaatcagtatttaaggaaggagaatgacccgcaccgatactgcacaggggaatgtgctgcacatactaagtgcgggcccgttattgtgccagaggagcacctgcagcaatgccgcgtatacaggggagggaagtggccccacggcgccgtgggggtgcctgatcaggaagggatctctgatgctgatttcgtcttgtacgtgggcgcgttggccaccgaacgctgttcccacgagaacatcattagctatgccgcttattgccagcaggaggccaacatggaccgcccaattgccggctatgctaatctttgccctaacatgatcagtacccagccccaggaattcgtcggtatgttaagtaccgtgaagcatgaggttattcatgctctcgggttctcagctgggttatttgcgttctatcacgataaggatggaaatcctttgacttccagattcgcagatggtcttccacccttcaactacagcctgggcttgtatcagtggagtgacaaagtggttcgaaaagtcgagaggctctgggacgtaagggataataaaatcgttcgccataccgtgtatctgttggttacaccaagggtcgtggaagaggcaaggaagcacttcgactgcccggtcctcgaaggaatggaactagagaatcagggtggagtgggcaccgagttaaatcattgggagaagcggctgctggaaaatgaggccatgacggggtcacatacgcagaacagggttctgagcaggattacccttgctctgatggaggataccggatggtacaaagccaactattccatggctgagaaactcgactgggggcgcggcatgggatgtgatttcgttaggaagtcctgcaaattttggatagatcaacagcggcaaaagaggcagatgttatctccctactgtgatacattacgaagcaaccccctgcagcttacctgtaggcaggaccagcgggcagtggccgtctgtaatctccagaagttcccgaaacccctgccccaagaatatcagtacttcgacgagttgagtggtatcccagcggaggatctaccatactacggcggatctgttgagatagccgactactgccccttctctcaagagttcagttggcatctgtcaggagaataccaaagaagctcggattgcagaattctggaaaatcagccagaaatcttcaagaattatggcgcggaaaaatatggcccacattctgtgtgcctgatccagaagtcggcatttgtaatggaaaaatgcgagaggaagttaagctaccccgactggggctctggatgctaccaagttagttgctccccacagggactaaaagtgtgggtgcaggacaccagctacctttgttcacgcgcaggtcaggtgctgcccgtctctatccagatgaatggttggatccatgacggtaacctcctgtgccccagctgctgggatttttgcgagttatgcccccctgaaaccgaccctcctgctacaaatctgacccgggccctcccactggatctctgtagctgttcatcatctctggtggtgacactctggctgctcctgggtaacctctttcccctgctggctggctttttactgtgcatatggcattag

SEQ ID NO: 26346 - DNA, 783 bp, synthetic construct
  source 1..783: mol_type = other DNA; note = Synthetic coding sequence
atgaacctggacagcgacggcatggacgacatcatcagccaggagtccagtttggacatggaaggaaactacaaaaaagcccaaaaaaatgaacgtgaatctatacgtcagaaactcgcattggggtccttcttcgacgatggccctggcatctacacttcttgttcaaaatcagggaaacctagcctctcttcccgcttacagtcaggaatgaatctgcagatttgtttcgtcaacgactccggaagcgacaaggacagtgatgccgatgatagcaagaccgagacgtccctggatacgccacttagtcccatgtcaaaacaatcctcatcgtattctgaccgggataccaccgaggaggagtcagagagcttggacgacatggattttctgacccgacagaagaaactacaggccgaggctaagatggccctagccatggccaagccaatggcgaagatgcaggtagaagttgaaaagcagaataggaagaaaagccctgtggccgatctgttgccccatatgccacacattagtgagtgtctcatgaagagaagcctgaagccaaccgatctgcgggacatgactatcggccaattacaagtaatagtgaatgacctgcactcgcagatagagtctctgaatgaagagctcgtgcagctgctcctaatccgcgatgagctgcataccgaacaagacgccatgctcgtggatatcgaggatctgacccgccacgcagaaagccagcaaaagcatatggcagaaaagatgccggcaaaatag

SEQ ID NO: 26347 - DNA, 633 bp, synthetic construct
  source 1..633: mol_type = other DNA; note = Synthetic coding sequence
atggccgccagcgtggagcagcgggagggcaccatccaggtgcaggggcaggcgctcttcttccgagaggctttacctggttccggccaggcacggttcagcgtcttgctgcttcacggaattagattttccagcgagacttggcagaacctgggcactctgcataggctggcacaagcaggctacagagctgtggctattgacctccccggcctaggccattcaaaagaagctgcagcaccagcccccattggggagctggccccgggctcctttcttgccgcagtggtggacgccttagagctgggtcccccagtggtgataagcccttctctgtcgggaatgtactccctgcccttcttgactgcccccggctcgcagttgcccggattcgtccctgtggcccccatttgcaccgacaagattaatgccgccaattacgcctcagtcaagaccccagccttgatcgtatatggtgaccaagatcctatgggtcagacctcgttcgaacacctgaagcagctgcctaaccatagagtgctgattatgaagggagccgggcatccatgctatctggataaacccgaagagtggcataccggtctgttggacttcctgcagggccttcaatag

SEQ ID NO: 26348 - DNA, 381 bp, synthetic construct
  source 1..381: mol_type = other DNA; note = Synthetic coding sequence
atgaaccagcggagccacctgggcaccacctacctggacaccgccaagggcgcagtggagaccttcatgaagctgagagcaagggatcccgccagccgcggggaccgctatatgctggtcacctttgaagagccaccctacgcgattaaagctgggtggaaggaaaatcacgcgacgttcatgaacgaactgaagaacttgcaggcagagggtctgaccaccctgggtcagagcctgcgcacagcttttgacctcttaaatcttaaccggctggtcaccggaattgataattacggacaggggaggaatccctttttccttgaaccggctattatcatcacaatcacggatggatccaaactaaccaccaccagtgggtag

SEQ ID NO: 26349 - DNA, 1188 bp, synthetic construct
  source 1..1188: mol_type = other DNA; note = Synthetic coding sequence
atggccaacgaccccctggagggcttccacgaggtgaacctggcctccccaacctccccagacctactgggcgtgtatgaatctggaacacaggaacagactacctctcccagtgtcatatatagaccccatccctctgctttgagttctgtgccgatccaggcgaacgcgctggatgtgagcgagctgccgacccaaccggtgtactcctcacctcggagactgaattgtgcagaaatatcctcaatcagctttcatgtgactgatccggccccatgctctacaagcggcgttactgccggtctgacaaagttgaccacgaggaaagacaattacaatgcggaacgggagtttctgcagggcgcaaccattacagaagcctgtgatggatcagacgacatcttcggcctcagtactgattctctcagcagactcagatcaccttccgtcctcgaggtgagagagaaggggtacgaacggcttaaggaagaattagccaaggctcagcgtgagctaaagctgaaggatgaggaatgcgagcggcttagcaaggtgcgcgaccagctcgggcaggagctcgaagaactgactgctagcctcttcgaggaggctcacaaaatggtgagagaggcaaacataaagcaggctacggccgaaaaacagcttaaagaagcccaaggaaagattgatgttctgcaggcggaagtggccgcgctgaagacgctcgtgttaagtagctcacctaccagcccgacgcaggagcccctccctggaggcaaaactccattcaaaaaagggcacacaaggaacaagtccacgtcttcagccatgtcagggagtcatcaggatttgtcagtaatccagccaatcgtaaaagattgcaaagaagccgacttgtctctgtacaacgaattcagattgtggaaagatgagccaaccatggatagaacttgcccatttctggacaagatttatcaggaagatatctttccatgcctcactttttccaagtctgaactcgcctccgctgtgcttgaggccgttgaaaataatactctgtccattgagcccgttgggctgcagccaatccgcttcgtcaaggcatccgccgtggagtgcggcggaccaaagtcgctgctctacgttacatttctgcatacattcgacacttttagccgggacagctag

SEQ ID NO: 26350 - DNA, 786 bp, synthetic construct
  source 1..786: mol_type = other DNA; note = Synthetic coding sequence
atgggcagccggaagaaggagatcgccctgcaggtgaacatcagcacccaagaactttgggaggagatgttatcttctaaagggcttaccgtggtcgatgtttaccagggatggtgtggaccctgtaagccggtcgtctccctgtttcaaaagatgcggattgaagtagggctcgatctgctgcactttgccctgattaaggatgaggccctctccgatgaggatgagtgcgtttcacacggtaagaacaacggcgaggacgaagacatggtgagttcggagcgcacctgtacccttgccattatcaaacccgacgccgtggcacacggaaagaccgatgaaataatcatgaagattcaggaagctggttttgaaatcctaaccaatgaagagaggactatgacagaagcagaggtccgcttgttttaccagcacaaagctggtgaagaggcattcgagaaactcgtgcatcacatgtgctcgggcccctctcaccttctgatcctgaccagaactgaaggcttcgaggatgtagtcacaacttggagaacggtaatggggccccgcgacccaaacgttgctcggagggagcagcccgagtctctgagggcacaatacgggaccgaaatgccctttaatgccgtgcacgggtctcgcgaccgagaggatgctgaccgcgaactggcacttctgttccccagtttgaaattctcagacaaagacactgaagccccccagggggagtcatcaacccaaccaaggcttaagatcaccgatctggattag

SEQ ID NO: 26351 - DNA, 1284 bp, synthetic construct
  source 1..1284: mol_type = other DNA; note = Synthetic coding sequence
atggtgtgctggcaggacctggaggagagcctgcggatgaagctgtccctaaccaaagtggttaatggatgtagactgggcaagattaagaatctggggaagaccggggatcatactatggacatccctggatgtctgctatatacaaaaacaggcagcgccccacacttaacccaccatactttgcacaatatccacggcgttcctgccatggcgcagttaaccctgagttctctggcagagcaccacgaggtactgaccgaatataaggaaggagttggtaagttcattgggatgcccgaatctttgctctattgctctctgcacgatcccgtgtctccttgccctgccggatacgttactaacaagagcgtatctgtgtggtcggtcgccggccgggttgagatgaccgtctccaaatttatggcgatccagaaggcgctgcagccggactggtttcagtgccttagcgacggagaagtgtcatgcaaggaagccactagcattaagagggtcaggaagagcgtggaccgcagcctgctgtttcttgataactgcctccgacttcaggaggagtccgaagtcctgcagaaaagcgtcatcatcggtgtcatcgagggtggtgatgtgatggaagagcggctccgttcagctagggaaaccgctaaacgtccagtgggcgggttcttacttgatggcttccagggaaaccccacaacgcttgaggcgaggctgcgcctgctgtcctccgtaacagcagaactgcccgaagacaagccccggttgatctctggagtatcaaggcctgacgaagtcctggagtgtatcgaaagaggggtggacctcttcgaaagtttctttccgtaccaggtcacagaaaggggatgtgcactcactttctcattcgactaccagccaaacccggaagaaactctcctgcagcagaatggaactcaggaagagatcaaatgtatggatcagataaaaaaaattgagacaaccggctgtaatcaggagatcaccagttttgaaattaacctgaaggaaaagaagtaccaggaagactttaatcccctcgtgcgcggttgttcgtgctattgttgcaagaatcacactagagcctacatacaccacctgctggtaacgaatgagctgctggccggcgttttactcatgatgcacaattttgaacactactttggctttttccactatatacgtgaggcgctcaaatctgataaactggctcaattgaaggaattaatccacaggcaagcctcttag

SEQ ID NO: 26352 - DNA, 393 bp, synthetic construct
  source 1..393: mol_type = other DNA; note = Synthetic coding sequence
atgaaccagcggagccacctgggcaccacctacctggacaccgccaagggcgctgtggagacattcatgaaactgcgcgcgcgggatcccgcctcacgcggggatagatacatgctcgttacctttgaggaaccgccatatgccatcaaggctggctggaaagagaatcatgccacttttatgaatgaactcaagaacttgcaggccgaaggccttaccacacttggccagtctcttagaacagctttcgacctgctgaacctcaaccggctggtcactggaatcgataattacggccaaggccggaacccatttttcctcgaaccagctatcatcatcaccataacagacggcagcaagttgacaaccacaagcggggtccaagatgaatag

SEQ ID NO: 26353 - DNA, 417 bp, synthetic construct
  source 1..417: mol_type = other DNA; note = Synthetic coding sequence
atgaaccccgccagcgcccccccccccctgcccccccccggccagcaagtgattcatgtaacgcaagatctggacaccgacttggaagcacttttcaattcagtcatgaaccctaagccttccagctggcgaaaaaagatcctacccgagtctttcttcaaagagccggatagcggatcccactcaaggcagtcaagcactgattcaagcggcgggcatcctggaccaaggctcgctggtggcgcacagcatgttcggagccatagcagccctgcatccctgcagctgggaaccggagccggggcggccggctcaccggcacaacaacacgcccacttgagacagcagagttatgatgtgaccgatgagttaccacttcctccagggtgggagatgacttttaccgcaacgggctag

SEQ ID NO: 26354 - DNA, 1692 bp, synthetic construct
  source 1..1692: mol_type = other DNA; note = Synthetic coding sequence
atgcggctggaggagctgaagcggctgcagaaccccctggagcaggttaacgatggtaagtacagtttcgagaaccatcagctggccatggatgctgagaacaatatcgagaagtatccactgaatctacagccactggagagcaaggtgaagatcattcaacgggcctggcgggagtatttacagcgtcaagagccactgggtaaacggtccccgagccccccgtctgtatcttctgagaagctcagttcatctgtttcaatgaatacctttagcgactcctctacccctgactacagggaggacggaatggatctggggtctgacgcaggctcatctagttcttccagtcgagcctcttcccagtctaattccacaaaggtgacgccatgttccgagtgcaagtccagctccagccccggggggtctctggacctcgtgtccgccctagaggattatgaagaaccctttcccgtttaccagaagaaagttatagacgagtgggccccagaggaagacggagaggaagaagaggaggaagatgagcgcgaccagcggggatatcgggacgatcggtcacccgccagggagcccggtgacgtttccgctaggacacgcagtggcggcggtgggggacgcagtgctacaaccgctatgccacctccagtacccaatggcaacctgcaccagcacgacccccaggatttgcgccataacgggaatgtcgtagtggccgggcgcccatcatgtagccgagggccgcgacgcgcaattcaaaagccccagcccgccggcggacgacgtagtgggaggggccccgctgcaggagggttgtgtttgcagccacctgatggcggtacttgtgtgcccgaggagccccccgtcccaccaatggattgggaggccctcgaaaagcacctggcagggctgcagtttcgcgagcaggaggtcaggaaccagggacaggctaggaccaattctactagtgcacagaaaaatgagcgcgagtccattcggcagaagctcgccctgggatcattcttcgacgatggtcccggcatctacacatcatgtagcaaatctggcaagccttccctgagctccagactccaatccggcatgaacctccaaatctgttttgtgaacgatagcggctcggacaaggactctgatgctgatgattctaaaactgagacttctctagacacacccctgtcgccaatgtctaaacagtcatcaagttattctgaccgcgatactaccgaggaagagtccgaatccctggatgacatggacttcttgacccgacagaagaagctccaggccgaagcaaagatggcattggccatggctaaacctatggccaaaatgcaggtagaggtggagaaacagaatcggaagaagtcgcctgtcgctgatctactcccacatatgccgcatatcagtgagtgcctcatgaaaaggtcattgaagcccactgacctgcgtgatatgactatcggacagctccaggtgatcgtcaatgacctgcactctcagattgaatcacttaacgaagaattggtgcagttgttgcttatcagagacgagttacacactgaacaggatgccatgctggtcgatatagaggaccttacacgccatgcggagagtcagcagaagcatatggccgagaagatgccagccaagtag

SEQ ID NO: 26355 - DNA, 228 bp, synthetic construct
  source 1..228: mol_type = other DNA; note = Synthetic coding sequence
atgcccgaggaccaggtgggcaagctggaggccaccgagaacaccatcagcgccatggctgctgccgccgctgagcagcaacagttttacctcctattaggtaacctgctctctccagataatgtggtcaggaaacaggccgaagagacttacgagaatatccctggacagtccaaaatcaccttcctcttacaggccattaggaatactactgccgctgaagaatag

SEQ ID NO: 26356 - DNA, 2712 bp, synthetic construct
  source 1..2712: mol_type = other DNA; note = Synthetic coding sequence
atgcccgagcagttcagcgtggccgagttcctggccgtgaccgccgaggacctcagttctccagctggggccgcagctttcgctgccaagatgccaagatataggggtgccgcactcgcacgagaagaaatcttggagggtgatcaggctatcctccagcggatcaagaaggccgtgcgcgcaattcatagctcaggacttggccatgtggaaaacgaggagcaatacagagaggccgtcgaatctctgggtaacagccacctaagccaaaacagtcacgaactgagcactggcttcctcaacttggctgtgttcacccgggaagtggccgctctgtttaaaaatctgatccagaatctaaataacatcgtgtctttccctctggactcactcatgaaggggcagctgcgagatgggagacaagactccaaaaagcagctggaaaaagcctggaaagattatgaggccaaaatggccaaactagagaaagaacgcgatcgggccagggtgacaggcggcatccctggggaagtcgctcaggacatgcaacgcgaacgaaggatcttccagctgcacatgtgcgagtacctcttaaaggcgggagagtcgcagatgaagcagggacctgacttcctccagtctttgatcaaattcttccatgctcagcacaatttcttccaagatggctggaaggccgcccaatccctgttccctttcattgagaaactggcggcatcagttcacgcccttcaccaagcgcaagaggacgaactacagaaattaacacagctgcgcgactcactgcgaggaactctgcagttggaatccagagaagaacacctgagtcggaagaattccggctgtggttactctatccaccaacaccagggcaataagcaattcggaacggagaaagtggggttcctttataaaaagtccgatggtattaggcgggtttggcagaaacgcaagtgtggagtgaaatacggctgtcttactataagtcattctacaatcaatcgacctcccgtgaaactgactcttcttacatgccaggtgcgacccaaccccgaagaaaaaaaatgcttcgatttagtgacacacaaccgaacatatcatttccaggccgaggacgaacacgagtgcgaggcttgggtgagcgtcctccaaaactcaaaggacgaggcgctgagcagcgcatttctgggcgaacctagcgcgggaccaggaagttgggggtcagctggacacgacggcgaaccacacgatcttacgaagctcctgatcgccgaagtgaagagtaggcccggaaactctcagtgttgcgattgtggcgcggccgaccctacatggctgtctaccaacctcggcgttctgacctgcattcagtgttctggagtacaccgtgagctgggagtgaggttcagtcggatgcagtcactcacactggatctactcggtccatcagaactgctgctggcgttgaatatgggcaacacttccttcaatgaagtgatggaggcacagcttccctcccatgggggtccaaagccctcggccgagtctgacatggggacacgccgagactacatcatggctaaatacgtggagcatcgcttcgcgcgcagatgtacaccagagccccagcgactatggacagccatctgtaatcgagacctgctcagtgttctcgaggcgtttgccaacggccaagattttggccagcccttgccaggccccgacgcccaggcacctgaagagctcgtactgcacctggcggtgaaagtggcaaatcaagcatccctcccactagtcgacttcatcatccaaaatggtggccatctggatgccaaggctgcagatgggaacactgctctgcattatgccgccctctataaccaacctgattgtcttaagctattgttaaaaggccgagccttggttggaaccgtgaatgaagctggtgagacagccctcgatattgcgcgaaaaaagcatcataaagagtgcgaggaactgttggagcaggcccaggctggcacattcgcctttccactacatgtggattatagttgggttatttctactgagccaggcagtgactcggaagaagacgaggaggaaaaacggtgtcttctaaaattgccagcacaagcccactgggcctcaggtagactcgatatctcaaataagacctacgaaacagtggcaagcctgggagcagcgactccccagggtgagagcgaggactgccctccccctctgccagtcaaaaatagctcgcggactttggtgcagggatgtgcaagacacgccagtggcgaccgctcagaggtcagctctctgtctagcgaggccccggagacgcccgagagtctcggctcccctgcctcatcttctagcctgatgtccccgttagagcctggtgacccatcccaggcccctcctaattccgaagagggactgcgagagccccccggtactagccggccttctctgacttcaggcacaaccccttcggaaatgtatctccccgtgagattcagcagtgagtctacccggagctatcggagaggcgccagaagccctgaagacggccctagtgctcgccagcctttacccaggcgcaacgtccctgtcggtatcactgagggggatggatcccgtactgggtccctccccgcaagctccgtgcagctcctgcaggattag

SEQ ID NO: 26357 - DNA, 522 bp, synthetic construct
  source 1..522: mol_type = other DNA; note = Synthetic coding sequence
atgccccggaagggcacccagcccagcaccgcccggcggcgggaggagggtcctccgccccctagtcccgatggggccagctcagatgctgagcctgagcccccaagtggcagaacagaatcaccagcaacggcagccgaaaccgcctccgaagaactggataaccgttccctcgaggagatcctcaacagcattcccccgccacctccccccgccatgaccaatgaagccggcgcacccaggcttatgattacacacatcgtcaaccaaaatttcaagtcatatgccggggagaagattctggggccttttcataaacgtttttcatgtatcatcggaccgaatggatctggaaagtccaacgttatagacagtatgctgttcgtgtttggttatcgggcccagaagatccggagcaagaagctgagtgtgcttatccacaactctgatgaacacaaggacattcagtcctgtaccgtggaggtgcacttccagaagattattgataaggagggcgactag

SEQ ID NO: 26358 - DNA, 2262 bp, synthetic construct
  source 1..2262: mol_type = other DNA; note = Synthetic coding sequence
atgtacagccccatcatctaccaggccctgtgcgagcacgtgcagacacagatgagtcttatgaatgacctcaccagcaagaacatccccaacggtatacctgctgtgccctgccacgccccatcccattcagagtcccaggccacaccacacagctcctatgggttatgtacatccacgccggtgtggagcctccagcgccctccctgccccccgaaagtgcacagtgaagtacaaaccgacgggaattcgcaatttgcgtcccagggaaagaccgtgtccgctacctgcactgatgttcttaggaactcctttaacacgagcccaggagtgccatgcagcctccctaaaactgatatcagcgccatcccaaccctgcagcagctaggattggtaaatggcattctgccccagcagggtatccataaggagaccgacctgctgaagtgtatccagacatatttatcgctgttcaggtctcatggcaaggaaacccacttggattctcagactcacaggtcacctactcagagccagccagccttcctggctactaacgaagagaagtgtgctcgcgaacagattcgagaagcaacttcagaaaggaaagaccttaacattcacgtaagggataccaagactgtgaaggatgtgcagaaagccaaaaatgtgaataaaaccgccgaaaaggtcagaatcataaagtatctcctgggggagctgaaggctttggttgctgagcaggaggattccgaaatccagcgtctcatcactgagatggaagcttgcatttccgtcctgcccacggtctctggcaacacagacatccaggttgagatagcactggccatgcagccactgcgatctgagaacgcccagctcagacggcagttgagaatcttgaaccagcaactgcgggaacagcagaagacgcagaaacctagcggggctgtggattgtaacttggagctcttttcgctgcagtccttgaacatgagtcttcagaaccagctggaggagtccttaaagagtcaggagctgctccagagtaagaatgaagagttgctgaaggttatcgaaaatcagaaagacgaaaacaaaaagttctcaagcatcttcaaagacaaagatcagacaattctggaaaacaagcaacaatacgatattgagatcacacgcataaagattgagctggaggaagcactcgtgaatgtgaagagcagccagttcaagctggagaccgccgagaaggagaatcaaatcctgggcatcaccttgcggcagcgcgacgctgaggtgactaggttgcgcgaactgacccgtaccctccaaacgagtatggccaaattactgtccgatctgtcagtcgattcagccagatgtaagcccggaaataatctgacaaagtccctgttgaacatacatgacaaacagttgcagcatgacccggctcctgctcacacttcaatcatgtcctatctcaataaactcgaaacgaactactccttcacccactctgagccattgagcaccattaagaacgaggaaacaatcgagcccgacaagacatacgaaaacgtgttgtcttcacgcggtccgcagaactcaaatactagaggtatggaagaggcctctgccccgggtattatcagcgctctgagcaagcaggacagtgacgagggttccgagacaatggcactcattgaagatgagcataatttggataataccatctacattcccttcgctcgaagcacgccggagaaaaagtccccgctgtcaaaacgcctttcaccccagccccagattcgggctgctaccacgcagctcgtgtctaacagtggactggccgtgtctggcaaagaaaacaagctgtgtacaccggtcatttgctccagctcaacaaaggaagccgaagacgcccccgaaaagctgtccagggcatcagatatgaaggacacccagctcctcaagaagatcaaagaggccattggaaagattccagccgcaaccaaggagcccgaggagcagacagcttgccatgggccctccggctgcttgagcaatagcctacaggtgaaggggaacactgtgtgtgacggatcagtctttacatctgatttaatgtcagattggtcaatatccagttttagcacattcaccagcagagacgaacaggatttccgcaatggtcttgcggccttagatgccaatatagcccggctgcagaagtctctgaggaccggactactggaaaagtag

SEQ ID NO: 26359 - DNA, 219 bp, synthetic construct
  source 1..219: mol_type = other DNA; note = Synthetic coding sequence
atgatggaggagatcagcatcatggtggcctacgacgcccacgtgttttctcagctgcacgacgaggatttcctcacctcactcgtggcgattagcaaacccaggtcgatggtacccacaaagaagctcaaaaaatatgagaaggaatatcagacaatgcgtgaaagtcagctgcagcaggaggatccaatggacaggtacaaattcgtttacctgtag

SEQ ID NO: 26360 - DNA, 588 bp, synthetic construct
  source 1..588: mol_type = other DNA; note = Synthetic coding sequence
atgtggcacatgacccggaactggcccctggtgggcaagaccagcctcattactaggttcatgtatgacagcttcgataacacttaccaagcaacgataggcatcgacttcctatcaaagaccatgtacctcgaggaccgcacggtgcggcttcagttgtgggataccgctggacaggagcggtttcgaagtttgatcccaagttacattcgagactctactgtggcagtcgtggtgtacgacatcacaaatctgaactcctttcagcagacttctaagtggatagacgacgtcaggacggaaagaggatccgatgtgataatcatgctggtggggaacaagaccgatttagccgacaaacggcagatcaccatcgaagaaggagagcagcgagccaaggagctttctgtgatgttcattgagacttctgctaagaccggatacaatgtgaaacagctgttccgccgagtggcttccgcgctccctggtatggaaaacgtacaggagaagtctaaagagggaatgatcgacatcaaactggataagcctcaggagcctcctgcctcggaagggggatgtagttgctag

SEQ ID NO: 26361 - DNA, 1047 bp, synthetic construct
  source 1..1047: mol_type = other DNA; note = Synthetic coding sequence
atgagcctgccccggttccagcgggtgaacttcggcccctacgacaactacattcctgtgtccgaactctcaaagaagtcatggaatcagcagcactttgcgctcttgttccctaagccacagcgccctggaacaaagcggcggagcaagcctagccagatacgcgataacaccgtctctattattgatgaagagcagctgcgaggagacaggagacagcccttgtggatgtatagatctctgatgcgtatcagtgaacgcccttccgtctatctggctgcacgacgccagcccttgaaacccaccaggacggtggaagttgattccaaggcagccgaaatcggcaaaaagggagaggacaaaaccacccagaaggataccacagattcggaatccgagttgaaacagggcaagaaggattcaaaaaaagggaaagacattgagaaaggcaaggaggaaaagctggatgccaaaaaggatagcaaaaaaggcaagaaagacgcggaaaaaggtaaagactctgccacagagtccgaggatgaaaagggaggggccaagaaagataataagaaagacaaaaaagactccaataagggaaaagacagtgctactgagtccgaaggtgagaagggcggcaccgaaaaggactccaagaaggggaagaaagactccaaaaaaggcaaggatagtgccattgaactccaggcagtgaaggccgatgaaaaaaaggatgaagacggaaaaaaggatgccaataagggcgacgaatcaaaggatgccaagaaggacgctaaggagatcaaaaagggcaaaaaggataaaaaaaaacctagtagtactgattccgacagtaaggacgacgtcaaaaaggaaagcaagaaggatgcgaccaaagacgcaaaaaaggtggcaaagaaagacaccgagaaagagtcagcggactcgaagaaggacgcgaaaaagaacgcaaagaaagacgccaaaaaggatgcaaagaagaatgcaaaaaaggacgagaaaaaagatgccaaaaagaaaggcaagtag

SEQ ID NO: 26362 - DNA, 2862 bp, synthetic construct
  source 1..2862: mol_type = other DNA; note = Synthetic coding sequence
atgaagcggggcatccggcgggaccccttccggaagcggaagctgggaggtcgcgccaagaaagtccgcgaacccacagccgtcaattccttttacagggaggcctccttaccttcggtctgggctagcctccgcagacgggaaatggtgcggagcggtgcaagacctgggcaagtcctgtccagtggacggcataccgggcctgctaaactgactaatggcaagaaggccacatacctgcgaaagattccacgctttaacgccgatagtggatattcaatccacagcgattccgaatcccaggccgagacagtccacggcctggatggatgcgcatctttgctgcgggacatccttcggaatgaagacagcgggtccgagaccgcttatctggaaaacagatcaaacagcagacccctcgaatcgaagcgttatgggtcgaaaaagaagaggcatgaaaaacacaccattcctctggtggtgcagaaggaaacctcctcatccgacaataaaaaacagattcctaacgaggcttcggcccggagcgagagagacacctctgacttggaacagaactggagtctgcaagaccactaccgcatgtatagccccattatatatcaggctctatgtgaacacgttcagacacagatgtctcttatgaacgacttgacatcgaaaaacattcctaacggcatccccgcggtgccttgtcacgccccttctcactccgagtctcaggcaaccccccactcaagttatggcttgtgtaccagtactccagtctggagtctacagaggcccccatgccctcccaaggtccactcagaggtgcagaccgatgggaatagtcagtttgccagccaaggaaagacggtcagcgctacctgcaccgatgtgctgagaaacagctttaacacgtccccaggtgtgccttgttccttgccaaagaccgacatatccgcaatccccacactgcaacagctgggtttagtcaacgggatcttgccacagcaggggatccacaaggagaccgaccttctcaagtgtatccaaacttacctcagtcttttccgaagccatggtaaggaaacccacttggactctcaaacacatagatctccaacccagtcacaacccgctttcttggccactaatgaggagaagtgcgctcgggaacagatcagggaggctacgagtgaacgtaaggatttgaacattcatgtgcgtgacactaagacagtgaaggatgtccaaaaggctaaaaatgtcaacaaaactgcagaaaaagtgagaatcattaaataccttttgggagaattaaaagcgttggtcgcagagcaggaagactccgagattcaacgccttatcacggagatggaagcctgtatttctgtcctgcccaccgtctcgggaaacacggacatccaagtcgaaatcgctcttgccatgcagcccctgaggagcgaaaacgcgcagctgagaaggcagctccgcattttgaatcagcaactgcgcgaacagcagaagacacagaagccatccggcgcggtcgattgcaatctggagctgttctcccttcaatctctaaatatgagccttcagaaccagctggaagagtccctgaagtctcaagagcttcttcagtccaaaaatgaagaactgctcaaggtcatcgagaatcaaaaagatgagaataagaagttcagtagtattttcaaggataaagaccaaactattttggagaacaagcagcagtacgacatagagataactcgcattaaaattgagctggaggaggctctggtgaatgtaaagagctcccaattcaagttagaaactgctgaaaaggagaaccagattttgggcatcactctccgccagcgggatgccgaggtaacgcgactgagagagctgacccggaccctgcagacctcgatggcgaagctgttgtccgacctttctgtcgactctgctaggtgcaaacccggaaacaaccttacaaagtctctgctgaacatacacgacaaacaattacaacacgacccggcccccgcccatacgtctatcatgtcttatttgaataagctggagaccaattattcatttacccacagcgaacccctgtccacaataaaaaatgaggagaccattgaaccagataaaacttacgaaaatgttctcagctcacgtggtccccagaatagtaataccagaggtatggaggaggccagcgcacctggcattatttccgcactatccaagcaggattctgacgagggatccgagactatggctctgattgaggacgagcacaatttagacaacaccatatacatcccgttcgccagatcaacacctgagaagaagagccccctctctaagcggttgtcaccccagccacaaattcgagccgcgaccacacagctcgtgtccaactcgggtcttgcagtttccgggaaggaaaataagctttgtactcccgtgatctgctcctcatctacaaaggaagccgaggatgcccccgagaaactctcccgcgcctctgatatgaaagacacacagttactcaaaaagatcaaggaggctattggcaagattcctgcggcgacaaaggagcctgaggagcagaccgcatgtcacggacccagtggctgcctctcaaatagtctccaggtgaaaggcaacaccgtgtgtgacggaagcgtgtttacttctgacctcatgagtgactggtcaataagcagcttctcaacttttacaagcagggatgagcaggacttccgcaacggattggccgccttggatgcaaatatcgcacgactccagaagtcgctcagaactgggctgctggagaaatag

SEQ ID NO: 26363 - DNA, 1683 bp, synthetic construct
  source 1..1683: mol_type = other DNA; note = Synthetic coding sequence
atgagcgagcacagccggaacagcgaccaggaggagctgctggacgaggaaataaacgaagacgagatcttggcaaatctgagcgccgaggaactgaaggaattgcaatcagagatggaggtcatggcccctgacccctctcttccagtgggaatgatacagaaggatcagaccgataagccccccacaggcaacttcaaccacaagagccttgtagattacatgtattgggaaaaagcttcgcgaagaatgcttgaagaagagcgcgtcccagtgacttttgtaaaatccgaagaaaagacacaggaagagcacgaggagattgaaaagagaaataagaatatggcccaatacctgaaggaaaaactgaataatgagatagtcgctaataagcgagaatcaaaagggtcatcgaacattcaggagacggacgaagaagatgaggaagaggaggatgatgatgacgatgatgagggagaagatgatggtgaggagtctgaggaaaccaatagagaggaggaaggaaaagcaaaagagcagatccgcaattgcgaaaataactgtcaacaagtgaccgacaaagcctttaaggaacagagggacaggcccgaggcccaggaacaatctgaaaagaagatatccaagctggatcccaagaaattggcactcgatacctcttttctcaaagtgtccacccgcccctccggtaaccagacagacctggatggttcactgagaagagtacgaaagaatgaccctgatatgaaagagctcaatctaaataatatagagaacatccctaaggagatgctgttagacttcgtgaacgcaatgaaaaaaaacaaacacattaaaacgtttagcctggccaacgtgggggccgatgaaaatgttgcatttgccctggcaaatatgcttcgggaaaacagaagtatcacaactctaaatatcgaatcgaacttcatcacgggtaaaggtatcgttgctattatgcgatgccttcagttcaacgaaactctcactgaactgcgcttccataatcagaggcacatgctgggccaccatgccgagatggagatcgctcgcctgctgaaggccaataatactttactgaagatggggtatcactttgagttgccaggtcctcgtatggtggtaacaaatctgctgacccggaatcaggacaagcagagacaaaaacggcaggaggagcagaaacagcagcagctgaaggaacagaaaaagctgattgcgatgctggaaaatggcctgggtctgccccccgggatgtgggagctcctgggtggcccaaagcctgactcacgtatgcaagaatttttccaaccccccccaccccgacccccaaacccacagaatgtgccattctctcagcgaagcgaaatgatgaaaaaaccaagccaggcaccaaagtaccggacggacccagactccttcagagtcgtgaagttgaagaggatccagaggaagagcagaatgccagaggcccgggagccaccagagaaaacaaacctgaaggacgtaattaagacattgaagcccgttccacgcaatagaccaccgccactcgtagagatcactcctcgtgatcagctgctgaatgacattcggcacagctcggtggcctacctaaagccagttcaactacctaaagagctggcttag

SEQ ID NO: 26364 - DNA, 153 bp, synthetic construct
  source 1..153: mol_type = other DNA; note = Synthetic coding sequence
atgcccgaggaccaggtgggcaagctggaggccaccgagaacaccatcagcgccatggccgcagccgcagcagagcagcaacagttctatctcctgctggggaatctgctctcacccgataatgtggtaaggaagcaagcggaggttacctag

SEQ ID NO: 26365 - DNA, 288 bp, synthetic construct
  source 1..288: mol_type = other DNA; note = Synthetic coding sequence
atggccatcggcaagcggctggccaccctgcccaccaaggagcagaagacccagcgactcatctcggaattgtctctgcttaaccataaactgcccgcgagggtgtggctcccgacggcgggatttgatcaccacgtggtgcgcgtccctcatacccaggctgtggttctcaactcgaaggataaagccccctacttgatctacgtcgaagtcctggagtgtgaaaatttcgatacaacatctgtgcccgctcggattcctgaaaacagaataagaagtacaaggtag

SEQ ID NO: 26366 - DNA, 1260 bp, synthetic construct
  source 1..1260: mol_type = other DNA; note = Synthetic coding sequence
atggccggcagcggctgcgcctggggcgccgagcccccccggttcctcgaagcctttggacggttatggcaggtgcaatcccgtctagggagtggcagctctgcatccgtctaccgggtcaggtgctgtggcaacccagggtcaccacccggtgccctgaaacagtttttgcctcccggaacaactggcgctgctgccagcgcagcagagtacgggttccgtaaagaaagggcagctctggaacagttgcagggtcatcgaaacatcgtcacgctgtatggcgtctttaccatacatttcagccccaacgttccatcaaggtgccttctgctggaactgctcgatgtgtccgtttctgagttattactgtatagcagccaccagggctgtagcatgtggatgatccagcattgcgccagagacgtgctggaggccctagccttcttgcaccacgagggctacgtgcacgccgatctcaagcctcgcaatattttgtggtctgcagagaacgaatgttttaagctgattgactttgggctgtcttttaaggagggcaatcaggatgtcaagtacatccaaactgatggataccgggctcctgaagccgaactccagaactgcctggcacaggccggactgcagtccgacaccgaatgcactagtgccgtagacctctggtcactgggcatcatcctgctggagatgtttagtggcatgaagctgaaacacactgtcaggtctcaggagtggaaggcaaactcttcagctatcattgatcatattttcgcttctaaggccgtagttaacgctgcaattccggcataccatcttagggacttgatcaagtctatgcttcacgacgatccttccaggcgcatacctgccgagatggcactatgttcacccttcttcagcatcccctttgcacctcatatcgaggatctggtgatgcttccgactcctgtgttgaggctgcttaacgtgctggacgatgattatctcgaaaacgaggaagagtatgaggacgtggttgaagacgtaaaagaagaatgccagaagtacggtcccgtggtgtccctgctagtgccgaaggagaatcccggacggggacaggtcttcgtggagtacgctaatgcgggcgactcgaaggcggcccagaagctcctcactggacgaatgttcgatgggaagtttgtggtggcaacattctacccactttctgcttataaacgggggtatttatatcagacactgttatag

SEQ ID NO: 26367 - DNA, 1272 bp, synthetic construct
  source 1..1272: mol_type = other DNA; note = Synthetic coding sequence
atgccccggaagggcacccagcccagcaccgcccggcggcgggaggaaggaccccccccaccttctccggatggagcctctagtgacgcagagccagagcccccatccggaagaaccgaaagtccagcgaccgctgcagagacggctagtgaagaactcgacaataggtcccttgaggaaatactcaatagtattccgccgccgccccctcccgcgatgactaacgaagccggcgcacctaggctcatgatcacacatatcgtgaaccaaaactttaaatcttacgccggagaaaagatacttgggccttttcacaagcgcttctcatgtatcattggacctaatggttccggaaagagtaacgtcattgattctatgttatttgtgttcggctaccgggcccagaagatcagatcaaaaaaactgagcgtactgatacacaattccgacgaacacaaggacatccagtcctgcactgttgaagtgcactttcagaaaattatagacaaggagggggacgattacgaggttatcccaaactccaacttctatgtgagtcgcactgcttgtagggacaacacctccgtgtaccacataagcggcaagaaaaagacatttaaggatgttggaaatctactgcggagccatggaatcgatctggaccacaacaggtttctgatactgcagggcgaggtcgagcaaatcgctatgatgaagcccaagggtcagacagagcacgatgaggggatgttggaatacctggaagacataatcggatgtggacgacttaatgagccaatcaaggtgctctgtaggagggtggaaattcttaacgagcacaggggcgagaaattgaaccgcgtaaagatggttgagaaggaaaaagacgcacttgagggtgagaagaatatcgccatagagttcctgactctcgagaatgagatcttccgaaaaaagaatcacgtgtgccagtactatatttacgagttgcaaaaaagaatagcagaaatggagacgcagaaggaaaaaattcatgaggacaccaaggagatcaacgaaaaatccaatattctatcaaacgaaatgaaggcaaagaacaaagatgtcaaagatacagagaaaaaactgaataaaataacgaagttcatcgaggaaaataaagagaagtttactcagttggacttggaagatgtgcaagtgcgtgagaagttgaaacacgccaccagtaaggccaaaaagttggagaagcaactgcaaaaagacaaagaatag

SEQ ID NO: 26368 - DNA, 1113 bp, synthetic construct
  source 1..1113: mol_type = other DNA; note = Synthetic coding sequence
atggaggagggcgtgccctgccccgcccccgccgccaagctgacccctcccgttaagaagtcacaggatatgcatgacgaacgaagcaagctggtaaatgagtatgcttgccgagtgctggagctgctgggaatgggccaccgcctcttcgttccccgcctcctggccacttccaaggaggatctgctccaggcagactttgaaggagccctcaagttttttagggtacagctgccgaagagataccgggcggaagagaacgctcgcagactaatggagcaagcctgcaatatcaaggtacccactaagaaattaaagaagtacgagaaagagtatcagactatgcgggaaagccagttacagcaggaggaccccatggataggtataagagggagaacagaaggttgcaggaggccagtatgaggctggaacaggagaacgacgacttggcccatgagctggtgacatccaaaatcgcactgagaaacgacttagatcaggctgaagacaaagcggacgtcctgaataaagagctgcttctgactaaacagcgacttgtcgagacagaggaggaaaaacgcaagcaggaagaggagaccgcacaactcaaggaagtttttaggaaacaactggagaaggctgagtatgagattaaaaagaccactgcaattatcgcggagtataagcagatctgcagccaactgtctacgcgcctcgaaaagcagcaggctgcttctaaggaagagctggaagtggttaaaggtaagatgatggcctgtaagcactgctccgacatcttttctaaagaaggagccttgaaactcgccgcgacagggagagaggaccaggggatagaaacagatgacgagaaggattccctgaaaaagcagctgagagaaatggagctggagctggcccaaaccaaattgcagctggtggaggctaagtgtaaaatacaggagctggagcaccagcggggagccctgatgaatgaaatccaggccgctaagaactcctggttcagcaaaacactgaattctatcaagactgcaacgggaacacagccactacaacctgcccctgtgacgcaaccacctaaggagagtacatag

SEQ ID NO: 26369 - DNA, 2262 bp, synthetic construct
  source 1..2262: mol_type = other DNA; note = Synthetic coding sequence
atgtacagccccatcatctaccaggccctgtgcgagcacgtgcagacacagatgtccttgatgaatgatctgacaagcaagaacatccctaacggtattccagcggtgccctgtcacgcaccgagtcacagcgagagccaggctacccctcactcttcctacggtttgtgcacttccactcctgtgtggagtctgcagaggcccccgtgtcctccgaaggtgcactccgaagtacaaaccgacggcaacagccagtttgcatctcaaggtaaaactgtttccgcaacctgtactgacgttttgcgcaattcttttaacacttctcccggcgtaccgtgctccctgccaaagaccgacatcagcgccattccaacactgcagcaactagggctggtgaacggcattctgccgcagcagggaatccataaagagacggacctcctgaagtgtattcagacatatctctctctatttcgctcacacggcaaagagacccaccttgacagccagacgcaccgaagcccaacacagagccagccagcttttctggccacaaacgaagaaaagtgcgcaagggaacagattcgcgaggccacctctgagcgaaaggacttaaatatccacgtcagagatactaaaacagtaaaagatgttcagaaggctaagaacgtcaacaagacagcggagaaggtgaggattatcaaatatttacttggagagctgaaggccttagtcgcagagcaagaggacagcgagattcagcggctcattaccgagatggaggcgtgcatcagcgtgttgcccaccgtgtcaggcaacacagacatccaggtcgagatcgccctggcaatgcagccgctccgcagcgaaaatgcgcagttgaggcgccaactccgaattctaaatcaacagctacgagagcagcagaagacccagaaaccatcaggagcagtggactgtaatctagaactgttttctctccagagcctgaacatgtccctgcagaatcagcttgaggaatcattgaaatcacaggagctgctgcagtctaagaatgaagagctcttaaaagtgatcgagaaccagaaggatgagaacaaaaagtttagctccatatttaaggacaaagaccagacaattctcgaaaacaagcagcagtatgacattgaaatcacacgaattaaaattgagctcgaagaggccctggtcaatgtgaagtcttcccagttcaaactggaaacggccgagaaagaaaaccaaatcctgggtattactttaagacagcgcgacgccgaagtgaccaggctgcgcgagttaacgcgcacactgcaaaccagtatggctaagctcctctctgaccttagcgttgatagtgccaggtgcaaaccagggaataatctgaccaaaagtctgctgaacattcacgacaaacagttgcaacacgatcctgcccccgcgcacacgtcaattatgtcatacctcaacaagctagagacgaactatagtttcacccatagcgaaccactgtccaccatcaagaacgaagaaaccatcgagccagataagacctatgagaacgtcctcagttccagaggtccgcaaaactccaacactcgggggatggaggaggcaagtgcccccggtatcatcagcgcactttccaagcaggattccgatgagggtagcgaaacaatggcactgatcgaggatgaacataacctggataataccatttacatcccttttgcaaggagcacgcccgaaaaaaagagccctctgtccaagagactgagtcctcagcctcagatccgtgctgcgacaactcagttggtgtccaactctggactggccgtgagcgggaaggaaaacaaactgtgtacccccgtcatatgctccagtagcaccaaagaggccgaggacgcaccagaaaaactctcccgcgctagtgatatgaaggacacacaattactgaagaaaattaaagaggcaataggtaaaattcctgccgcaacgaaagaacctgaagagcagaccgcttgtcacggaccctcggggtgtttaagtaatagcctgcaagtaaagggcaacaccgtgtgtgatggctccgtgtttacgtctgatctcatgagtgactggtcaatctcatcattttccaccttcaccagccgcgatgagcaggattttcgtaacggcctggctgcgttagacgccaacatcgccagactgcagaaatctttacgcactgggcttctcgaaaaatag

SEQ ID NO: 26370 - DNA, 2067 bp, synthetic construct
  source 1..2067: mol_type = other DNA; note = Synthetic coding sequence
atgagcgtgaacagcgagaagagcagcagcagcgagcggcccgagccgcagcaaaaggctcccctggtaccccccccacctcccccccctccacctccacctccgccacttccagatcccacgccacctgaaccggaggaggagatcttaggaagtgacgatgaagaacaggaggatcccgcagactattgtaaggggggttatcaccctgtcaagattggggacctgtttaacggtagatatcacgtgatccggaagttagggtggggtcatttctcgacagtgtggctttgttgggatatgcagggcaaaaggtttgttgccatgaaagtggttaagtcggcacagcattataccgaaacagcactcgatgagatcaagcttttgaaatgtgttcgagagagcgacccatctgatcctaacaaagatatggtcgttcagttaatagatgattttaaaatctcaggcatgaacggtattcatgtgtgcatggtcttcgaggtgctcggtcatcacttgctgaaatggataataaagtccaactatcaggggctgcctgttaggtgcgtaaaaagtatcattagacaggtcttgcagggtctcgactacctacatagcaagtgcaagatcatccacacagacattaagcctgagaacatcctgatgtgcgttgacgatgcgtacgtcaggcgtatggctgctgaggcaaccgagtggcagaaggcgggcgctccccccccctcgggctctgcagtgtctactgccccgcagcagaagcccatcgggaagatcagtaaaaataaaaaaaagaaactgaagaagaagcagaagaggcaggccgagctgctggagaagaggcttcaggagatagaagagctggagagagaggccgaaagaaaaatcattgaagaaaacataacaagcgcagcaccctcgaatgatcaggacggggaatattgtccggaagttaagctgaagactacaggcctggaggaagcagcggaagcggagaccgccaaagataatggtgaagcagaggaccaagaagaaaaggaggatgccgaaaaagagaacatcgaaaaagacgaggatgacgtagatcaagaactggcgaatattgaccccacctggattgaatctcctaaaacaaacggtcacatcgagaacgggccgttttctctcgaacagcagttggatgacgaggatgacgatgaggaggactgccccaacccagaagagtacaatctggatgaacccaatgctgagagcgattacacatattctagctcgtacgagcagttcaacggggaattgcctaatggccgccacaagatccccgagagtcagttccctgagtttagcacaagccttttctccggatccctggagccagtagcgtgtggctcagttctttctgagggatcccccctcaccgaacaggaagagtctagtcccagccatgatcggtcacgcaccgtgtctgcgtccagcactggcgatctgcctaaggccaaaaccagggcggctgacttgcttgttaatcccttggatcccagaaacgccgataaaatccgcgtaaagatcgcagatctgggcaacgcgtgctgggtccataagcacttcaccgaggacatccagactcgacagtatagatctatcgaggtacttatcggggcaggatattcaacacctgcggacatctggtctactgcttgtatggctttcgaacttgcaacaggtgattacctttttgaaccacactccggcgaggactactccagggatgaggatcatatcgctcacatcatcgagctgctggggagcatccctcggcattttgctctatccgggaagtactctcgtgagttcttcaatagacgcggagaattgcggcacatcactaaactgaagccgtggtcccttttcgatgtcctggtcgaaaaatacggttggccccacgaggacgcagcccaattcacagactttctcatccctatgctggagatggtgcccgaaaaaagagcatcagccggcgaatgtctgaggcatccttggctgaactcatag

SEQ ID NO: 26371 - DNA, 543 bp, synthetic construct
  source 1..543: mol_type = other DNA; note = Synthetic coding sequence
atgccccggaagggcacccagcccagcaccgcccggcggcgggaggagggacccccccctccctcgcctgatggtgcctctagcgacgctgaacccgaacctcccagcgggaggaccgaaagtcctgccaccgccgctgagactgcctctgaggagttggacaaccggtcactggaggagattctgaacagcatcccaccacccccccctcctgcaatgaccaatgaagcaggagcgcctcggctgatgattacccacattgtcaatcaaaattttaagagctatgcaggggaaaagatcttgggtccttttcataagcgcttctcatgcatcattgggccaaatggttcaggaaaatcaaatgttatcgactcgatgctgtttgtgtttggttatagggctcaaaaaatacggtccaagaaactgtctgtactgattcacaacagtgacgagcacaaggacatacaatcctgtacagtagaggtacactttcaaaagataatcgacaaggagggtgatgactacgaagtgattcccaattag

SEQ ID NO: 26372 - DNA, 4689 bp, synthetic construct
  source 1..4689: mol_type = other DNA; note = Synthetic coding sequence
atgcccggcgaggccgcccgggccgagctgctgctgcccgaggccgataggccgggtccacgtactgacctgagttgcgatgcagcagccgccactaccattctcggaggggacagaagggagccgtgtgccttgacaccgggcccaagccacttggcccttacattcttaccatccaagccaggcgctcgacctcagccggaaggcgcaagctgggacgccgggcctggaggagcaccatccgcatgggctgacccaggagagggcgggcccagccctatgctccttccagaaggacttagttcccaagcgctgtcgaccgaagcgccactcccagcaactctggagcctaggattgtgatgggagaggagacctgtcaagcgctgctgtccccgcgagcggccaggacagcactccgtgaccaggaggggggccacgcctcaccggacccaccaccggagctgtgcagccagggggacctgagcgtgccaagtcctcctccagatcccgatagcttctttacccctcccagtacgcctactaagaccacatacgctcttctgccagcttgcgggccacatggagacgctcgagacagcgaggctgagctgcgcgacgagctgctcgacagcccccccgcttccccgagcgggagttacattaccgcggatggcgattcttgggctagcagccccagttgtagcctatccctacttgctccagccgaggggttagacttcccctccggatggggcctgtccccccaggggtctatggttgacgagcgagagctccatccggccggaactccggaaccaccctccagtgagtccagcttgagtgctgattcctcttcctcttgggggcaggaggggcacttctttgacctcgacttcttggcaaacgatcccatgatccccgcggctttgctgccctttcagggatccctgatcttccaagtggaggccgtggaggttactcctctgtctcctgaagaagaagaggaagaagcagttgcggaccccgaccccggaggtgacttggccggcgaaggcgaagaggactcaacctctgcctccttcctgcagtcactctctgatctgagtattactgaggggatggacgaggcatttgcgttcagggatgatacatctgctgcatcctctgacagtgattctgctagctatgccgaggccgacgatgaaagattgtacagcggagagcctcacgcccaagccactttgctccaagactccgtccaaaagacagaagaagaatccggcggaggcgcgaaaggactgcaggcccaagacggtactgtgtcctgggccgttgaggccgcacctcagacatcagaccgcggagcatatctgtcccaacgtcaagaactgattagtgaggttacagaagaaggtttagccctcggacaagagagcacggctacagttacccctcacacgctccaggtggccccagggctgcaagtcgaagtggcaaccagagtgactccccaggctggagaggaagagactgatagtaccgcgggtcaggagagcgcagcaatggccatgcctcagccatcccaggagggaatttctgaaattctgggacaagagagtgtgaccgccgagaagctccccacgccacaggaggaaacaagtctcacactgtgccccgactcgcctcagaatctcaaggaggagggcggtctggacctaccctctgggcgtaagcccgtggctgccgccacaatcgttcctcggcaggcgaaggaggacttgactttgccccaagatagcgctatgactccacctttacctttgcaggacactgatctgtcaagcgctcctaagcctgtcgcagccgccaccatcgtcagccagcaggcagaggaagggctaaccttgcctcaggacagcgtgatgacgccaccacttcccctgcaggacactgagctctcatcagctcccaaaccggtcgccgcggcgacccttgtaagtcagcaggcggaggaaggcctgacattacctcaagactcagccatgaccccccccctccccctccaggacactgatctgtcttctgccccaaagcctgttgccgcggccactctagtgtcgcaacaagctgaagagggtctgactctgccccaagatagtgctatgactcccccgctgccattgcaagacactgatctttcgtctgccccaaagcctgtagcagcggccacgctggttagtcagcaagcggaggaaggacttactctcccccaggatagtgcgatgactcctcctctccccctccaggatacggatctatcaagcgccccaaaacctgttgccgcagccaccattgtgagccagcaggccgaggaaggtctgacactgccacaagattcagctatgaccccacccctacctctacaagatacggacctctcttctgctcctaagccggtggctgccgcaaccatcgtgagccaacaggctgaagagggccttacactgccgcaggactccgctatgacaccaccactcccgctccaagataccgacttgagctccgcaccaaagcccgtagccgcagctaccccggttagccagcaggcagaagagggtcttactttaccccaagatagtgcaatgacaccacctctccccctgcaggatacagacctgagttcggccccaaaacctgtcgccgccgccacaccagtgtcacagcaggcagaggaaggcttgaccctgccccaggattcagctatgaccgcccctctccctttgcaggataccggccccacgtcagggcccgagccattggccgttgcgacgcctcagacactgcaggcagaggctggctgtgctcccggaacagaaccggtggctactatggcacagcaggaggtgggggaggcattaggcccgaggccggcaccagaggaaaaaaacgccgcactgccaactgtgcccgagccggcagccctggatcaggtccagcaggatgacccccaaccggccgccgaggccgggacaccctgggcagcgcaggaggacgcggatagcacactgggcatggaggccctgagcttgccagaaccggcatccggagctggagaagaaatcgcagaagccttgtcgcggccaggtagggaggcatgcttagaggcccgggctcataccggagacggcgctaaacctgactccccacagaaagagactctcgaggtggagaaccagcaggagggcggtctcaagccactagcccaggagcatggacctcgttcagccttgggcggagcaagagaagtgcccgacgctcccccggcagcttgtcctgaggtgagccaggcaaggctgctgtctcccgccagggaggaacgcggcctaagcgggaaatctacccctgagcccaccttaccctctgcggtagctaccgaggccagcctggactcctgccctgagagctcagtaggcgccgtctcaagcttggacagaggttgcccagacgctcctgctccaaccagcgcccccacgtcccaacagcccgaaccagtactgggtctgggaagcgtggagcagccacacgaagtgcccagcgtcctgggaaccccccttctgcagccgcctgagaatctggccaaaggtcagcccagtacccccgtagaccggcctctgggaccagatccatcagcccctggtacgctcgcgggtgctgcacttcctccattagagccccctgccccctgcctttgccaggatccccaggaggattctgtagaggacgaggaacctccgggatccctcgggcttccgccaccccaggcgggtgtccagcccgctgccgcagctgtctcgggaaccacccagcccttgggcactggcccccgggtcagtcttagcccacattcacccctgttgtctcctaaagtcgccagcatggacgccaaagatcttgcactacagatcctgcctccatgccaagttccccccccctcgggtccgcagtctccagccggcccccaaggactgtctgcgcccgaacaacaagaggatgaggactcactcgaggaagactcaccccgagcgctgggatctggacagcactcagactctcatggggagtcatcagccgagctagacgagcaggacattcttgctccccagaccgtacagtgccctgcgcaggctccggctggaggctcggaagagacaatcgcaaaagccaagcagtcccggagcgagaaaaaagctaggaaggctatgagtaaacttggccttcgccaaattcagggagtcacacggataacaattcagaagagcaaaaatattctgttcgtgatagctaaacccgacgtctttaagtctcctgcatcagatacttatgtcgtgttcggagaagcaaaaattgaggacctgagtcaacaggtccataaagcagcagcggagaagttcaaggtccccagcgaaccatctgcgttggtacccgaaagcgctccccggccacgcgttaggctcgagtgtaaggaggaggaggaagaagaagaggaggaagtcgatgaggccgggcttgagctgagagacatcgaactggttatggcccaagccaatgtgagccgtgccaaagctgtccgcgcgctgcgcgacaatcattctgatatcgtcaacgctatcatggagctgactatgtag

SEQ ID NO: 26373 - DNA, 3294 bp, synthetic construct
  source 1..3294: mol_type = other DNA; note = Synthetic coding sequence
atggccgccgccgccgccgagcagcagcagttctacctgctgctggggaatctcctaagccctgacaatgtggttcggaagcaggctgaggagacgtacgagaatattcccggccagtctaaaattacttttctgctgcaggccatccggaatacgacagcagcagaggaagcacggcagatggccgccgtgctactgcggagactgctgtcgtccgcattcgacgaagtctatccagctttgcccagcgatgttcagacagccatcaagagcgagcttctaatgatcatacagatggaaacacaaagttctatgcgcaaaaaggtatgtgacattgccgcagaacttgctaggaatctcatcgatgaagacggaaacaaccagtggcccgagggtctcaaattcctgtttgacagcgttagcagtcagaatgtgggactgagggaggctgctcttcatatcttctggaactttccaggcatcttcgggaaccagcagcagcattacctcgacgtaatcaaacgcatgttagtgcagtgcatgcaggatcaggaacacccatctatacggacactatccgcacgggcaacggctgcctttatccttgcaaacgagcacaatgtggcattgttcaagcattttgccgaccttcttccaggattcctacaagctgtaaatgattcatgctaccagaatgatgactctgtgctgaaaagcctcgtggagattgcagacacagtgcccaagtatttacgacctcacctggaggcgacacttcaactgagcctgaagctttgtggggatacctccctgaataacatgcagcgacagttagcgctggaagtcatcgtgacattaagtgagaccgccgccgccatgctcaggaagcatactaatatagtcgctcagaccattcctcagatgctagctatgatggtggatttagaagaggatgaagactgggcaaatgcagacgagttggaagacgacgatttcgattcaaatgcagtggctggcgaatccgcacttgataggatggcctgtggcctcggcggtaagctcgtgcttcctatgataaaggagcatattatgcagatgctacagaaccctgactggaaatatcgacatgctgggcttatggcactgagcgcaataggggagggttgtcaccaacagatggaggggatccttaacgagattgtgaacttcgtcttactcttcttgcaggacccccaccctagggttcgctacgctgcctgcaacgctgtcgggcagatggcaactgactttgcccccggatttcagaaaaagtttcatgagaaagtcatcgctgctctgctgcagacaatggaggatcagggcaatcagagggtgcaggcgcacgctgctgccgctttaatcaatttcactgaggattgtcctaaatcattactaatcccgtatctcgataaccttgtgaagcacctgcactcaattatggtactgaaactccaggaactgattcagaaaggtaccaagctggtccttgaacaggtggtgacgtcaattgcctctgtggccgataccgccgaggaaaaatttgtcccctattatgatctgttcatgccgtctcttaagcatatcgtagagaacgccgtccagaaggagttgcgccttctcagagggaaaactattgagtgcatatcactgatcggacttgccgtgggaaaggaaaagtttatgcaagatgcttctgatgtgatgcagcttctcctcaagacccaaactgactttaatgatatggaagacgacgacccgcagataagttacatgatatcggcttgggcgcgtatgtgtaagattcttgggaaggagttccagcagtatctcccggttgtgatgggaccgctgatgaagacagcctctatcaagccagaagttgctctgttagacacacaggacatggaaaacatgagtgatgacgacggctgggaatttgttaacctaggggatcagcagagttttggcataaagacagcaggtctagaagagaagagcaccgcatgtcagatgttggtctgttatgcaaaagagctgaaggaaggctttgttgagtacactgaacaggtggtgaagttgatggtccccctgctcaaattttattttcacgatggcgttcgggttgccgctgctgagtctatgccattgctgctcgagtgtgcacgggtccgaggaccggagtatctgacccagatgtggcacttcatgtgcgacgcacttattaaggctattggcacagagccggactccgacgtccttagcgaaattatgcacagcttcgcaaaatgcattgaagtcatgggggatggatgtctgaacaatgaacatttcgaagaattaggagggatcctgaaagctaagctggaggaacatttcaagaaccaggagctgaggcaggttaaacgacaggatgaggattacgatgagcaagtggaggaaagcctccaggatgaggatgataacgacgtctacattctcacaaaggtttcagacatccttcactctatctttagcagttacaaggaaaaagtactgccctggttcgaacagttacttccgcttatcgtgaatttgatttgtcctcacagaccctggcctgacaggcagtggggtctgtgcatttttgatgacgtgattgaacattgtagccccgcgtcttttaagtatgccgagtactttctaagaccaatgctgcaatatgtgtgcgataactccccagaggtgcggcaggccgccgcgtatggcctgggcgtgatggctcagtatggcggcgataactacaggcctttctgcactgaagcactgccgctactggtgcgagtgatacagagcgcggactcgaagacaaaggagaacgtcaatgcaactgagaactgcattagcgcagtgggaaagataatgaagttcaaaccagactgtgtgaatgtggaggaagtactgcctcactggctctcgtggcttccactccacgaggacaaggaggaagccgtgcagacttttaattatctttgtgacctgattgaaagcaatcaccccatagttctggggccaaacaacactaacttacctaagattttctctatcatagcagaaggagaaatgcacgaggccattaagcatgaagacccctgcgcgaagaggttagcaaacgttgtgcgtcaagtgcagacctctggcgggctgtggactgaatgcatcgctcagttaagtccggaacaacaggcggctattcaggaactgctgaattctgcttag

SEQ ID NO: 26374 - DNA, 1011 bp, synthetic construct
  source 1..1011: mol_type = other DNA; note = Synthetic coding sequence
atgaaggccaccgccatgaccagcgcctggctggcccagggcggcgctcacgtgaccattaatgcccgcgcagaggaagatgtggagccggagtgcataatggagaaggtagccaaggcctccggcgctaattactctttccacaaagagagtggccggttccaggacgtgggaccgcaggccccagttggatccgtgtaccaaaagactaacgctgttagtgaaattaagcgcgttggaaaagatagtttctgggctaaagcggaaaaagaggaagagaacaggaggctggaggagaaacgtagggcagaagaggctcagaggcagcttgagcaggagcggcgcgagagggaattgcgcgaagccgccagaagagaacagagatatcaagagcagggcggggaagctagcccacagagcaggacatgggaacagcagcaggaagtagtgtctaggaacaggaatgagcaggagagcgcagtgcatccccgtgaaatttttaagcagaaagagcgtgcaatgagcacaacctctatttcttcccctcagccaggcaagctgagatctccttttttacagaagcaactcacacagcccgaaactcatttcggtagagaacctgccgctgctatttcccgccccagggccgatctgcccgccgaggagcccgctccaagcactcccccctgcctcgttcaggctgaggaagaggctgtttatgaagaacccccggagcaagagactttctacgagcagcccccacttgtgcaacagcagggagcaggatctgaacacatcgatcatcacattcagggccaggggctatccggccaaggtctctgcgcccgagccttatatgactatcaggctgcggacgatacagaaatcagcttcgaccctgaaaacttaataaccggtatcgaagtaattgatgaaggctggtggcgagggtatggccccgatggacacttcggcatgtttcccgctaactacgtggagttgatcgagtag

SEQ ID NO: 26375 - DNA, 78 bp, synthetic construct
  source 1..78: mol_type = other DNA; note = Synthetic coding sequence
atgtggatgcacgtggccaaggtgcaccccaagggcggcgagatggtgggcgcgattcggaatgcagctttcttatag

SEQ ID NO: 26376 - DNA, 312 bp, synthetic construct
  source 1..312: mol_type = other DNA; note = Synthetic coding sequence
atggccgagctgatccagaagaagctgcagggcgaggtggagaagtaccagcaactgcaaaaggacctttccaaaagtatgtcgggaagacagaagctggaggcacagctcacagagaataatattgtgaaggaagaattagcgctgctggatgggtctaatgtcgtgttcaagctcctcggccccgtccttgttaaacaagagctcggcgaagcaagggcaaccgtgggaaagcggctggactatataacagctgaaattttcctgcgcacaatcccggatcccggggacgttcctgactcgtttttctag

SEQ ID NO: 26377 - DNA, 4101 bp, synthetic construct
  source 1..4101: mol_type = other DNA; note = Synthetic coding sequence
atggccgacaccgacctgttcatggagtgcgaggaggaggagctggagccgtggcagaaaatatctgacgtcatagaggactcagtggtagaggactacaattccgtggacaagacgactacagccggaaatccactggtgcaacagggcggtcaaccgctaatactaacccagaatcccgctcccggcctgggtacgatggtgacacagccggtcctgcggcccgtgcaggtgatgcagaatgctaatcatgtgaccagctcccctgtggcctctcagccaatctttataacgacacagggttttccagtcaggaatgtgagaccagtgcagaatgctatgaaccaggtggggatcgttctgaatgttcagcagggtcagacagtccgcccaataacattggtgcctgcacctggaacacagttcgtgaagccaacagtcggggttccacaagtcttcagccagatgacccctgtgcggccaggttccactatgcccgttagacccacgaccaataccttcacaaccgtgattcctgcgacgctcacaattcgcagcacggtgccacagagtcagagtcagcagacgaagtctacgccgagcacaagtaccacccctacagcgactcagcctactagcctgggtcagcttgctgtgcagtcgcctgggcagtctaatcaaaccacaaaccctaagctcgctcctagctttccatctcctcccgcagtgagcatcgccagcttcgtgacagtaaaacggcccggtgttaccggcgaaaatagcaatgaggtggccaaactcgtaaatacactcaatacaataccaagccttggacagtcccccgggcccgtggtcgtgtcgaacaattcctcagcccacggcagtcagcggacctcagggccagaaagttcgatgaaagttacatcttcaattccggtgttcgacctccaggacggagggcgcaagatctgtcctcgctgcaacgcccagttccgagtgactgaggctctacgtggacacatgtgttattgctgtcccgagatggttgaatatcaaaaaaaaggcaaaagcctggacagcgagccgtccgttcctagcgcagccaaacccccaagccccgaaaagacggcaccagtcgcatcaactccctcaagcacgccaataccagctctgtcgcctcctaccaaggtgcccgagcccaacgagaatgtaggcgatgccgtgcagacgaaactgatcatgcttgttgacgatttttactacggacgcgacgggggaaaggtggcccaattaaccaactttcctaaggtggctacctcctttcgatgcccccactgcactaagagactgaaaaataacatccgcttcatgaatcacatgaagcatcacgtcgagctcgatcagcagaatggggaagtggacggtcataccatttgccagcactgttacaggcaattcagcacgccgttccagctgcagtgtcaccttgaaaatgtgcattccccatacgagtcgacaactaagtgtaaaatctgcgagtgggccttcgagtccgagcccctgttcctacaacatatgaaagatacccataagccaggcgaaatgccgtatgtgtgtcaaccttacttcccaagctacgtcacacaggtttgccagtaccgcagctctctctattcagaagttgatgtgcatttccgcatgattcatgaagacacaagacacttactctgcccctactgcctgaaagtgtttaaaaatggcaatgccttccagcagcattacatgcggcatcagaaacggaatgtctatcactgtaacaaatgcaggctgcaattcctttttgccaaagacaagatcgagcacaagctgcaacatcacaagactttccgtaaacctaagcagcttgaaggcctgaagccaggcacgaaagtcacaatacgtgcctctaggggacagcccagaacagtgcccgtgtcctcaaatgacacaccccctagcgctctgcaagaagccgcccctttaacgagttccatggacccgctgccagttttcctctaccctccagtccaacgatctattcaaaaacgcgcggtgcggaaaatgtccgttatgggccggcagacttgtctggaatgctcattcgagattcctgattttccgaaccatttcccaacatatgtacattgctcactttgtagatactccacttgctgcagcagggcttacgcaaaccacatgattaataatcacgtgcccagaaagtcccctaaatacttagccctgtttaaaaattcggtcagcggcatcaaactcgcttgtaccagttgcaccttcgtcacttcagtgggcgatgctatggcgaaacatctggtctttaatccttcacaccggagcagctccatcttgcctcgggggctgacttggatagctcactcacgccatggccaaaccagggaccgggtgcacgatcggaatgtgaagaatatgtaccctccaccatctttcccgaccaacaaagcagccactgtgaagagcgctggagcgacacccgccgaacccgaagagctgctgacccccctggcccccgctctcccaagcccagcctctaccgcgacacccccacctacacctacccacccccaggccctcgcgctgccccctttggccaccgagggtgccgagtgtctgaatgtcgacgaccaggacgagggctcacctgtcacacaagaaccagagctggcttcaggcggaggcgggtcgggaggtgttgggaaaaaggaacagctttcagtaaagaagcttagagtcgtgctgtttgcactttgctgtaacaccgagcaggccgctgagcactttcggaacccacaacgaaggattcgtcgctggctgcgccggttccaggcatcccagggcgagaacctggagggaaagtatttgagttttgaggcagaggagaagcttgctgagtgggtgctgactcagcgcgagcagcagctcccggtcaatgaagaaaccctgttccagaaggctactaaaattggacgatcacttgagggtgggtttaagattagctacgaatgggccgtgagattcatgcttagacaccacttgaccccacacgcgcgcagagcagtagcacacactctgcccaaagatgtggctgagaacgccggactcttcatcgacttcgtgcaacgccagatccataatcaggatctgcctctttccatgatcgtcgccatcgatgaaatctcactgttcctagatactgaggtgctgagtagcgacgaccggaaagaaaacgcacttcaaaccgtgggaaccggcgagccctggtgtgacgttgtcttagctatcttagcggacggcactgtactgccaactcttgttttctatcgaggacagatggaccagcctgctaacatgcctgattccattctcttggaagccaaagaaagcggctactccgatgacgaaattatggaactgtggtccacccgcgtatggcaaaagcacactgcctgccaacggagtaagggcatgttagtaatggattgccatcgcacacacctgtcggaagaagtcctggctatgctttccgcaagctccacccttccagctgttgtgccagccggctgcagtagcaaaatccagccactggacgtctgcattaaaagaacggtgaagaacttcttgcacaagaagtggaaggagcaggcacgcgagatggccgacactgcctgtgactctgacgtgcttctgcagctggtgttggtgtggctgggggaagtgttgggggtcatcggtgattgccctgagctggttcagagatcctttctcgtggcatccgtgctgcccggtcctgatggcaacattaattcgcccactcgaaatgccgacatgcaagaggagttgatcgcaagcctggaagagcagctgaagctgagtggggagcacagtgagtcctcaactccacgtccccggagctctccagaagagacaatagaaccagagtccctgcaccaactgttcgagggggagtctgagaccgaatccttctacgggttcgaagaggccgacctggatctaatggaaatttag

SEQ ID NO: 26378 - DNA, 564 bp, synthetic construct
  source 1..564: mol_type = other DNA; note = Synthetic coding sequence
atggacatcagcaagggcctgcccggcatgcagggcggcctgcacatctggattagtgagaataggaagatggtcccggtgccagagggtgcgtacggcaacttctttgaggaacattgctacgtgatcctgcatgtccctcagtccccaaaagcaacgcagggtgcttcttctgacctccattactgggtgggaaaacaggccggcgcagaggcccagggcgcggccgaagcttttcagcagcggcttcaggacgagctcggcggccagaccgttttgcatcgagaagcgcagggacacgagtccgattgtttctgctcttactttaggccaggtatcatttacaggaaaggtggtctagcatccgacctgaagcacgtggaaacaaacttatttaacatacagagattgctgcacatcaaaggacgtaaacacgtgagcgctacagaagtggagttatcgtggaactcctttaataagggcgatatcttcttactcgatctgggcaagatgatgattcagtggaatggcccaaagactagcatctcagagaaagctcgatag

SEQ ID NO: 26379 - DNA, 1329 bp, synthetic construct
  source 1..1329: mol_type = other DNA; note = Synthetic coding sequence
atgcccctggagaacctggaggaggagggcctgcccaagaaccccgacctccgaatcgcccaactccgtttcctccttagcctgcccgagcacaggggagatgccgccgttcgagatgaacttatggctgccgtcagggataataatttttggaacagaatccgacaggagcaaaccgaagattgtccacctagctctccttctcggggttggcactgccaggattggccttcaagaaaaccaccaacctcgattcgattgtgcttcgccaaacccatcattaagcggcaccggatgccgagctacatggctccgtactacgaggccctgtgcaaaagcctggactggcaaattgacgtcgacctgctgaataagatgaagaaggccaacgaggacgagctcaaacggcttgatgaggaactggaagatgcagagaagaatctgggcgagagcgagattcgtgatgccatgatggctaaagctgaatacctctgcaggattggtgacaaggaaggcgcactgaccgcctttcggaagacttatgataagacggttgctctggggcaccgcttggacatcgtcttttacctcctcagaattgggctcttctacatggacaacgatctcatcacaaggaacactgagaaagcgaagtccttgattgaggaggggggggactgggaccggaggaaccgactgaaggtgtaccagggcctgtattgcgtcgccatccgggactttaagcaggcggctgagctctttttagatacggtttccacctttacatcatatgagctgatggattacaagactttcgtgacttacactgtttatgtctccatgatagcccttgaacgtccagatctgagagaaaaagtcattaagggcgctgaaatcttggaggtgctgcattcccttcccgccgttcgtcagtatctgttctctctgtacgaatgcaggtactccgtgttcttccaatccctggctgtcgttgaacaggaaatgaagaaggattggctgtttgctccacactatagatattacgtccgagagatgaggatccacgcctatagtcaactgctcgagtcatataggtctctcacgctcggctacatggccgaagctttcggcgtcggcgttgaattcatcgaccaggagctgtcacgattcattgccgctggaagactgcactgtaagattgacaaagtgaacgagatcgtcgagactaataggcctgatagcaagaattggcagtaccaggaaaccatcaaaaagggcgatttactcctcaatcgagtccagaaactatcacgggtcattaacatgtag

SEQ ID NO: 26380 - DNA, 333 bp, synthetic construct
  source 1..333: mol_type = other DNA; note = Synthetic coding sequence
atgctgtgctggggcaacgccagcttcggccagctgggcctgggcggtatcgacgaggagatcgttcttgaacctaggaaaagcgacttctttattaataaacgagtcagagatgtaggctgtgggctgagacatacagtgttcgtacttgacgacggaaccgtctatacttgcggatgcaatgacttaggacagctcgggcatgagaaatcacggaagaagcctgaattcagatcttgcttccccgggagaagtgcaatggcaccatcccgcctcactgctacctcagcatctcaagtgcaagccattctccttcctcaaccaccagagtag

SEQ ID NO: 26381 - DNA, 930 bp, synthetic construct
  source 1..930: mol_type = other DNA; note = Synthetic coding sequence
atggtgtgctggcagagcgtgagcgtgtggagcgtggccggccgggtggagatgaccgtgagcaaatttatggctatacagaaagccctccagcctgattggtttcaatgtctgtcagacggagaggtcagttgtaaggaggcgacatctatcaaacgcgttcggaaatctgtcgaccgatctctgctctttttagacaattgtctgcgccttcaggaagaaagcgaagtcctccagaagagcgtgattatcggcgtcatcgaaggtggcgacgtgatggaggagaggctaaggagtgctcgggagacagctaaaagaccggtggggggcttcctgttagacggttttcaaggcaatccgacaacccttgaggcccgactccgtctgctctcatccgtcacggcggagctgcctgaggataagcccaggttgatatctggcgtgagccgacccgacgaagtcctcgagtgtatcgagcgaggcgtagatctcttcgagtccttttttccctatcaggtgacagaaaggggatgtgctctgaccttcagcttcgattaccagcccaatcccgaggagaccttgctacagcagaacggtacccaggaggagatcaaatgtatggatcagatcaaaaagattgaaaccaccggctgcaatcaagagataacatcctttgaaattaacctcaaggagaagaaatatcaggaagacttcaacccgctggtacgcgggtgctcatgttattgttgcaaaaaccacacgcgcgcatacattcaccacctattagtcactaacgaactactcgccggcgtccttctgatgatgcataacttcgaacattactttggattctttcattacatcagagaagccttgaagtccgataagttagcccaattaaaggagttaatccaccggcaggcctcatag

SEQ ID NO: 26382 - DNA, 384 bp, synthetic construct
  source 1..384: mol_type = other DNA; note = Synthetic coding sequence
atggtgctgatcctgggccggcggctgaaccgggaggacctgggcgtgagagattcaccagcgacaaagcgaaaagtattcgaaatggatccaaaatccctgacaggtcacgaattctttgacttcagctctggatcttcccacgcagagaacatactgcaaattttcaacgagttccgggatagtagattgtttaccgacgtgattatttgtgtggaggggaaggagttcccctgccacagagcagtcctgtcagcatgtagtagttactttcgcgcaatgttctgcaacgatcatagggaaagccgtgagatgctggtggagatcaatggcatcttggctgaggcgatggagtgcttcctccagtacgtctacacaggctag

SEQ ID NO: 26383 - DNA, 1581 bp, synthetic construct
  source 1..1581: mol_type = other DNA; note = Synthetic coding sequence
atggaggagatccccgcccaggaggccgccggcagcccccgggtgcagttccagtccctcgaaacacagtccgagtgtctctcccctgagccccaatttgtgcaggatacggacatggaacagggtctgacaggtggcttcccaatcagcaagcctgatggcatatcacagctggagcaggacctgcaggtatttgacctggagactaagactcgtgaagtgttaagagatgactgcagcgatggcgagacgagagaggagaacaaattgctcatcccaaagcaaaagatctcagaggaggtacattcctacaaggtaagggtgggccgcctgaaacacgatataacacaggttcctgaaacacgggaggtctacaaatctgaggatagacttgaacgcctgcaggagattctgcgcaagttcttgtatttagagagagaatttaggcagatcacaatttcaaaagagacctttacctccgagaagaataatgaatgtcatgagccggaaaaatcattttccctggacagtacgattgacgccgatcagagagttttaagaattcaaaatacagacgataatgacaaatatgacatgtccttcaatcaaaattcagcctccggaaaacatgagcacctgaacttaactgaagatttccagtcatccgagtgcaaggagtccctgatggatttgtcccacttaaacaagtgggaatccatacctaatacagaaaagagttacaaatgcgatgtgtgcggcaaaatttttcatcagtctagcgcattaacacgccaccaacgaatccacactcgtgagaagccttataaatgcaaggagtgtgagaagtcatttagtcaatctagctctttaagccggcacaaaaggattcacacccgcgagaagccatataagtgtgaagccagtgataagtcctgcgaggcctccgacaagtcctgctccccgagtagcggtatcatccaacacaagaaaatacatactcgcgcaaaatcttacaaatgctcgtcttgcgaaagggtcttcagcagaagcgtgcacctcacccagcaccagaagatccacaaggaaatgccgtgtaaatgcaccgtgtgcggatcggatttctgccataccagctacctgctcgagcatcagcgggtacaccacgaggagaaagcctatgagtatgacgagtacgggcttgcttatatcaagcaacaggggatccacttccgcgagaagccttacacctgttcagagtgtggcaaggacttccgcctgaactcgcacctgatccagcatcaacggatccacacaggggaaaaggcccacgagtgcaacgagtgtgggaaggcattctcacagacatcctgtctgattcagcaccacaaaatgcaccgcaaagagaagagctatgaatgcaatgaatacgagggatctttctctcacagcagcgacctcattttgcagcaggaagtgttgacgaggcaaaaggcctttgattgcgacgtatgggagaagaatagctctcagagagcacaccttgtgcaacatcaatcaattcatacaaaggaaaactcctag

SEQ ID NO: 26384 - DNA, 195 bp, synthetic construct
  source 1..195: mol_type = other DNA; note = Synthetic coding sequence
atgcccgaggaccaggtgggcaagctggaggccaccgagaacaccatttctgctatggcagctgcagccgccgaacagcaacagttttatttattgttagggaatctgctgtcaccagacaatgtggtgaggaagcaggccgaagaaacatacgaaaatattcccggtcagtcaaaaatcacctttctactgtag

SEQ ID NO: 26385 - DNA, 741 bp, synthetic construct
  source 1..741: mol_type = other DNA; note = Synthetic coding sequence
atggccgagcaggagcagcggaagatccccctggtgcccgagaacctcttgaagaagagaaaggcttaccaggcacttaaggctacccaggcgaaacaggcactgctggccaaaaaggaacagaagaagggcaaaggtctgcggtttaaacgactggagagcttccttcacgattcctggaggcagaaacgcgacaaggttaggctgcggagactggaggtgaaacctcacgctctggagctacctgataagcactcactcgcttttgtggtgaggatcgagcgtattgacggcgtgagcttgctggtccagcgtaccattgcccgcttgcgattaaaaaagatcttcagcggggtattcgtgaaggttacaccacagaacttgaaaatgctgcgcatcgtcgagccctacgttacctgggggttccccaatctgaaatccgtgcgagagctgatacttaagagggggcaggccaaagttaagaataagactatccctctcacagataatactgtaatcgaagaacatttgggaaaattcggtgtcatttgccttgaggatctgattcatgagattgcatttcccggtaaacactttcaggagatcagctggttcctgtgcccttttcacctcagcgtcgccaggcacgcgaccaaaaacagagtggggtttctgaaggagatgggaactcccggataccggggggaacgcatcaaccaactaatcaggcagctgaactag

SEQ ID NO: 26386 - DNA, 1296 bp, synthetic construct
  source 1..1296: mol_type = other DNA; note = Synthetic coding sequence
atggccgccaacctgagccggaacggccccgccctgcaggaggcctacgtgagggtggtgacagaaaagtccccgactgactgggccctgtttacctatgagggaaactcaaacgacatcagggtggctggtactggcgaaggaggactagaggaaatggtggaggagctgaactctggcaaagtgatgtacgctttttgcagagttaaagatccaaactccgggctgcccaagttcgtactgatcaactggacaggcgagggcgtcaatgatgtgaggaagggagcctgcgcatcccacgtgagcaccatggcctccttcctgaagggtgcgcacgtcacaattaacgcccgagccgaggaagatgtggaaccagagtgcatcatggagaaggtggctaaggcctctggggctaattactcctttcataaggaaagtggtcggtttcaggatgtgggcccacaagcccccgtgggaagtgtctatcaaaagactaatgccgtaagcgagattaagcgagtgggtaaggactcgttctgggccaaagcagagaaggaggaagaaaaccgtcgcctggaggagaagaggagggccgaggaggctcaacgccagttggagcaggagcgaagagagcgagagctgcgggaagcagcccggcgggaacagaggtatcaagaacagggtggagaagcgagccctcagtcccgcacgtgggagcaacagcaggaagtggtgagccgcaacaggaatgaacaagaatctgccgtgcatccaagggaaatcttcaagcagaaagaacgggccatgtccacaacctctatctcaagtccccagccaggtaagttaagatcccccttcttgcagaaacaactgacccaaccggagacccattttggccgcgaaccagccgccgccatatctcgtcctcgggctgatcttcctgcggaagaaccagccccaagtacaccaccttgcctggtgcaggctgaggaggaggccgtttacgaagagcctccagaacaggaaactttctatgagcaaccacctctggtccagcaacagggcgctggcagcgagcatatcgatcatcatatccagggccagggcctgagcggtcaggggttatgcgcacgggcgttatacgactaccaagccgctgacgacactgagatctcttttgacccagagaatctcattactgggatagaggttattgacgagggatggtggaggggatatggcccagacgggcatttcggcatgttcccggccaattatgtggagttgatcgaatag

SEQ ID NO: 26387 - DNA, 1854 bp, synthetic construct
  source 1..1854: mol_type = other DNA; note = Synthetic coding sequence
atgatcgagaagatgcagggcagccggatggacgagcagcggtgctccttccctccgcccctgaaaactgaggaggattacattccctatccttcggtgcacgaggtcttgggcagggaggggccatttcctctgatcttgttgccgcaattcgggggctattggatcgaaggaactaaccatgaaatcacctccatccccgagactgagccattgcagtctcccaccacaaaggtcaaactggaatgtaacccaaccgcaaggatctatagaaaacactttctcggtaaagagcatttcaactactatagcctggacgccgctcttgggcatctggtgttcagtcttaagtacgacgtcataggagaccaggagcatctccgactcctgttaaggactaagtgtcgcacataccacgatgtgatacccattagttgtctgaccgagtttcccaacgtggtccagatggcaaagctcgtttgcgaggacgttaacgtagacagattttaccctgtcctgtatcctaaagcctctcgcttgatcgtgacatttgatgaacacgtcatttctaataatttcaaattcggcgtgatctaccagaagcttggacagaccagtgaggaggagttgttttcgacaaatgaggaatctccggcttttgtcgagtttctggagtttctgggacaaaaagtgaagctgcaggattttaaaggattccggggtgggctggatgttacacacggtcagactggtacggaatccgtatactgcaattttcgaaacaaagagataatgtttcacgttagtacaaagttgccttataccgagggagacgctcagcagctgcagagaaagcgccacattggcaatgacatagtcgctgtggtgtttcaggacgaaaataccccattcgtgcctgacatgattgcttccaactttctgcatgcttacgttgtggtgcaggctgagggaggaggacccgacggtcccctgtataaggtttccgttacagcgcgcgacgacgttccattctttgggccacctctgccagaccccgcagtcttccggaagggaccggagtttcaggagttcctccttactaagctcatcaacgctgagtacgcatgttacaaagccgaaaagtttgctaagctcgaggagcgaacaagagctgctctccttgaaactctctacgaggaactgcacattcactcacagtctatgatggggctgggcggagatgaggataaaatggaaaatggcagtgggggagggggcttttttgagtcttttaaaagagtcattcgatctcgatctcaatccatggacgcaatgggcctcagcaataagaaacccaacaccgtgagtacttcccatagcggttccttcgcgcctaataacccagacctggccaaggcggcgggcatttcccttcttatcccagggaagtctgcaagtcgattcggtcgaagaggatccgccattggaatagggaccgtggaagaagtggtggttagaggcgcggccggctcagggggatgccttcatgccctatttagtgcaaggtctcaggacggcgggcatatcggggatgtggcccccctgccacccggccaggcccccgggcgggcgggttggtcgggcggatcatccgatggcacacagcaccttctgtggggattggtccccgttcccgagcctgtgcctttgactcgcgggttctggccctgccttgggccttgggatcctggtccggtgccagcccggattaggtatccaaaagccctgcacccagccgctcggccccctataagcccagtgtgcatggagaggcacccctctcctctaccatag

SEQ ID NO: 26388 - DNA, 1224 bp, synthetic construct
  source 1..1224: mol_type = other DNA; note = Synthetic coding sequence
atgggcaacaccagcttcaacgaggtgatggaggcccagctgccctcgcacggtggtcccaaaccatcagccgagtctgatatgggtactaggagagactacatcatggcaaagtatgtggagcatagattcgcaaggcggtgcacaccggagcctcaacgcctctggaccgcaatttgcaatagagacttgctgtccgtgctcgaagcctttgccaacggacaggactttggacaaccactgcccggcccagatgcccaagcgcctgaagaactggtccttcaccttgcagtgaaagtggccaaccaagctagcctgccactggtcgatttcatcattcagaatggtggccatctagatgcaaaagcggccgacgggaacactgcattacattatgcagctctttacaaccaacccgattgcttgaaactgctcctaaaaggaagagctcttgtgggcactgtcaatgaggctggcgagaccgctctggacatcgcaaggaagaagcaccacaaggagtgcgaagagctgctcgagcaagcccaagcaggtaccttcgctttcccactccacgttgattacagctgggtcatctcgaccgaacctggttcagactcagaggaggatgaagaagagaaaaggtgtctgctgaagctccccgcccaggcacattgggcctcaggtcggctagacatttctaacaaaacatacgagactgttgcgagcttgggggctgccacccctcagggagaaagcgaagactgtcctcctcctttgcccgtgaaaaattcaagtcggactttggtccagggttgcgctcgccatgcgtcaggcgaccggagcgaagtctcttccctatcaagcgaagctcccgagacacctgaaagtcttggtagccctgcaagttctagttccttgatgtcccccctggaaccaggcgatcccagccaggccccaccaaactctgaggaagggctgcgcgagcctccaggcacgtctagaccaagcttgaccagcggaactacaccaagcgagatgtatttgccagtcagattcagctccgagagcactcgcagttatcgacgcggtgcccgttccccagaggacggcccgtcagcacgtcagcctctgccccggcgcaacgtccccgtcggcataactgagggggatggctcgcggactgggtccctccccgcatcctcagtccagctgctccaggactag

SEQ ID NO: 26389 - DNA, 813 bp, synthetic construct
  source 1..813: mol_type = other DNA; note = Synthetic coding sequence
atggccatggagatgcggctgcccgtggcccggaagcccctgagcgaaagattgggcagagacactaaaaagcacctagtcgtgcctggagacacaataaccaccgacaccggcttcatgcggggacacggcacctacatgggcgaagaaaagttgattgccagcgttgccggctccgtggagagggttaataaactgatatgcgtaaaggccctgaaaactaggtatatcggagaggtgggtgatattgtggttggccggataaccgaggtgcagcaaaagagatggaaagtggaaaccaacagcagattagacagcgtgttgttgctgtcctcgatgaatttacccggcggagagctgaggcgacgatctgctgaggacgaattggccatgagaggattcctgcaagagggcgatctgatctccctgggccaaggggtcctggtacaggtgtccccttccttggtgaaacgacaaaagacacatttccatgatttgccatgtggcgcctcagtcatcctaggaaacaacggatttatctggatatatcccaccccagagcataaggaagaagaggcaggtggtttcatcgcaaatctcgaacctgtgagtttggctgaccgagaagttatctcccggctcagaaattgcataattagtttggtgacacaacgcatgatgctgtatgacacatccatcctttactgttatgaagcttccctgcctcatcaaataaaggatatcctcaagcctgaaattatggaggaaattgttatggaaacacgccagaggctcctcgaacaggagggttag

SEQ ID NO: 26390 - DNA, 297 bp, synthetic construct
  source 1..297: mol_type = other DNA; note = Synthetic coding sequence
atgcccgaggaccaggtgggcaagctggaggccaccgagaacaccatcagcgccatggccgccgcggcagccgaacaacagcaattctaccttctgctgggcaacctgttaagcccggataacgttgtccgcaagcaggccgaggaaacctacgaaaatattccagggcagtcaaagatcacgttccttctgcaagccatcagaaatacaactgccgccgaggaagcccgtcaaatggcagcggtcctgctgagacgcttactatcatcagccttcgatgaagtctacccagcatag

SEQ ID NO: 26391 - DNA, 306 bp, synthetic construct
  source 1..306: mol_type = other DNA; note = Synthetic coding sequence
atggacgaggtggagcaggaccagcacgaggcccggctgaaggagctgttcgattctttcgatactacaggcactggttcgctaggacaagaagagttgactgatctttgccacatgctctctctcgaggaggtggcaccagttctgcagcagaccttattgcaagataaccttctagggcgcgtccatttcgaccagttcaaagaggccttgatcctgattttaagtcgaacattgtccaacgaggagcatttccaggagcccgattgctcactggaggcccagccgaagtacgtgcgcgggtag

SEQ ID NO: 26392 - DNA, 1065 bp, synthetic construct
  source 1..1065: mol_type = other DNA; note = Synthetic coding sequence
atggcccacagccccgtggccgtgcaggtgcccggcatgcagaacaacatcgctgaccccgaggagctgtttacaaagttggagaggatcggcaagggctcctttggcgaggtgtttaaaggaatcgacaacaggacccagcaggtggttgccatcaagatcatcgatctcgaggaagccgaggatgagatcgaggacatccaacaggagataacagtcctgtctcagtgcgatagtagttatgttacgaagtattatggctcctacctcaagggatcaaaactctggataatcatggaatatctgggcggcggaagcgccttggatctactgagagcaggccctttcgatgaattccagattgctactatgttgaaggagatcctcaaagggctcgactacttacacagtgagaaaaagatacatcgcgatatcaaagccgccaacgttctgttgtccgaacaaggggatgttaaactggccgatttcggtgtggcaggacagctgaccgatactcagattaagagaaataccttcgtgggtacccccttctggatggccccagaggttatccagcaatcagcatacgacagtaagagacccaccgcaaaggagttgctcaagcacaagttcatcgttaaaaactccaagaagacaagctacctgaccgagttgattgatcgtttcaaacggtggaaagcggagggtcacagcgacgacgagagcgatagtgagggttccgactccgaatccacctcccgagagaacaatacacatcctgagtggagcttcactacagtgagaaagaagcctgaccctaaaaaggtgcagaacggagctgagcaggatctcgtccaaaccctgtcatgtctgagcatgatcattactcctgcctttgcagaactgaagcagcaggacgagaataatgcctcaaggaaccaggctattgaggagttggagaagtccatcgctgtcgccgaggccgcgtgtcccggaattactgataagatggttaagaagctgattgaaaaatttcagaaatgtagcgccgacgaaagcccatag

SEQ ID NO: 26393 - DNA, 522 bp, synthetic construct
  source 1..522: mol_type = other DNA; note = Synthetic coding sequence
atgccccggaagggcacccagcccagcaccgcccggcggcgggaggagggcccgcctccaccaagcccagacggtgcttcaagtgatgctgagccggagcctccatcaggtagaaccgagagccccgccaccgccgcagagactgcctcagaggagctggataatcggtccctcgaggagatattaaacagtatacctccccccccaccacctgccatgacaaatgaagccggagcgccccggctcatgataacccatatcgtgaatcagaacttcaagagctacgccggggaaaaaattctgggccccttccataagcggttctcctgcattatcggaccaaacgggtctgggaaatcaaacgttatcgactccatgctatttgtctttgggtacagggcccagaagattcgcagcaagaaactgtcagttctaattcacaatagcgacgaacataaggacattcagagttgcactgtagaggtgcactttcaaaagatcattgacaaagagggggactag

SEQ ID NO: 26394 - DNA, 801 bp, synthetic construct
  source 1..801: mol_type = other DNA; note = Synthetic coding sequence
tgaccccgggccgccgcccgggtgcgggccgccggcgaggccctggagaggagacgacggtggctcggccgcctctccccctctgccccgaggccccgtagagctaggccctcccttcgtcgcgcctccgcatgggtgcgggaccgggtcgccggccggcccggtgccctgcctggattccaagcctcaggagtggccggcgaggctcagaaagcgcccgggcatcctgcagcgccagctccagcagccagttgtctcaccgaggccgatggccgagtgttccttcatgcctttaggttggctctcatacaattgcaaatttcttcaatcaagtcagacaatgtgacaagggcttgttcattcatccgtgaagcagccactcagggcgccaaaatcgtgtcgttacctgagtgttttaattccccgtacggtgcgaaatactttcccgagtacgccgaaaagattccgggggagtcaactcaaaagctgtctgaggttgccaaggagtgttctatctacctgatcgggggaagcataccagaggaggacgctggtaaactgtacaatacatgcgcggttttcggccctgacggaaccctgctcgcaaagtaccggaagattcacctctttgacatcgacgtgcctggcaagatcacctttcaggagagtaagaccttgtctccgggagactcatttagcactttcgacacgccctattgccgagtgggactgggcatatgctatgatatgcggttcgccgagcttgcacagatttatgctcagagaggtgaggctgtgtag

SEQ ID NO: 26395 - DNA, 216 bp, synthetic construct
  source 1..216: mol_type = other DNA; note = Synthetic coding sequence
atggacagcctgcccgacgagttcttcgtgcggcaccccgccgtggaagaccagcgcaaggaagaaacagaaaataaactcgaaaaaagcagcggccagctcaataagcaggagaacgacatccccacggatttggtacccgtgaatctcctacttgaggtcaaaaaactcctgaatgcaatcaacacgctgcctaagggtgtcgtaccccattag

SEQ ID NO: 26396 - DNA, 2130 bp, synthetic construct
  source 1..2130: mol_type = other DNA; note = Synthetic coding sequence
atgagcgtggagagcgagcagctgaccggcgtgcccctggacgactcggctataacacccatgtgtgaagtgaccgggggacgaagctattctgtttgctcaccccggatgctgaatcagtgtctggagtctctagtgcagaaggtccagagcggagtggttattaattttgagaaagccgggccagacccctctccagtagaggacggccagcctgatatttcacgcccatttggatcgcaaccctggcacagttgtcacaagctcatttacgtacggccaaatcccaaaacaggagtgcctatcggccactggcccgtgccagagagcttctggccagatcaaaattcaccaacactgccgcccagaacatcacatcctgtagtaaagttcagctgtaccgattgtgagccgatggtcatcgacaagttacctttcgacaaatacgaacttgaaccaagtccccttactcagtttattctcgaaaggaaatctccccagacctgctggcaggtatatgttagcaattctgcaaagtattccgagttggggcaccctttcggatatttgaaggccagtactgctctcaactgcgtaaatttattcgtaatgccttacaactaccccgtgttactcccactactggatgatctgtttaaggtgcataaagccaagcccacactcaaatggagacagtccttcgagtcctacctgaagactatgcccccgtactatctgggccccctaaaaaaagccgtgcgcatgatgggggccccgaatctgattgccgattccatggagtatggcctcagctacagtgtgatttcttatctaaagaagctcagccagcaagcgaagattgaaagcgatcgcgtgatcggcagcgtcggtaagaaggttgtccaggagactggcattaaagtccgaagtcgttcacatgggctgagcatggcgtatcgaaaagacttccagcagctgcttcaaggcatttccgaggacgtgccacatcgactgctagacctcaacatgaaggagtatacgggcttccaggttgctcttctaaacaaggacctcaaaccccaaacttttaggaacgcctacgacatcccccgaaggaatctgctcgatcaccttactaggatgagatcaaatctgctgaaatccacacggcgctttctcaaagggcaagatgaggaccaggtccatagtgtgcccattgcacagatgggcaactatcaggaatatctgaaacaagttccttctccacttcgggaactggatccggaccaacctagacgcctccacacattcggaaaccctttcaagttagacaaaaagggtatgatgatcgacgaggccgacgagttcgtggcaggaccgcagaataaacacaaaaggccaggagaacccaatatgcagggaatacctaagagacgccgctgtatgtctccgctgttgcgaggtcgtcagcaaaaccctgtcgttaataatcacataggggggaaaggacccccagctcccactacacaggcccaaccagacctaatcaaaccgctccctctgcacaagatctctgaaacgacaaatgatagcatcatccacgacgttgttgaaaaccacgtcgcagaccagttatcctctgacatcacacccaacgcgatggataccgagttctccgcctcaagtcccgcgagcctgcttgaacggcccaccaaccacatggaagccttgggccacgaccatctcgggacaaatgatttaactgtgggtgggtttctggagaaccacgaagaacctcgcgataaagagcagtgcgccgaagaaaatattcccgcctcctcacttaataagggaaagaagcttatgcattgccgctcgcacgaagaggttaatactgagctcaaagcacaaattatgaaggagataaggaagcctggcagaaaatacgagcgtatctttacacttctcaaacacgtgcagggcagtctgcagacacgcctgatttttctgcagaacgtaattaaggaggcaagccggtttaagaaaaggatgttgatcgaacaactggagaatttcctggacgaaatacaccggagggcaaaccagatcaatcacatcaactcaaactag

SEQ ID NO: 26397 - DNA, 387 bp, synthetic construct
  source 1..387: mol_type = other DNA; note = Synthetic coding sequence
atggccagcagcaacaccgtgctgatgcggctggtggccagcgcctacagtattgcacaaaaagctggcatgattgtacgcagagtgatcgcagagggggatctgggcatcgttgagaagacttgcgcaactgatctgcagacaaaagctgatcggttggcccaaatgtccatctgcagttctctggcccggaagttccctaagctaacaataattggagaagaggacctgccatctgaagaagtggatcaggagctgatagaagattcccagtgggaagagattttgaagcagccatgcccctcacaatatagcgccataaaggaagaggaccttgtggtgtgggtcgatccgttggatgggaccaaggaatacaccgagggatag

SEQ ID NO: 26398 - DNA, 237 bp, synthetic construct
  source 1..237: mol_type = other DNA; note = Synthetic coding sequence
atgcggttcatgatgatgcgggccgagaacttcttcatcctgcggcgtaaacccgttgagggctacgacattagctttttgataacaaattttcatacagagcaaatgtacaagcacaaacttgtcgactttgttattcatttcatggaggaaatcgataaggaaattagcgaaatgaagcttagcgtaaatgctcgcgcccgcattgtggctgaggagtttctgaaaaatttttag

SEQ ID NO: 26399 - DNA, 171 bp, synthetic construct
  source 1..171: mol_type = other DNA; note = Synthetic coding sequence
atggtgatggagaagcccagccccctgctggtgggccgggagttcgtgcggcagtattataccctcctgaataaagctccagagtacctccatagattctacggtcgaaacagcagttatgtacacggaggagtggatgccagcggcaagcctcaggaggccgtgtattag

SEQ ID NO: 26400 - DNA, 357 bp, synthetic construct
  source 1..357: mol_type = other DNA; note = Synthetic coding sequence
atgaagatcttcgtgggcaacgtggacggcgccgacaccacccccgaagaacttgctgccctgtttgccccgtatggcactgtgatgtcttgcgcggtcatgaaacagttcgcctttgtgcacatgcgcgagaatgccggggcgttgagggctattgaggctctccacgggcacgaactgcgaccaggtcgcgcactcgtggtggaaatgtctagaccaaggccgttgaatacatggaagatcttcgtcggcaacgtcagcgccgcctgcacgtctcaagagctcaggtcactgtttgagcgacgggggagggttattgagtgcgatgtcgtcaaaggaggaatgtgtgtggggtag

SEQ ID NO: 26401 - DNA, 438 bp, synthetic construct
  source 1..438: mol_type = other DNA; note = Synthetic coding sequence
atgagcagcccccgggacttccgggccgagcccgtgaacgactacgaaggcaatgactccgaagcagaggacttaaatttccgcgaaactctgccatcatcttcccaggaaaacacacctcggagtaaggtgtttgagaacaaagtgaacagcgaaaaggtgaaactctctttaaggaactttccccacaatgattatgaggatgtattcgaggagcctagtgaaagcggttctgacccctcgatgtggaccgccagggggcctttccggcgggaccgctggtcgagcgaggacgaggaggccgcaggaccatcccaggccctctcgcctttgctttctgtgcagcaccacggctattccggtccaaacgagcgaacaactttttggcatggaagtaatgaaggagctgtgagcctgctcttgaggtactgtgcgtag

SEQ ID NO: 26402 - DNA, 438 bp, synthetic construct
  source 1..438: mol_type = other DNA; note = Synthetic coding sequence
atgtggaccgcccggggccccttccggcgggaccggtggagcagcgaggatgaggaggccgccggaccatcccaagctctgagccctctgttatccgatactagaaaaattgtttccgagggagagctagatcagttggcccaaatccgccctttaattttcaacttccatgaacagacggccattaaagattgtctgaaaatattggaggaaaaaaccgcagcttacgatattatgcaagaattcatggccttggaactcaagaatctgcccggcgagtttaattctggaaatcaaccatcgaatcgggaaaagaataggtaccgcgatatcctcccctttcaacaccacggctattccgggccaaacgaacgcacgaccttttggcatggctccaacgagggagcagtatcactcctgctcagatactgcgcttag

SEQ ID NO: 26403 - DNA, 444 bp, synthetic construct
  source 1..444: mol_type = other DNA; note = Synthetic coding sequence
atgtggaagttccccggcggcctgagcgagcccgaggaggacatcggtgataccgccgtaagagaggtgtttgaagagaccggcatcaagtccgagtttcgaagcgtgcttagtattcgccagcagcacacaaatcccggcgccttcggcaaaagcgatatgtacataatctgtagattgaaaccatattcatttaccattaatttctgtcaagaggagtgcctgcgatgtgagtggatggacctcaatgatctggccaagacagaaaatacaaccccgatcacatccagggtggcgcgattgctcttgtatggctaccgcgagggctttgacaaaattgatcttactgttgaggaactccccgctgtgtatactgggctgttctacaaattgtaccacaaggaattgcccgagaattataagaccatgaaggggatcgactag

SEQ ID NO: 26404 - DNA, 300 bp, synthetic construct
  source 1..300: mol_type = other DNA; note = Synthetic coding sequence
atggacgagagcgccctgctggacctgctggagtgccccgtgtgcctcgaaaggctggacgcgtctgccaaggtgctgccatgtcagcacaccttctgcaaacgttgtctacttgggattgtgggatcacgcaacgaactccgctgtccagagtgcagaaccttagtagggagtggtgtggaggaactgccttcaaacatcttgctcgtacgcctgctcgatggaattaagcagcgaccgtggaagcccggccccggcggcggctcaggaaccaattgcacaaacgccctgcggtcctag

SEQ ID NO: 26405 - DNA, 3675 bp, synthetic construct
  source 1..3675: mol_type = other DNA; note = Synthetic coding sequence
atggccctgcggcccggcgccggcagcggcggcggcggcgccgccggagcaggtgccgggagcgccggaggtggagggttcatgtttcccgtggcagggggaatcaggccaccccaagccggcctcatgccaatgcagcagcaagggttccccatggttagcgtcatgcagcccaacatgcagggcattatgggtatgaactactcttcgcagatgagccaagggcctattgccatgcaggccggaatcccaatgggacctatgcccgcagcaggaatgccctacctgggccaagctcctttcctgggaatgcggcctcccggaccccaatacactcccgatatgcagaaacagtttgccgaagagcagcagaagcgattcgagcagcaacaaaagctccttgaggaagagcgtaaaagaaggcaatttgaggaacagaaacagaagctaaggttgctatcttcagtcaaacctaagacaggagaaaagtccagggacgatgcattagaagccattaaagggaatttagatggctttagccgggacgcaaaaatgcatccaacacctgcctcccaccccaaaaagccaggggtaggagtattcccgtcccaagaccctgcccagccccgcatgcccccctggatttacaatgagagcctggtgcctgacgcctacaaaaagatcctggagacaaccatgacacccacaggtatcgacaccgccaagctctacccaatcctcatgagtagcggtctgccccgggagaccttggggcaaatctgggctctggcgaacagaacgacgcctgggaaactcacaaaggaggagttgtataccgttctggccatgattgcggttactcagcggggggtccctgctatgagcccggacgctttaaaccagtttcctgccgcaccaatacccacgttgagcgggttttcgatgactctgcctacgccagtgtcccagcccacggtcatcccatctggaccagctggaagtatgcctctctccctcggtcagcctgtgatgggcattaatttggttggacctgtgggaggcgccgccgcccaggcgagcagcggcttcatcccgacctatcctgccaaccaggtggtcaaaccagaggaagacgatttccaggacttccaggatgcatctaaaagcgggtctctggatgatagcttcagcgacttccaggaactgccagctagcagcaagacctctaacagccagcacggaaactccgcccctagcctgctaatgcccctacccggtactaaggcactcccttctatggacaaatacgctgtatttaaaggcatcgcagctgacaaatcatctgagaatactgtccctccaggagaccctggagataagtattccgcattccgggagctggagcagaccgctgaaaacaagccgctcggtgagtccttcgccgaatttcgctcagccggcacggatgatgggttcacagatttcaagaccgccgatagtgtgagcccccttgagccccctacaaaagataaaacatttcctcctagttttcctagcggaactattcaacagaagcagcaaacacaggtgaaaaatccgctaaacctcgctgatctagacatgttttctagtgtgaactgctcaagtgagaagcccttgtccttctccgctgtcttctcaacgtccaaaagcgtctccacacctcagtcaactggtagtgctgcgactatgacagccctcgccgccacaaagacatcctccctggcggacgatttcggggagttctcattgttcggtgaatattcaggactagcacctgtgggcgaacaggacgatttcgccgattttatggcctttagtaatagtagcattagcagtgagcagaagcccgacgacaagtacgacgccctaaaggaggaggctagtcccgtgcccctaacaagtaacgttggttctaccgtgaaaggtggccagaatagcacagctgcgtctacaaagtatgatgtgtttcgccagctgtccttagaaggaagcggcctaggcgtggaggacctaaaagacaacacacctagcggcaaaagtgatgacgacttcgcagacttccacagctctaagttctcttccataaatagtgataagagtctcggggagaaagcggtggcgtttcgccacactaaagaggactccgcaagcgttaagagcctcgatctgccatccatcggcggctcatccgtgggtaaggaggacagcgaggatgcattatctgtgcagttcgatatgaagctagccgatgtcggaggagaccttaagcatgtgatgagcgactcctcgctcgacttaccgaccgtgagcggtcaacaccccccggccgcagacatcgaggatctgaaatacgctgcgttcgggtcttattcaagtaatttcgccgtaagcactttgactagctatgactggagtgatcgcgatgatgccacccaggggcgaaagctgagtccgtttgtgctctcagcaggtagtggtagtcccagcgccaccagcattttgcagaagaaagagacctcgttcgggtcctcagaaaacatcaccatgacgtcactcagtaaagtgactacctttgtgagtgaagacgccctgcctgaaaccacttttcccgcccttgcctcatttaaagacacaattccacagacatccgaacagaaagagtacgaaaatagagattacaaggatttcactaaacaggatttacccacagccgagcgatcccaagaggcaacatgcccaagccccgcctccagcggagctagtcaggaaacccctaacgagtgttccgacgactttggcgagtttcaaagcgaaaaaccgaagatctctaagttcgacttcctcgtggccacttcacagagcaagatgaaaagcagtgaagagatgatcaagtccgaactagccaccttcgatctgtccgtccaaggcagccataagcgaagcttgtcactcggggacaaagaaatttccagatctagcccgtcacctgccttagaacaaccgttccgagacaggagtaacaccctgaatgagaaacccgctctgccggttatccgcgacaagtacaaagacctgaccggagaagtggaggagaacgaacggtatgcttatgagtggcagcgctgtttgggctccgccctaaacgtcataaagaaggcaaacgatacacttaatggcatttcgagctcgtccgtttgcactgaggtgatccagtcagcccaggggatggaatatctcttgggagttgttgaagtttaccgggtaaccaagcgcgtggagttaggtattaaagcaactgcagtgtgctcggagaaacttcagcaactgctgaaggacatcgacaaggtctggaacaacctgatcggatttatgtccctagctactctgaccccggatgaaaactcactggattttagctcatgcatgctccggccaggcattaagaatgctcaagagctggcatgtggtgtctgcttgctcaacgtggattctaggtcaagagctttcaactcagagaccgacagttttaagctcgcctatggaggccaccagtatcacgcatcttgcgccaacttctggataaattgtgtggagccaaagccaccaggattggtcctgccagacttactctag

SEQ ID NO: 26406 - DNA, 354 bp, synthetic construct
  source 1..354: mol_type = other DNA; note = Synthetic coding sequence
atggtgcagcggctgacctaccggcggcggctgagctacaacaccgcttcaaacaagacgagactgtcccggacccccggcaacaggatcgtgtacctgtacacaaaaaaggtcggaaaagcccctaagtcggcctgtggagtgtgccctgggagattgaggggggtgagagccgttcggcctaaagtgctgatgaggttgtctaaaaccaagaagcatgtgtcaagagcctacggcggctccatgtgcgcaaaatgcgtcagagacaggattaagcgggccttcctcatcgaggagcaaaaaatcgttgtgaaggttcttaaggcccaagcccagtcccagaaagcgaagtag

SEQ ID NO: 26407 - DNA, 621 bp, synthetic construct
  source 1..621: mol_type = other DNA; note = Synthetic coding sequence
atgagcagcccccgggacttccgggccgagcccgtgaacgactacgagggcaacgatagtgaagcagaggacctcaactttagggagactctacccagctcctctcaggagaacactccacggagtaaagtatttgaaaataaggtcaatagcgaaaaggtcaaactctccctcaggaacttcccacataatgactacgaagatgtttttgaggaaccatccgaatccggatctgatccctctatgtggactgctaggggtccttttaggcgggatcgctggagcagcgaggacgaggaggccgccggtccatcccaggcactgtctccgctgctctcagacactagaaagatcgtctccgaaggcgagctggaccagttagctcagattaggcctctcatctttaattttcacgaacagacagccattaaggactgccttaaaatcctggaggagaagaccgccgcctacgacattatgcaggaattcatgtttaacataatggatattgtggctcagatgcgagaacagcgctctggaatggttcagaccaaggaacaatatcacttctgttacgatatcgtcttggaagtgctgagaaaactgctgacactggactag

SEQ ID NO: 26408 - DNA, 582 bp, synthetic construct
  source 1..582: mol_type = other DNA; note = Synthetic coding sequence
atggaggagaccatcaaggacccccccaccagcgccgtgctgctggatcattgccactttagccaagtgatctttaattctgtcgagaagttctacattcctggtggagatgtaacctgtcattacaccttcacccaacacttcatacctcggcgtaaggactggatcggcatcttccgggtgggttggaaaaccactagagaatattacacctttatgtgggtgacccttccaatcgatttgaataacaagtctgccaagcaacaagaggttcagttcaaggcgtactacctgccgaaggacgacgaatactatcagttctgctatgtggacgaagacggggttgtacgcggagcctcgatcccctttcagttcagacccgagaatgaggaagacatcctcgtcgtgactactcagggcgaagttgaagagatcgaacaacacaacaaagaactgtgcaaggaaaaccaagagctcaaagattcgtgtattagcctacagaaacagaatagcgacatgcaggccgaacttcagaagaaacaagaggaacttgagacactccaaagtatcaacaaaaagtag

SEQ ID NO: 26409 - DNA, 156 bp, synthetic construct
  source 1..156: mol_type = other DNA; note = Synthetic coding sequence
atggacttcttcagcagccacctgctggccgacagcagcagccccgcaaccaattcttcgcacaccgatgcgcatgagatcctcgtgtctgacttccttgtatccgacgagaacttgcagaagatggagaatgtccttgacctgtggagcagctag

SEQ ID NO: 26410 - DNA, 513 bp, synthetic construct
  source 1..513: mol_type = other DNA; note = Synthetic coding sequence
atgagcagcaacgagtgcttcaagtgcggccggagcggccactgggcgcgagagtgccccaccggagggggaagagggcgtgggatgcgcagtcgagggcgcgggttccagttcgtctcatcctcccttcctgacatctgctaccggtgcggcgagagtggacaccttgcaaaggactgcgatctgcaggaggacgcatgttataattgtggacggggtgggcatatcgctaaagactgcaaggaacccaagcgcgaaagggagcagtgttgttataattgcggaaagccaggacatctcgctagggattgcgaccacgctgacgagcagaaatgttattcctgcggtgaattcgggcatattcagaaggattgcacaaaggttaagtgttataggtgtggggagactgggcatgtggcaattaactgcagcaagacaagcgaagttaattgctaccgctgcggcgagagcggtcacctcgctcgcgagtgtacaatagaggctactgcctag

SEQ ID NO: 26411 - DNA, 399 bp, synthetic construct
  source 1..399: mol_type = other DNA; note = Synthetic coding sequence
atgaaccaggaggacctggaccccgacagcaccaccgacgtgggcgacgtgactaacacagaagaggagctcatccgggagtgcgaagagatgtggaaggatatggaagaatgtcagaacaagctgtctctgatcgggactgaaacgttaaccgatagtaacgcccagctgtccctgttgattatgcaagttaagtgcttgactgccgagttgagtcagtggcagaaaaagactcccgaaactattcccttgaccgaggatgtactcattaccttgggaaaggaggagttccaaaaactgagacaagatcttgaaatggtgttgagcacgaaagaatccaagaacgagaagctcaaggaagatctcgaaagagagcagagatggctggacgagcagtag

SEQ ID NO: 26412 - DNA, 1095 bp, synthetic construct
  source 1..1095: mol_type = other DNA; note = Synthetic coding sequence
atggtgaagctgttcatcggcaacctgccccgggaggccaccgagcaggagatcagaagcctgtttgagcaatatggtaaggtgctcgaatgcgatattatcaagaattatggctttgtgcacatcgaagataaaactgctgcagaggacgctatccgaaacctgcaccattataaactccatggggtgaatatcaatgtggaggcatcgaagaacaagtccaaaacctctacgaagctgcatgtcggtaatatcagcccaacgtgcactaataaggaactgcgcgctaaatttgaggagtatggccccgtgatagagtgcgatattgtgaaggactacgcgttcgtccatatggaaagggcagaggacgcggtggaggcaataagggggcttgataacacagagttccaaggcaaacggatgcatgttcagctgtccactagccggctgaggaccgccccaggtatgggtgaccaatctggatgttacaggtgcgggaaagagggccactggtctaaggagtgtccaatcgatcgctctggccgcgtagcagaccttactgagcagtacaacgagcagtatggcgcggtgcgcacaccctatacaatgtcttatggagatagtctctattacaataatgcttatggggccctggacgcctactacaagcgctgccgggcagccaggtcctatgaggcagttgctgccgccgcagctagcgtgtataattacgccgaacagacattatcgcagctgcctcaggtccagaacacagccatggcatctcacttgacaagcactagcttggatccctacgatcggcatctcctgccaacctccggagcggctgctacagccgcagccgccgctgctgccgctgcagccgtgacagccgcgagcacgtcctactacgggagggatagatcccctctgagacgggccactgcacccgtgcccactgtcggtgaggggtatggttacggtcatgagtcagagctgagccaagcttccgccgcagctcggaatagcctgtatgatatggcccgctacgagcgcgagcagtacgccgatcgcgcacggtatagcgccttctag

SEQ ID NO: 26413 - DNA, 420 bp, synthetic construct
  source 1..420: mol_type = other DNA; note = Synthetic coding sequence
atggccaccggcgacctgaagcggagcctgcggaacctggagcaggttttgagattactgaattatccagaggaggtggattgtgtggggctgatcaagggtgaccccgccgcctccctcccgataataagctacagcttcacatcctactcaccatatgtcaccgagctgatcatggaatcgaatgtggagttaattgcaaaaaatgacctacgattcatcgatgctgtttacaagctcctccgggaccagttcaactacaaacctattttgacaaagaagcagttcattcaatgcggattcgccgaatggaagatacagattgtttgcgatatactcaactgcgtaatgaagaagcacaaagagctgagctccctgcagaaaataccttctcagcagaggaaaaagatatcatcatag

SEQ ID NO: 26414 - DNA, 450 bp, synthetic construct
  source 1..450: mol_type = other DNA; note = Synthetic coding sequence
atggccaacatcgccgtgcagcggatcaagcgggagttcaaggaggtacttaagtccgaggaagttcgttttattaccaaaatttggcacccgaatatcagctccgtgactggtgccatctgtcttgacatactcaaggaccagtgggctgcagctatgactctgagaacagtgctattgtcgttgcaggcgctactggccgccgcggagccagatgatcctcaagacgcagtcgtagctaaccagtataagcagaaccccgagatgttcaagcaaaccgctaggctgtgggcacatgtgtacgccggtgcgcctgtcagctcccctgaatacactaaaaagatcgaaaatctgtgtgcaatgggcttcgacaggaatgctgtgatcgtggccctctcatccaagagttgggatgtggaaacagctactgaactgctgctgtcaaactag

SEQ ID NO: 26415 - DNA, 597 bp, synthetic construct
  source 1..597: mol_type = other DNA; note = Synthetic coding sequence
atggtgatggagaagcccagccccctgctggtgggccgggagttcgttcgccagtattacacattattgaacaaggcaccggagtatctgcaccgcttctatggccgcaattcgtcctacgtgcacgggggagtcgacgcttctggtaagccccaagaggctgtctacggtcagaacgatatccatcacaaggtgctgagcttgaatttttcagagtgtcataccaagataagacatgttgacgctcacgcaacactgagtgacggcgtcgttgtccaggttatggggctgctcagcaactcagggcagcctgaacgcaagtttatgcagacattcgtgctcgcccccgaggggagcgttcctaacaagttctatgtacacaacgacatgttccgttatgaggacgaggttttcggcgatagtgagcccgagctggacgaagagtccgaggatgaagttgaagaagaacaagaggagcggcagccctccccggaaccagttcaggaaaatgctaatagcggctattatgaggctcacccggtaactaacgggattgaggaacctctggaagaatccagccacgagccagaaccctag

SEQ ID NO: 26416 - DNA, 150 bp, synthetic construct
  source 1..150: mol_type = other DNA; note = Synthetic coding sequence
atgatgctgggcaccgagggcggcgagggcttcgtggtgaaggtgcgaggcctgccttggagctgcagcgccgacgaggttcagagattcttcagcgactgcaagattcaaaatggtgcacaagggatcagatttatctacacgagatag

SEQ ID NO: 26417 - DNA, 1266 bp, synthetic construct
  source 1..1266: mol_type = other DNA; note = Synthetic coding sequence
atgatggaggacaacaagcagctggccctgcggatcgacggcgccgttcagagcgcaagtcaggaggttacgaatctaagagctgagctgactgctacgaatcgaagactcgccgaacttagtggcggaggcggcccgggccctgggccaggcgccgctgcgtcggctagcgcggctggcgactccgcagcgactaatatggaaaaccctcagctgggggcccaagtgctgcttcgagaggaggtttcaaggttacaggaggaagtgcatctgctccgccagatgaaggaaatgctggctaaagacctggaggagtcacagggcgggaagtcctctgaagtcttgagtgctacagaattacgcgtccagctggcgcagaaggagcaggagctggccagagctaaggaagccctccaggcaatgaaagccgaccgcaaaaggctgaaaggcgaaaagaccgacctggtgtcccagatgcagcaactctatgccacacttgaaagtcgtgaggaacagctccgggacttcataaggaattatgagcagcatcgaaaggagtccgaggacgccgtcaaagccctcgccaaggagaaggatttactggagcgggaaaagtgggagcttaggcgacaggccaaggaagcaacagatcacgcaaccgccctgcggagccagctggacctgaaggacaataggatgaaagagctcgaagcggagctggctatggcaaaacagtctttggccaccttgactaaggatgtacccaagagacatagcctggccatgcccggggagacagtcctgaacgggaaccaagagtgggtggtgcaagctgatttgcctctaacggccgctataagacagtcacaacaaactctgtaccacagccatccgccgcatccggccgacagacaggctgttcgggtcagtccgtgtcactcacgtcagccctcagtcatctcggatgcatctgctgctgagggcgatcgttcatcaaccccatctgacatcaatagcccccgacaccggacacattcactgtgcaatggcgatagccccgggcctgtacagaagaacctgcacaatcccatcgtgcaaagcttagaggaccttgaggatcagaagaggaaaaaaaaaaaagaaaagatgggctttgggagcatctcacgagtattcgcccggggcaagcagcggaagtccttagaccctggactgttcgatggcaccgcacctgactattacatcgaagaagacgcggactggtag

SEQ ID NO: 26418 - DNA, 1173 bp, synthetic construct
  source 1..1173: mol_type = other DNA; note = Synthetic coding sequence
atggccaccggcgacctgaagcggagcctgcggaacctggagcaggtgctgagacttctgaattatccggaggaagttgactgtgttggactgatcaagggcgatcccgccgcttccttgcctatcatttcatattcattcacctcttactccccctatgttacggagctgattatggaaagcaatgtcgaattgatcgccaagaatgacttgcgcttcatcgatgccgtctacaaattactgagagaccagtttaactataagcccatcctcacaaaaaaacagttcattcagtgcggtttcgcggaatggaaaatccaaattgtctgcgatatactgaactgtgtgatgaaaaaacacaaggagctgtcaagccttcagaagattcccagtcagcagcgtaagaaaatcagctctgggaagagcgagccacccctcgggaatgagaaaataagcgcagaggccgttggggtggatataagtggacgtttcatgacgtccgggaagaagaaggctgtcgttatccgccatctctacaacgaggacaacgtggacatttcagaagacactctaagccccatcacagatgtcaacgaggcggtagacgtatctgaccttaatgccaccgagatcaagatgcccgaggttaaggtgccggagatcaaggcagagcagcaggacgtaaatgtgaaccccgagattaccgccctgcaaaccatgttagccgagtgccaagaaaatctgaagaagttgacatccatcgaaaagcggttagactgtctagagcagaaaatgaaaggtaaagtgatggtcgacgagaatacctggacaaacctgctgtcaagagttaccctcctggagactgaaatgctcctgagtaagaagaacgatgagtttatcgaattcaatgaggtgtcagaagattatgcctcctgcagcgacatggatctgctgaatccccataggaaatccgaggtcgagaggcctgccagcattccacttagttcggggtactcgacggcctcctctgactcaaccccacgtgctagcactgttaactattgtggtttgaatgagatttccgaggagacaaccatccaaaagatggagaggatgaaaaagatgttcgaggaaacagccgaattgctgaaatgtcctaaccactacctatag

SEQ ID NO: 26419 - DNA, 390 bp, synthetic construct
  source 1..390: mol_type = other DNA; note = Synthetic coding sequence
atgaagcggggccggctgcccagcagcagcgaggacagcgacgacaatggttctctctccaccacctggtctcaaaattccaggtcgcagcatcggcggtctagctgtagtcgccacgaggatcggaagccttctgaagtttttagaacggatctgattacggccatgaaactgcatgattcataccagctaaatccggacgaatattatgtactggccgacccctggagacaggagtgggagaagggtgttcaagtccccgtgtcaccagggactatcccacagccggttgccagagtagtctccgaagagaaaagcctgatgttcatccggcccaagaaatacatagtctcttccggatctgagccacccgaacttggatatgtatag

SEQ ID NO: 26420 - DNA, 489 bp, synthetic construct
  source 1..489: mol_type = other DNA; note = Synthetic coding sequence
atggacttcttcagcagccacctgctggccgacagcagcagccccgccacaaattcaagtcacaccgatgctcatgagatcctagttagcgattttttagtgtctgacgagaatttgcagaagatggagaacgtgctagacctgtggtccagcgggctcaaaactaacattatctcagaattgagtaagtggcgtctaaacttcatagattggcaccgaatggagatgcgaaaagagaaagagaaacatgcagcccatctgaaacaactgtgcaatcaaatcaacgagctgaaggagctgcagaagacatttgaaatttccatcggccggaaggacgaagtgatttcctccctcagtcatgctatcggcaagcagaaggagaagatcgagctgatgaggacattctttcactggaggatcggccacgtgagggcacgtcaggacgtgtatgaagggaagctggctgatcagtattatcaacggacatag

SEQ ID NO: 26421 - DNA, 411 bp, synthetic construct
  source 1..411: mol_type = other DNA; note = Synthetic coding sequence
atgatcgtgaacgactacgagggcaacgacagcgaggccgaggacctgaattttagagagacgcttcccagttcctcccaggagaataccccaaggagcaaggtattcgagaacaaagtaaattccgaaaaggtgaagctcagtttgcgcaactttcctcataacgactacgaagacgttttcgaagagcctagcgaatccgggagtgatccgagcatgtggacagccagagggccttttaggcgcgacagatggagttctgaagacgaagaagctgccggtccgtctcaggccctgtccccactgctctccgtgcagcaccatggctactctggcccaaatgagcggactacattctggcatggctctaatgagggcgccgtgtctttgctcctgagatattgcgcgtag

SEQ ID NO: 26422 - DNA, 321 bp, synthetic construct
  source 1..321: mol_type = other DNA; note = Synthetic coding sequence
atggccagccagctgcaggtgttcagcccccccagcgtgagcagctccgctttctgcagtgcaaagaagttgaagattgagcctagcgggtgggacgtgagcggccaaagttctaatgataagtattacacccatagcaagacacttccagctacacagggacaggcaaatagctcccatcaggtggctaattttaacataccagcctatgaccagggcctcctgttaccagcccccgccgtggaacatatagtcgtcactgccgcggacagtagtggctctgcagcaacatcaacttttcagagttctcagacactgtag

SEQ ID NO: 26423 - DNA, 411 bp, synthetic construct
  source 1..411: mol_type = other DNA; note = Synthetic coding sequence
atgaagcggggccggctgcccagcagcagcgaggacagcgacgacaacgggagtctgtccacaacttggtcacagaactcacgttcccagcatagacgttccagctgctcacgccatgaggatcggaaaccgtctgaggtcttccgaaccgatctaatcaccgcaatgaagctgcacgattcataccagctgaacccggatgagtattatgtcctggccgatccttggcgccaggaatgggaaaagggcgtgcaggtgcctgtgtcccctggcactattccccagcctgtcgcccgcgttgtttctgaagagaagtccctcatgttcatcaggccaaagaaatacattgtgtctagcgggtctgaaccccccgagttaggctatgtcgatatcaggacacttgccgactag

SEQ ID NO: 26424 - DNA, 396 bp, synthetic construct
  source 1..396: mol_type = other DNA; note = Synthetic coding sequence
atggaggacggcacccccaagcacatcatccagatgaccggcttcaagatggaagagaaagaagcattggttaaactgttgctgaagctggactgcactttcatcaagtccgaaaagtacaagaattgtactcaccttatcgccgaaagattgtgcaaatcagaaaagttccttgcagcatgtgccgctggcaagtggatactgactaaggattatataattcacagcgccaagtccgggcgatggctggacgagactacatacgaatggggttacaagatcgaaaaagactcccggtactccccccagatgcagagcgcccccaagcggtggagggaggagctgaaaaggactggggcccccggagccttccacaggtggaaggttgtgctgtag

SEQ ID NO: 26425 - DNA, 1668 bp, synthetic construct
  source 1..1668: mol_type = other DNA; note = Synthetic coding sequence
atgcggctgatcggcatgcccaaggagaagtacgacccccccgaccctcgtcgcatctataccattatgtccgcggaagaggttgctaacgggaagaagtcccactgggcggaacttgaaattagcgggagagtgcgctccctctcaacttcactgtggtctctcacacacctgactgccttacacttaaacgataattatctgtcacgcatcccccctgatatcgctaagctccacaatctcgtgtatctcgatttgagtagcaacaagctaagaagccttccagctgagttgggcaatatggtaagccttcgggagcttctgctcaacaataacctgctgcgcgtgctcccctatgagctggggagactgttccaattacagaccctcggattgaagggtaacccactgagccaagacattttaaatttatatcaggatcctgacggaactagaaaactgttaaactttatgctggacaatctggctgtacaccccgagcagctgccacctcgaccatggatcacgttaaaggagagggaccaaattttaccatccgccagcttcactgtgatgtgttacaacgtgctatgcgataaatacgcgaccagacaactgtacggatattgccccagctgggcccttaactgggagtaccggaagaaaggcattatggaagagattgtgaattgcgacgcagacatcatttcgctgcaggaagttgagacggaacagtacttcaccttgttcttgcctgccctgaaggagcgcgggtacgatggtttcttctctccaaaatctagagcgaaaattatgtcagagcaggagcggaaacacgtggatgggtgtgccatatttttcaagaccgagaaattcaccctcgttcagaagcacaccgtggagtttaatcaagttgcaatggccaactctgacgggtctgaagccatgctcaatagagtgatgacaaaggataacattggcgttgcagtcgtgctggaggtgcacaaggaacttttcggggccgggatgaaacccatccatgcggccgacaaacaactgctcatcgtggcaaacgcccatatgcactgggacccagagtacagcgatgtgaagctgatacagaccatgatgtttgttagtgaggtgaaaaacatattggagaaggcatcatcacgacccggctctccaaccgctgatcccaactccattcccctggtactttgtgctgacctcaattcactgccagactctggcgtggttgagtatctctctaacggcggggtggctgacaatcataaggacttcaaggaactcagatataacgaatgcctgatgaatttttcttgtaacgggaagaacgggtcctccgaaggacggatcacccacggcttccagctcaagagcgcttacgaaaacaatttgatgccatataccaattacacctttgacttcaagggagtgatcgattacatcttctacagtaaaactcacatgaatgtcctgggcgtattggggcctctagatccccagtggttagttgaaaataacatcaccggctgcccacatccccacattccctctgaccactttagtcttctgacccagctagagctccatccccctcttctgcccctggtcaacggcgtccacttgcccaaccgccgttag

SEQ ID NO: 26426 - DNA, 1635 bp, synthetic construct
  source 1..1635: mol_type = other DNA; note = Synthetic coding sequence
atgaacaccagcatcccctaccagcagaacccctacaacccccggggcagctctaacgtaatccaatgctaccgctgcggagacacatgtaagggagaggtcgtaagagtgcacaacaaccatttccacatacgttgcttcacgtgccaggtttgcgggtgcgggttagcacagtccgggtttttcttcaaaaatcaggagtatatatgtactcaggactaccaacaactgtacgggactcgctgcgattcttgtagggattttatcactggggaagtaatctccgcattggggcggacttatcaccccaaatgcttcgtttgctctctgtgccgaaaacccttccctatcggcgataaagttacgttttccggaaaggaatgtgtgtgccagacgtgcagccagtccatggcaagttcgaagccaattaaaataaggggccccagccattgcgctggttgcaaggaagaaattaagcacggccaaagcctgctggcgctggacaagcagtggcatgtgagttgcttcaagtgtcagacgtgttccgtgatcctcactggcgagtacatatcgaaggatggagtcccttactgtgaatcagactaccacgcgcagtttggtattaaatgtgagacttgcgaccgctacataagcgggagagtgttagaggccggaggaaaacattatcatcccacttgcgctcgttgcgtgcgctgccaccagatgttcacagagggcgaggagatgtatcttacagggtctgaggtatggcacccaatatgcaagcaggcagccagggcagaaaagaaacttaagcaccggcgcacgtccgaaacctctatctcaccgccaggatcgagcatcggtagtccgaacagggtgatatgcgatatatacgagaacctggacctgcgtcagaggagggcttccagtccgggatatatagattcccctacttacagccgccagggaatgtctccaaccttctcccgctcaccacatcattattatagatctggagatctttcaacagcgaccaagtccaagactagtgaggatatctcacaaacaagcaagtatagtcccatctactctcctgacccatactacgcctccgaatcagagtattggacttatcacggaagcccgaaggttccacgggcaagaagattttccagcggcggtgaagaggacgatttcgatcgatcaatgcacaaacttcagtctgggatcggtcgcctgattctgaaagaagaaatgaaggcccggagttcctcctatgccgatccttggacgcccccgagatctagtacatcgagccgggaagctcttcacactgccgggtacgaaatgtccttaaacggatccccaagatctcattatctggctgactctgacccactcattagcaagtccgcgtcactccctgcatatcgaaggaacggactgcaccggactccatcggcggatttgtttcactacgacagcatgaacgccgtgaattgggggatgcgcgaatacaaaatctatccatacgaactgcttctagtgaccaccagagggcgcaacaggctgccgaaagatgtggaccggaccagattggaaggaaatttctggaagagcggctgtctctag

SEQ ID NO: 26427 - DNA, 393 bp, synthetic construct
  source 1..393: mol_type = other DNA; note = Synthetic coding sequence
atgggccggctggacggcaaggtgatcatcctgaccgccgccgcccagggaattggccaagctgccgccctggcattcgcgcgggaaggcgccaaggtgattgccaccgacatcaatgagtccaagttgcaggagttggaaaaatatccaggtatacaaacaagagtgctggacgtgactaagaagaaacaaatcgaccaattcgctaatgaagttgaaaggcttgatgtgctgttcaacgtcgctgggtttgtacatcacgggaccgtactggactgcgaggagaaagactgggatttctccatgaacctgaacgtccgctcaatgtacttgatgatcaaggcatttttacctaagatgttggctcagaagtctggcaatattattaattag

SEQ ID NO: 26428 - DNA, 1119 bp, synthetic construct
  source 1..1119: mol_type = other DNA; note = Synthetic coding sequence
atgcagggccccgccggcaacgccagccggggcctgcccggcggccctcccagtactgtagcctccggcgcaggcagatgcgagagtggagctctgatgcattccttcgggattttcctgcaggggctgttaggggttgtggctttctccacccttatgctgaagcgctttagagaaccaaagcacgaacggaggccctggagaatttggtttctggatacctcaaaacaggccattggcatgctgtttatccatttcgccaacgtgtatctagctgacctgactgaagaagatccttgctccctttatctcatcaacttcctgctggatgcaaccgtcgggatgttacttatatacgtcggagtgcgtgcagtgtcggtcttggtcgagtggcagcagtgggaatctttgcggttcggagagtatggggacccccttcagtgcggagcttgggtggggcagtgtgccctttacatcgtcatcatgattttcgagaaaagcgtggtgtttattgttctcttgatactgcagtggaagaaggtagccctccttaaccctatagaaaaccctgatttgaaactggctatagttatgctcatcgtccccttttttgtgaacgctctcatgttttgggttgtggacaactttctcatgagaaaaggtaaaaccaaagccaagctcgaagaacggggcgctaaccaggacagccggaatggctctaaggttcggtatagaagggctgctagccatgaagagtcagagtccgagatcttgatttccgctgatgatgaaatggaggagtccgacgtggaagaagacctgcggcgactgacacctcttaagcccgtgaagaagaagaagcatagatttggactaccagccggcgcacaggaagctcccataaaaaagaagcgtcctcccgtgaaagacgaggatctcaaaggagccagagggaatctgacaaaaaatcaggaaataaagagcaagacatatcaggtcatgagggaatgcgagcaggctggctctgccgctccatcagtcttctcacgcaccagaaccggaacggaaaccgtgtttgagaaacccaaagcggggcccacaaagtcagttttcggctag

SEQ ID NO: 26429 - DNA, 507 bp, synthetic construct
  source 1..507: mol_type = other DNA; note = Synthetic coding sequence
atgatgctgggcaccgagggcggcgagggcttcgtggtgaaggtgagaggcctgccttggtcttgctctgcggacgaagtgcagcgctttttctctgattgtaagatccagaacggtgcccagggcataaggtttatctacacgagggaaggccggccttctggcgaagcattcgtagagttggaatctgaggacgaagtgaaattggctctgaagaaagatcgagagacaatgggacaccggtacgttgaagtcttcaagtcaaacaatgtggagatggattgggtgcttaagcacacgggtcctaacagtccagacacagcgaatgacggtttcgttcggctacgaggacttccattcggatgcagcaaggaggagatagtccagttcttcagcggattggagattgttccgaatggcatcactctgcctgtcgatttccagggaaggtctaccggtgaggccttcgtccaatttgcaagtcaggaaattgccgagaaagcctag

SEQ ID NO: 26430 - skipped

SEQ ID NO: 26431 - DNA, 1131 bp, synthetic construct
  source 1..1131: mol_type = other DNA; note = Synthetic coding sequence
atgaccaccgtggtggtgcacgtggacagcaaggccgagctgaccaccctgttggaacagtgggagaaggagcatggttcaggccaggacatggtgccaatcttaacccggatgtcccagctcatcgagaaagagactgaagagtatcgcaaaggcgatccagacccttttgatgatcggcatcctggacgggccgatcctgagtgcatgctcggtcatctgctacggatactttttaagaatgacgactttatgaacgcgcttgttaatgcatatgtgatgacatcccgggaaccaccattaaacactgcggcttgtaggctccttttagacattatgccagggctggagactgctgtggtgttccaagagaaggagggcattgtcgagaatttatttaaatgggcaagagaggctgaccaacctctgcgcacatacagtaccggtctgctcggtggggcaatggagaaccaggacatcgcagccaactatagagacgaaaactcccagctggtggccatcgtgctcaggcgcctgcgtgagctgcagctccaagaagttgctctgaggcaggaaaacaagcgaccatcacccaggaagttgtcttctgaacccctcctgccattggacgaggaggccgtggatatggactatggcgacatggctgtggatgtagtcgacggcgaccaggaggaggccagtggagacatggagatatcattccatttagacagtggtcataaaaccagttcccgtgtgaactccactactaagcctgaggatggggggcttaagaagaataagtcggccaagcaaggggatcgcgaaaattttagaaaggctaagcaaaagctgggctttagcagctccgacccagatcggatgttcgtggagttgtccaattcttcttggtctgaaatgagcccatgggtgattggcaccaactacaccctgtatcccatgacccctgcaattgaacagagactgatcctgcaatacctaactcctctcggtgaataccaggagttgctccctatattcatgcagctgggttccagagagttgatgatgttttatatagacctaaaacagacaaacgatgtcctcctgacctttgaggctctaaagtag

SEQ ID NO: 26432 - DNA, 504 bp, synthetic construct
  source 1..504: mol_type = other DNA; note = Synthetic coding sequence
atgagcagcaacgagtgcttcaagtgcggccggagcggccactgggcacgcgagtgcccgacaggaggtggacgcggaagaggcatgcgatctagaggaaggggtggtttcacatcagacagagacatttgctaccgatgcggtgaatcaggccacttagctaaggattgtgatctccaggaagacgcctgctacaactgtgggcggggaggtcacatcgcaaaagattgtaaggaacccaagcgggagcgcgagcagtgctgttacaattgcggcaagcctggtcatctggcccgtgactgtgatcacgccgatgaacagaaatgctactcgtgtggggaattcggccacatccaaaaggattgtaccaaagtcaaatgttatcgctgtggagagaccgggcacgtcgcgatcaactgctctaagacctccgaggtgaactgttaccgatgcggtgaatctgggcacctcgcacgagagtgtactattgaggccaccgcatag

SEQ ID NO: 26433 - DNA, 999 bp, synthetic construct
  source 1..999: mol_type = other DNA; note = Synthetic coding sequence
atgagcgaggccggcgaggagcagcccatggagaccaccggcgccactgagaacggccacgaagccgtgcctgaaggagagagtcccgcaggggccggaaccggtgccgcggctggcgccggcggtgctaccgccgccccaccaagtgggaatcagaatggggcagagggcgaccagatcaatgctagtaagaacgaagaagatgctggtaagatgttcgtgggcggactttcttgggacaccagcaaaaaggatctgaaggattacttcaccaagtttggagaggtcgtcgactgtacgatcaagatggatcccaataccgggcgctcccgcgggtttgggttcatccttttcaaagatgccgcatccgtggaaaaagtcctcgatcagaaggaacatagattggacggtcgggtcattgatccaaagaaagcgatggccatgaaaaaggatccggtcaagaagattttcgtcggcggtcttaacccggaagctacggaggaaaagattcgcgaatactttggagagttcggggagatcgaagcgattgaactgccgatggaccctaaattgaacaaaaggcgaggattcgtctttatcaccttcaaagaagaggagccagtcaagaaggtgcttgagaagaagttccacaccgtgtccggttcgaagtgtgagatcaaggtagcgcagccaaaggaggtttaccagcagcagcaatacggatccggtgggcgaggaaatcggaatcgaggtaacaggggtagcgggggcggcgggggaggcggaggacagagccagagttggaaccaagggtatggtaattactggaaccaaggatatggatatcaacagggatacggccctggatacggcgggtatgattacagcccctatgggtattacgggtacggtcctgggtacgactatagtcaagggtctacgaattacggaaaatcacagcgacgtggtggacaccagaataattataagccttactag

SEQ ID NO: 26434 - DNA, 615 bp, synthetic construct
  source 1..615: mol_type = other DNA; note = Synthetic coding sequence
atgagcgacctgcggatcaccgaggccttcctgtacatggactacctatgcttccgcgcactgtgttgtaaaggaccaccaccggcccggcccgagtacgatctggtttgtatcggtctgactggctccggtaaaacatcacttctgtcgaaactttgctctgagtcccccgacaacgtggtttccaccaccgggttttctatcaaggcggtcccattccagaatgctatactcaatgtgaaagaactcggaggcgccgacaacattcggaaatattggagtagatactaccagggaagccagggggtgatttttgtgctggactctgctagcagcgaagatgacttagaggctgcccgaaatgagcttcactctgctctgcagcatccacaactgtgtacactgccctttttgattttggcaaaccatcaggataagcccgctgctaggagcgtacaagagatcaaaaaatacttcgagctggagccattggcgaggggcaagagatggattcttcagccatgtagtctggacgatatggacgccctcaaggacagcttcagccaattaatcaatctacttgaggagaaggaccatgaggctgttaggatgtag

SEQ ID NO: 26435 - DNA, 6315 bp, synthetic construct
  source 1..6315: mol_type = other DNA; note = Synthetic coding sequence
atggagagccaggagttcatcgtgctgtacacccaccagaagatgaaaaaatccaaggtgtggcaagatggtattttaaaaatcacccacctcggcaacaaagccatcctttacgatgacaagggcgcttgcttggagtccttgttccttaagtgccttgaggtcaagcccggcgatgatctcgaatcggatcggtatcttataacagtcgaggaggtgaaagtcgccggtgctatcgggattgtgaaacagaatgtaaataaagaggcacctgaactgaacagcagaactttcatctcatccggaaggtcattgggctgccagccaagcggtttgaaacggaagtttacagggttccaggggccgagacaggtccctaagaagatggtgatcatggagtcaggcgagtcggctgctagccatgaagctaagaaaacaggccctaccattttcagcccattctgtagtatgccaccgctcttccccacggtgggcaaaaaagatgttaataacatccttgccgacccagagaacatcgtcacatataagaatagggaaagaaatgccatggacttctcttccgtatttagcccttccttccagatcaatcccgaagtcctgtgtgaagagaactacttctgttcgcctgtaaactctggaaataaactgagcgactccctgctcaccaacgaacctgtgaagcgggattccctggcttcacactactcaggggtttcgcagaacataaggtctaaagcgcagatcttagcactcctgaagtccgagtcttcctcctcctgcgaagaactgaatagcgagatgactgaacatttcccccaaaagcagccccagggaagcttgaaaatcgccaccaagccaaaatacctaatccagcaggaggagtgcgccgaaatgaagagcaccgaaaacctgtactatcagcaccagagtgagaacaccatgagaaataaaagccgctgggccatgtatcttagttctcagagcagccctatacatagcagtaccgtggacgggaatgacaccgaaagaaagcctaaagcccaagaagatgacgtgaactctaacctcaaagacctgtctctacagaagattatccagttcgtggagacctacgccgaggaacgtaaaaagtataacgtagatcaaagcgtaggcaacaacgatcccagttggaaccaggaggtgaagctggagatcccaagcttcaacgagtcctcttctctccaagtcacctgctcaagcgcggagaatgatggaattctctcagaaagcgatattcaggaagacaacaagatccccttcaatcagaatgataagggatgcattaaaggctctgtcttaattaaggaaaacgcccaagaagtgaacacatgtggcacactggagaaggagtatgagcagtccgagtccagtctacccgagttgaagcaccttcagatcgaaagctccaacaactcccggatttccgacgacattacggacatgatctctgaatccaaaatggacaatgagtccctcaacagtatacacgagtctctttctaacgtgacccagccattcctcgaggtgaccttcaacctgaacaatttcgagacatctgacacggaggaagagtctcaggaaagtaacaaaatttcacaggatagtgaatcatgggtgaaggacatcctcgtcaacgacggaaattcatgctttcaaaagcgatctgagaatacgaactgtgaggagatcgagggcgagcatttaccgttcctgactagcgtgtctgacaagccaaccgtgacctttcccgtgaaggaaaccctgccttctcaattttgcgataaaacttatgtggggttcgacatggggatatgcaagaccgaaaatacaggcaaagagattgaggaatacagtgatacactgtcaaactttgaaagcttcaagtggaccgatgcggtatacggcgataataaagaggatgccaataagcctatccaggaagttagaatcaattatgactttgcccttcctcctaacaaatcaaaaggaatcaatatgaacctacatattcctcacatacaaaaccagatcgccgagaatagcaaccttttttctgaggatgctcagccccaaccattcattcttggtagcgatcttgataaaaacgatgagcacgtacttccaagcaccagtagcagtgacaatagtgtccagttgctgaatacgaaccaaaatcactacgagtgtattgccttggacaagtctaacacgcacatatccaatagtctcttctacccattaggaaaaaagcatctgatttcgaaagacacggaagctcatatcagcgaacccgaggatctgggcaaaatcagaagccctccacccgatcacgtcgaggtagagaccgctagggagggtaagcagtactggaacccacggaactcttccgagttaagcggtctggtgaataccatttctatcctgaagagcctttgtgagcacagcacagccctcgacagccttgagattctaaagaaaaaaaacaccgtattccagcagggaacgcaacaaacatacgaaccagatagcccccccgaagtgcggaagccattcatcactgtagtaagccctaaaagtccacaccttcacaaggattcacagcaaatcctcaaggaagacgaggtggagctgagcgagcccttgcaatctgtccagttcagctccagcgggtcaaaagaagaaaccgccttccaggcagtgattcccaagcagatcgaacggaagacttgcgatccgaaacccgtggagtttcaggggcaccaggtgaaagggtctgcgaccagcggcgttatggtccggggacactcgtcgcaactgggctgttctcagtttccagactcgactgagtatgagaactttatgactgagacaccggagctgccttccacgtgcatgcagattgatttccttcaagtgacttcaccagaggaaaacataagcacattatcgcccgtctccactttttctctaaactcccgggacgaagactttatggtggaatttagtgagacaagtctaaaagcccggaccctgcccgacgacctccactttctcaacctagaaggtatgaaaaagagccggtcactggagaatgaaaatcttcagaggttatcactgctatcccgaacacaggtgccgctgatcaccctaccgcgtaccgatggccccccagacctagattcccatagttatatgatcaatagcaacacctatgagtcgtcagggagtcccatgctgaatctgtgcgagaaatcagcagtcctgagctttagtattgagcccgaagatcaaaacgaaaccttcttcagtgaagaaagtcgggaggttaacccaggtgacgtttccttaaataacattagcacccaatcgaaatggctgaagtaccagaacacatcacagtgcaatgttgcaacacctaacagggtcgataagcggatcaccgatggattcttcgccgaagcggtgagcgggatgcactttcgtgacacctccgaacgccagtccgacgcagtcaacgaatctagcctggatagtgtgcatctgcagatgattaagggaatgctgtaccagcagcggcaggatttctctagtcaagacagcgtctctaggaaaaaggttctgtcccttaacctcaagcaaacatccaagaccgaggaaatcaagaacgtccttggaggcagcacttgctacaactactccgtgaaagatctgcaggaaatctctggctcagagctttgctttccgtccggccagaaaatcaaatcagcatacctcccacaacgccaaatccatatccccgctgtcttccagtctcctgcacattacaagcagacattcactagctgtctgattgagcaccttaacattttgctttttggactggctcagaatctgcaaaaggctctgagtaaggtcgacataagtttctacacatcattgaagggggagaaacttaaaaatgctgagaataacgtcccatcctgtcaccatagccagccagccaagctggtaatggttaagaaggagggtcctaacaagggtagactcttttatacatgcgacggccctaaggcagaccgctgtaaattctttaaatggttggaagatgttactcccgggtattctacccaggaaggagctcgccccggaatggtcctgtcagatatcaagtccatcggactgtatttacgttcacaaaagatccctctctatgaagagtgccagttgttggtgcgaaaaggcttcgactttcagcggaaacagtatggaaaactgaagaagtttactaccgtaaatcctgaattctacaatgaacctaagaccaagctgtatctaaaactgtcgcgcaaggagcgcagcagcgcatattccaagaacgatctgtgggtggtgtctaagactctcgatttcgagttggacaccttcattgcctgttcagctttctttgggccctcctccatcaacgaaatagagatactgccactgaaggggtactttccatctaactggcctacgaatatggttgttcatgcactgctggtgtgcaatgcctctactgagctgaccaccctgaagaatattcaggactatttcaacccagcaacattgcccctaactcagtacttactcaccacgtcaagccccaccatcgtcagcaacaaacgagtgtccaagagaaaattcattcctcccgcttttactaatgtgagtactaagtttgaactgctgtctctcggtgcaaccctgaaacttgccagcgagctcatccaggttcataaacttaataaagaccaggcaacggctcttatccagattgctcagatgatggctagccatgagtccattgaggaagtaaaagagctacagacacacactttccccatcactatcatccacggcgttttcggagcagggaagagctatctactggctgtggtcattctcttttttgtgcagttgttcgaaaagagtgaggctcccacaattgggaatgcacgaccatggaagctgctcatcagttccagcaccaacgtggccgtcgatcgggttctgcttggactgctcagtctgggtttcgagaatttcattagggttggatctgtacggaagatagccaaacccatactaccctactctctccatgcagggtctgagaatgagtctgaacaattgaaggaactgcacgctctcatgaaagaagatttgacccccactgagagggtttatgtccggaagagcatcgagcagcacaagttgggtacgaatcgaacattgcttaaacaggtgcgcgttgtgggagtaacatgcgctgcatgtccctttccctgcatgaacgatctgaagtttcccgttgtggttcttgatgaatgttcccagattactgagccggcctcccttctgcctatagctaggttcgagtgtgagaagttaattctagttggcgatccaaagcagctacccccaaccattcaggggtctgatgcagcacacgagaatgggctggagcagaccctcttcgatcgactctgcctgatgggccataagcctatcttgttgaggacacagtacagatgccatcctgcgatctctgcaatagcaaacgatcttttctacaagggcgctttgatgaatggggtgacagaaatcgaacgttcacccttgctagaatggcttcccacattatgcttttacaacgtgaaaggtctagagcagatcgagagggacaatagcttccataacgtggcagaggccacatttacactcaagctaattcaatctctcatagcatcaggtattgccggcagcatgataggggtgatcacactctataagtcacaaatgtataaactgtgtcatctgttatccgccgtcgattttcatcaccccgacataaagactgtgcaggttagtacagtggacgcatttcagggagcagaaaaggaaatcattattctcagttgtgtgcgtactcggcaggtgggttttatagattccgaaaaacggatgaatgtggctctgacccgggggaaacgacacctgctcatcgtaggaaacctcgcatgtctgagaaaaaatcagctatgggggcgggttattcagcactgtgagggtcgggaagatggacttcagcacgccaatcagtatgagcctcaactcaaccacctcctcaaggattacttcgagaaacaggtggaagagaagcaaaaaaagaaaagcgaaaaagagaagagcaaggataaatcccatagctag

SEQ ID NO: 26436 - DNA, 567 bp, synthetic construct
  source 1..567: mol_type = other DNA; note = Synthetic coding sequence
atggccgccaccgcccgggaggacggcgccagcggccaggagcggggccagagggggtgtgagcattacgatagggggtgccttctcaaagcaccgtgctgtgacaagctctacacatgccgcttatgccacgacaacaacgaagaccaccagttggatcgattcaaagtgaaggaagtgcagtgtattaattgcgagaagatccagcatgcacaacagacatgtgaagaatgtagcaccttgttcggtgagtactactgtgatatctgccacctgtttgataaagacaagaagcagtaccactgtgagaattgtggaatctgtaggatcggaccaaaagaggacttctttcactgcctgaaatgtaatctgtgcctggccatgaacctacaagggcggcacaagtgtattgagaatgtcagcaggcagaactgccccatctgcttggaggatatccacacatcccgtgtggttgcacatgtgctcccttgtggacacctcctccaccggacatgctacgaagaaatgttaaaagagtacgatcaggtgctcgagacagctggatag

SEQ ID NO: 26437 - DNA, 339 bp, synthetic construct
  source 1..339: mol_type = other DNA; note = Synthetic coding sequence
atggccaccggcgacctgaagcggagcctgcggaacctggagcaggtgcttcgcttgttgaactatcccgaggaagtggactgtgtggggctgatcaagggagaccctgctgcatcacttcctatcatttcctactcgttcaccagctacagcccttatgtgaccgagctgatcatggaatcgaacgtggaactgatcgctaaaaatgatctgcgattcatagacgccgtgtataagctgctgcgcgatcagtttaattacaaacccatcctgactaagaagcaattcattcagtgtggatttgctgaatggaagattcagattgtgtgtgacatctag

SEQ ID NO: 26438 - DNA, 363 bp, synthetic construct
  source 1..363: mol_type = other DNA; note = Synthetic coding sequence
atgtggaaggtggtgaacctgcccaccgacctgttcaacagcgtgatgaacgtaggaaggttcactgaggagatcgagtggctcaaatttctggcattagcctgctcagccctgggagtcaccattactaaaactcttaagatagtatgtgaagtgttgagctgtgaccataatggcggtctaccacgtatacctttttctacatttcagttcctgtacacttatatcgccgaggtcgacggagagatttgcgccagccacgtgtctcggatgctgaattatatcgagcaggaggtgatcggccctgatggtctgattaccgtcaacgactttacccagaaccccagggtgtggttagaatag

SEQ ID NO: 26439 - DNA, 2490 bp, synthetic construct
  source 1..2490: mol_type = other DNA; note = Synthetic coding sequence
atggccaagtacaacaccggcggcaaccccaccgaggacgtgagcgtaaactcccgcccatttcgcgtcacaggcccgaattccagctcgggaatccaggcacgaaagaacctgtttaacaatcagggcaatgcatccccgccggctggccccagcaacgtgccaaagttcggatccccaaaaccaccagttgccgtaaagccttctagtgaagagaagcccgataaagaaccaaaaccccccttcctcaagccaaccggcgctggccaacgatttgggactcctgcttctctgaccacccgagaccctgaggctaaggtgggattcttgaaaccagttgggcctaagcctatcaacctgccaaaggaagactcaaaacctacgttcccctggcccccagggaataaaccctcgttacactctgtaaaccaagatcatgatctaaagccgctggggccaaagtccggcccgactccacccacatccgaaaacgagcagaagcaggccttccccaaattgacgggagtgaagggcaagtttatgtcagccagtcaggacctcgagcccaagccactcttcccgaagcctgccttcgggcaaaagccacctctttctacagaaaatagtcacgaggatgagtctcccatgaaaaatgtgagctcctccaaaggtagcccagcacctttgggtgttaggagcaagagcggcccacttaaaccggcaagggaggactctgagaataaggaccatgcgggggaaatttcttccctccctttccccggggtggtgctgaagccagctgcgagcaggggtggcccgggattatctaaaaatggagaagagaaaaaggaagatcggaaaatcgacgccgctaagaacacttttcaatccaaaatcaatcaggaggaactggctagtgggacgccccctgctcgtttcccgaaagcaccttcaaagttgacagtcggtggaccctggggtcagtcccaggaaaaagagaagggggataagaattcggccacacccaagcaaaagccattaccgccactatttacgcttggcccacccccacccaaaccaaataggcctcctaacgttgatctgaccaagtttcacaagacgagctccggtaattcaacatctaaaggtcaaactagttacagcactacctctttgcctccgcccccgccctcccatccagcctcccagcccccccttcctgcgtcccatccatctcagccacccgttccttccctcccaccacggaacataaagccgccatttgatctgaagagtcccgtgaatgaggacaatcaggacggagttacacattcagacggagctggcaacttggacgaagagcaggatagcgaaggggaaacttacgaagatattgaggcttcgaaggaacgcgaaaaaaaaagggaaaaggaggaaaagaagagactggaacttgagaaaaaggagcagaaagagaaggagaagaaggagcaggaaatcaagaagaagttcaaattgaccgggcccatccaagtcatacacctggcaaaggcttgctgtgatgtgaaaggtggaaaaaatgagctcagttttaagcagggagaacagatagaaatcattaggatcactgataacccagagggtaagtggctgggacgtaccgctcgcggttcatacggttatataaagaccactgccgtcgaaatagattatgatagcctgaagctcaaaaaagatagtcttggggccccaagtcgacctatcgaggacgaccaggaggtctacgacgatgttgcagaacaagacgatatctcttctcacagtcagagcggatctgggggaatatttccccctcctcccgacgatgacatctatgacggaattgaggaggaggatgccgatgacggaagtacactgcaggtgcaggagaaatctaatacatggtcatggggaatcttgaagatgctgaaagggaaggacgaccgaaagaaatcaatccgggagaaacccaaggtcagtgatagtgacaataatgagggcagttctttccctgctcctccaaagcagctcgatatgggggatgaggtgtacgatgacgttgacaccagtgacttccctgtctcctcagccgaaatgagccaggggaccaatgttggtaaagccaaaactgaagaaaaggacctgaagaaactaaagaagcaagaaaaagaggagaaagactttcgaaaaaaattcaagtacgacggggagatccgcgtactttactccacaaaagttactacctccatcaccagcaagaagtggggcaccagagatcttcaggtaaaaccaggagaatcactcgaagtgatccagaccaccgacgacactaaggtcttgtgcagaaatgaagagggcaaatacggatacgttctgagatcctaccttgcggataacgacggcgaaatctacgatgacattgccgatgggtgtatctacgataacgattag

SEQ ID NO: 26440 - DNA, 795 bp, synthetic construct
  source 1..795: mol_type = other DNA; note = Synthetic coding sequence
atgcccgacagcgcccccgccatggccgacaagatggacatgagcctggacgacatcattaaattgaaccgctctcagcgaggaggtaggggggggggaagaggccgcggtcgggctgggtcacaggggggccgagggggaggagctcaggccgccgctagagttaacaggggggggggccctatccgcaatcgtcccgcaatagccaggggggccgccgggggaggtggacgcaacaggccagccccttattctcggcctaaacagcttcctgataaatggcaacatgatctgttcgactctggatttggcggcggggccggcgtggaaacaggaggcaaactgctggtctccaacttagattttggcgtctcagatgctgatatccaagagcttttcgcggagttcggcacactgaagaaagcggccgtgcactacgacagatcagggaggtctttggggactgcagatgtgcatttcgaaaggaaagcagacgccctgaaggctatgaaacaatacaacggagttccactagacggaagaccaatgaatatccagttggtgacctcacaaatagacgcacagcgtagacccgcccagtctgttaatcgcggaggcatgacccggaacaggggggccgggggattcggcggtggtggcggcacacgtcggggtacccgtggtggagcgcgagggagaggacgaggggcaggccgtaattcaaaacagcagttatccgctgaggagctggacgcacagctcgacgcgtataatgctcgtatggacacctcatag

SEQ ID NO: 26441 - DNA, 312 bp, synthetic construct
  source 1..312: mol_type = other DNA; note = Synthetic coding sequence
atggccaagcacggcgccgacgagcccagcagccggagcggcagccctgatagagagggacgcgccagtgaggaccggtccctgctgcaccaaagacttgcagtgcgggagcttatcgacaccgaggtgtcctacctgcacatgctccagttgtgcgctagtgacatcaggtcacgcttgcagcagctgccacagggagaccttgacgtgcttttctcaaacattgacgatattatcaaagtgaacagcaggttcttgcacgacctgcaggaaactgccagcaaggaggaggagcaagttcagcttgtttag

SEQ ID NO: 26442 - DNA, 639 bp, synthetic construct
  source 1..639: mol_type = other DNA; note = Synthetic coding sequence
atgatgctgggcaccgagggcggcgagggcttcgtggtgaaggtgcgtggcctgccctggagctgttccgccgatgaggtccagagattctttagtgattgcaaaatccagaatggcgcacaaggaatcagattcatttacacgagagaaggccgcccttctggagaagcttttgttgaattggagagcgaggatgaggtcaagttggccctgaagaaggaccgcgagaccatgggtcaccgatacgtcgaagtctttaagtctaacaatgtggaaatggactgggtgctgaaacacaccggtcccaactcacctgacacagctaacgacggctttgtgcgactgagagggctaccattcggttgctcaaaagaggagatagtgcaattcttcagcggcctcgagattgtgcccaatggaatcactctccctgttgactttcagggaagaagcacaggggaagcattcgttcaattcgcctcccaagagatcgccgagaaggctcttaagaagcataaagagaggattggtcataggtacatagaaatcttcaaatcatcacgcgctgaagtgaggacacattatgaccccccacgtaaattaatggcaatgcaacggccaggtccttatgacaggtag

SEQ ID NO: 26443 - DNA, 1020 bp, synthetic construct
  source 1..1020: mol_type = other DNA; note = Synthetic coding sequence
atgtggaccgcccggggccccttccggcgggaccggtggagcagcgaagatgaggaagcagccggcccctctcaggctctctcccccctgctgtctgataccagaaagatcgttagtgaaggcgagctggaccagctggcccagattcgccccctgatttttaactttcatgagcagacagcaatcaaagattgcctgaagatcctggaagagaaaacggcggcgtacgacatcatgcaggaattcatggctctcgagctgaagaatctgcctggagagtttaattctgggaatcagccctccaatcgcgaaaagaaccggtacagagacatacttccctacgacagtaccagggtccctctgggtaagtcaaaggattacataaacgcctcttatattaggattgtaaattgtggagaggaatatttctacatagccacccagggccctctgctgagcaccattgatgatttttggcagatggtgcttgagaacaactcaaacgtgattgccatgatcacgagagaaatcgagggggggattataaagtgctaccactactggccaatttctctcaagaagccgttggaattgaagcacttccgcgtattcctggagaactatcaaatcctgcagtactttattattcggatgttccaggtggtcgaaaagagtaccggtacttcccattccgttaaacaacttcagttcacaaaatggcctgatcatgggacaccagcatcggccgacagcttcatcaaatacattaggtacgccaggaaatcccacttgacggggcctatggtggtgcactgctcagccggaatcggacgtacaggcgtgttcctttgcgttgacgtcgtgttctgtgccatcgtgaagaattgcagcttcaacatcatggacatcgtggcccaaatgcgggaacagcgcagtggaatggttcagaccaaagagcagtatcacttttgctacgacatcgtgcttgaggtcctgagaaagctacttaccctcgactag

SEQ ID NO: 26444 - DNA, 3213 bp, synthetic construct
  source 1..3213: mol_type = other DNA; note = Synthetic coding sequence
atggccggcgccctgcggcggggccgggccctgggcagccggccctcaggacctacggtttcctcccgccgctcacctcaatgccccgttgcccaggagggcctgggagcccgttctagaccacgagttgccccccggagcttggcccgttgcggcccatctagccgactgatgggatggaagccatccgaagctcgcggccagtctcagagctttcaggcctctggactacagcctcggtctttgaaagccgctagacgtgctaccgggcggcctgacaggtcccgggcggctcgccccacgatggacccatcagcccatcgcagcagagctgccccccctaacatggaccctgacccccaggccggagtgcaggtaggaatgcgggtggtgaggggagtagattggaagtggggccagcaggacgggggggaggggggggtgggcaccgtggtagagcttgggcgccacgggtcaccatccaccccagacaggactgtggtggtgcagtgggaccaaggcactaggacaaactaccgggccggctatcagggcgcccacgacctgttgctgtacgataacgcccaaatcggggtacgccatcccaacattatctgcgattgttgcaaaaaacatggactccgcggcatgaggtggaaatgccgggtctgtctggattacgacctgtgtacccaatgttacatgcacaataaacacgagctcgcacatgcttttgacagatatgagaccgcccacagcaggccggtgacgctgagcccaaggcaaggacttcctaggatcccacttcgcggaatctttcagggcgcaaaagtcgtgaggggtccagactgggagtgggggagccaggatggcggcgagggcaagccaggcagggtggtggacatcagagggtgggacgtggagacgggacgctctgtggctagtgttacttgggccgatggcacgaccaacgtgtatagggtcggtcacaaggggaaagtggacctgaaatgtgtgggagaagccgcaggagggttttactacaaagaccacttgccacgattgggcaagcccgctgaactgcagaggcgagtgtctgccgactcccagccatttcagcacggagataaagtaaaatgcctcctcgacacagacgtgttgagagagatgcaagaggggcatggggggtggaacccccgcatggccgaattcataggccaaaccgggaccgttcaccggataacagacagaggtgacgtcagggtccaatttaatcacgaaacgcggtggacgtttcatccaggggctcttaccaagcaccattccttctgggttggagatgtggtgcgcgttattggcgatctcgacactgttaagcggctgcaagccgggcacggggaatggaccgatgatatggcaccggccttggggcgagtcgggaaagtcgtcaaggtgtttggagacggcaatttacgtgtcgctgttgcaggacagcgttggaccttttctcccagctgcctggtagcttacagacccgaggaagacgctaacctggacgtcgccgaaagggctagggagaataaatctagtttgtctgtcgctctggacaaactgagagctcaaaagtccgacccggagcaccccggaagactggttgtggaagtggccctcggaaatgccgcacgcgctttagatctacttcgcaggagaccagaacaagttgataccaagaaccaaggacggactgccctgcaggtggccgcttacctgggtcaggtagaattaatcaggctgctgctgcaggcacgggcaggtgtggacctgcccgacgacgaggggaacacagcactccattacgcggctcttggcaaccagcccgaggcgacacgtgttttgctgagcgccgggtgcagagcagatgccataaattccacccagtctacagcgcttcacgttgcggtgcaaagggggttcctggaggttgtgagagcgctgtgtgagcgcggctgtgatgtgaaccttcccgatgctcactctgacacaccacttcacagcgcaatttccgctgggaccggggcatccggcatcgtcgaggtactcacggaggttcccaacattgacgtgactgctaccaatagccaaggcttcacactgttgcaccacgcgtctctgaaaggccacgccttggcagttcggaagattctggccagagcccggcagctggtcgatgccaaaaaagaggatgggtttacggccctgcatctggctgccctgaataatcatcgcgaggtcgcgcaaatcctcatcagggaagggagatgtgacgtcaatgttagaaatcgtaagctccaaagtccgctgcacctggctgttcagcaggcccacgtcgggcttgtccccctgctcgtggatgccggatgctccgtcaacgctgaggatgaagagggtgacaccgctctgcacgtggctctgcagcgccaccaactgctgccactggttgcagacggagccgggggggaccctgggcctctgcagttgctaagccgcttacaggcctcaggactgcctggatcagccgaactgacggtgggagcggctgtcgcatgctttctcgccctagagggtgctgatgtatcttatactaaccacaggggccggagccccctggatttagccgcggaaggacgcgtgctgaaagcgctccagggctgcgctcagcgattcagagagaggcaagccggcgggggcgccgccccaggtcccaggcagacccttgggactcctaatacggttacaaacctccacgttggtgcagcccctggcccagaagcagcagagtgtctcgtttgtagcgagctggcactgttggtactcttctctccgtgccagcatcgaactgtttgtgaggagtgcgcacggcgtatgaaaaaatgtattcggtgccaggtggtggtgtctaagaaactgcggcctgacggttctgaagttgcctccgctgcccctgccccgggccccccacgacagttggtggaggaattacaaagtaggtataggcaaatggaagagaggatcacctgccccatttgcattgacagccacataagacttgtgttccagtgtggacatggagcctgtgctccttgtggaagcgctcttagtgcgtgcccgatatgcaggcagcctattcgagatagaatccagatattcgtttag

SEQ ID NO: 26445 - DNA, 957 bp, synthetic construct
  source 1..957: mol_type = other DNA; note = Synthetic coding sequence
atgtgccggaccgccctgggcgtgaccaccctgcaggacctgggcgtttgttggagaaaagagcatgatcctgccgagatgctacgggttggcagagctgaactcggagggtggaagccaagttgggaggcaatcgttaaagaggtggccgcagccaccggacacacagtagttttggttgaccagacggaggatatacttgccaaatctaaaaaagggatcgaggagtcgctgaggaaggttgccaaaaagaagtttgctgagaacctcaaggccggggacgaatttgtcgagaaaactctttctaccatcgccacctctacagatgcggcctctgtggtgcactctacagacctcgtagttgaggccatcgtcgaaaatctcaaagttaaaaatgagctttttaaaaggctggataaattcgctgcagagcacacaatattcgctagtaatacaagttccctccagataacctctatcgcaaatgcaactactagacaggatcgcttcgccggtctgcacttttttaaccccgtgccagtcatgaaactagtggaagtgattaaaacacctatgactagccagaaaaccttcgaatcccttgtcgacttttcaaaggcattaggcaagcatccagtcagctgtaaggacacaccgggctttattgtgaatagattgttggtcccatacctcatggaagctatcaggctctacgaacggggggacgccagtaaagaagatattgacacagctatgaagctcggcgcaggctaccctatggggcctttcgagcttctggactatgttggtttggatacgactaaatttattgttgatggctggcacgagatggatgccgagaaccctctgcatcagccctcgccatcacttaataagcttgtggctgaaaataaatttggaaagaagaccggggaagggttctacaagtacaagtag

SEQ ID NO: 26446 - DNA, 1044 bp, synthetic construct
  source 1..1044: mol_type = other DNA; note = Synthetic coding sequence
atgaagctgaccagcgagaagctgcccaagaaccccttctacgcctcagtgtctcaatatgccgctaagaatcagaaatttttccagtggaaaaaagagaagacagactatacccatgccaatctggtcgataaggccctgcagctgctcaaagagagaatcctcaaaggtgacacactggcctattttctgcggggtcagctgtactttgaagaagggtggtacgaggaggccctcgaacagtttgaagaaataaaagagaaggaccatcaggccacgtaccagctcggcgttatgtattacgatggcttgggcactaccctggacgccgagaaaggcgttgactacatgaagaagatccttgattccccctgccctaaggcccggcaccttaaattcgccgcagcctacaatctggggagagcttactacgagggtaagggggtgaagcgaagcaatgaggaagcggaacggctgtggctgatcgccgccgataacgggaatcctaaggctagcgtcaaagcacagagcatgctgggactgtattactctacaaaagagccaaaggagctcgagaaggctttctactggcactcagaagcttgcggaaacggaaatttagaaagccagggtgccttaggtctcatgtacctttacggtcagggaatcaggcaggacacagaggccgctctgcaatgcctgcgggaggcagccgagaggggcaatgtatatgcacagggcaacctcgtcgaatattactataagatgaagttcttcaccaagtgcgtcgccttctctaaacggattgcggactatgatgaggtccacgacatccccatgatcgcacaggtgaccgactgtcttcctgaatttatcggccgagggatggcgatggcctcgttctaccacgcccggtgcctgcagctaggattggggattacaagggatgaaacgaccgctaaacattactacagtaaagcctgcaggctaaatcctgctctcgctgacgagcttcatagcctcttgattaggcagcgaatatag

SEQ ID NO: 26447 - DNA, 108 bp, synthetic construct
  source 1..108: mol_type = other DNA; note = Synthetic coding sequence
atgccccagaccttcagcggcggccggggcttcgagctggacagcggcagtgacgacatggatcccggaaggcctaggccacccagagacccagatgaacttcattag

SEQ ID NO: 26448 - DNA, 1179 bp, synthetic construct
  source 1..1179: mol_type = other DNA; note = Synthetic coding sequence
atgggcaccacctgcctgcacctgggcaccctggagcagagcctggtgttcgaaaacaaggtcaacagcgaaaaagtgaaactgtcccttaggaactttccacataatgactacgaggacgtatttgaagaacctagcgagtcggggagtgatccctcaatgtggactgctcgtggccccttcaggcgggataggtggagtagcgaggatgaagaagccgctggcccctcacaggccctgtccccacttctcagcgacacacggaaaatcgtcagtgagggcgaactggatcagctcgctcagattcggccactgatattcaattttcacgaacagactgctataaaagattgtctgaaaattcttgaggagaagactgccgcctacgacatcatgcaggaattcatggctctggagcttaaaaacctgcctggggagtttaatagcggaaatcaaccgtccaaccgcgaaaaaaaccggtaccgggatattctgccatacgatagcactcgcgtgccacttggaaaaagcaaggactacattaacgcatcatatatccgaatcgtgaattgcggtgaagaatacttttacatcgccacccagggtcccctgctgtcaacgattgatgacttctggcagatggttctggaaaataactctaacgttattgctatgattaccagggaaatcgaaggtggaatcattaagtgctatcactactggcctatctcacttaagaagccacttgagctcaagcattttcgggttttccttgagaattaccagatattacagtatttcattattaggatgttccaggtggttgagaaaagtaccggcacttcgcattcagttaagcagctacagttcaccaaatggcctgatcatggcactcctgcgagtgccgacagctttattaagtacatcaggtacgctcgtaagagtcatctaaccggacccatggtcgtgcactgctccgctggcattgggaggactggggtcttcttgtgtgtagacgtcgtgttttgcgcgatcgtgaaaaattgctcttttaatattatggacatcgtcgcacagatgcgtgaacaaagatctggcatggtccagacgaaggaacagtaccatttctgttatgatatcgttctcgaggtcctgagaaagctgctgactctcgactag

SEQ ID NO: 26449 - DNA, 2052 bp, synthetic construct
  source 1..2052: mol_type = other DNA; note = Synthetic coding sequence
atgaacaccagcatcccctaccagcagaacccctacaacccccgggggagctctaacgttatccagtgctaccgttgcggagatacatgcaagggtgaagtggttagggtccataacaaccattttcatatccgctgcttcacatgtcaagtgtgcggctgtgggttggcccagagtggctttttctttaagaatcaggagtatatttgtacccaagattaccagcagctgtacggcacccggtgtgactcctgccgtgactttattaccggagaagtaatctcggcgctcggtcggacgtatcatccaaagtgcttcgtgtgctcattatgtcggaagccatttccaatcggcgacaaggtaacctttagcggcaaggagtgtgtttgccaaacatgctcacagagtatggccagctcaaagccgataaagattaggggtccatcacattgcgctggctgcaaggaagaaattaaacacggacagagcctgctggccctcgacaaacagtggcacgtgagctgctttaaatgtcagacctgtagcgtaattttaacaggcgagtacattagcaaggatggcgtgccgtattgtgagagtgactaccacgcgcaattcgggatcaaatgtgaaacttgcgatagatacatttctggtcgcgtcttagaagcgggcggaaagcactaccatccaacttgtgcaaggtgtgtgaggtgccatcagatgttcaccgagggggaagagatgtatttgaccggatctgaggtgtggcatccaatctgcaagcaggcagctagggcagagaaaaaacttaagcaccggaggacaagtgaaacatcaatctctccccccggtagcagcatcggatctccaaaccgcgtgatctgtgccaaggtagataacgaaatattaaactataaagatctggcagctctgccaaaagtcaagtctatttatgaggttcagagacctgacttaatttcgtacgagccccattctcggtacatgagtgatgaaatgctggaaagatgtggttatggagaatctcttgggactctgtcaccctatagtcaggacatctacgagaacctggacctccgtcaaaggcgggcaagctccccaggctatatcgacagtcccacgtattctcgccaagggatgtctcctactttttcacgtagcccacaccattactatcggagtgggcccgagtctggccggtccagtccctaccacagtcaactcgacgtaaggagttccacgcccacctcatatcaggcacctaagcattttcacattcctgccggtgactctaacatttaccgcaaacctcctatttataagagacacggcgatctgagtactgccaccaaatctaagacttccgaggatatatcacaaacctccaaatacagcccgatatattcacccgatccctattacgctagcgagtcagaatactggacgtaccatgggagccctaaggtacctcgggcccggaggttcagtagtgggggagaggaagatgacttcgatcgctcaatgcacaagctgcagtctggcatcggacgtttgattcttaaggaggaaatgaaagccaggtctagttcctacgccgatccatggacgcccccacggtccagtacaagttctagggaggcactccacacggctggatatgagatgagccttaacggctctccacggtctcattatctggccgactcagatcctctgatatccaagagcgcttccttgcctgcctacagacgtaatggcctgcacagaacacctagcgcggatctgttccattacgactcaatgaacgctgtcaactgggggatgagggagtataagatttatccttatgagttgctgctggttaccaccaggggcagaaaccgccttcccaaagatgtggataggacccgcctggagcgtcatctcagccaggaagagttttaccaggtgttcggtatgaccatctcagagttcgatagactggctttgtggaaaaggaatgaactgaaaaagcaggcaaggttattctag

SEQ ID NO: 26450 - DNA, 99 bp, synthetic construct
  source 1..99: mol_type = other DNA; note = Synthetic coding sequence
atggacttcttcagcagccacctgctggccgacagcagcagccccgcaaccaacagctcccacactgatgcccacgaaatacttgtctctgacttctag

SEQ ID NO: 26451 - DNA, 858 bp, synthetic construct
  source 1..858: mol_type = other DNA; note = Synthetic coding sequence
atgagcgaggccggcgaggagcagcccatggagaccaccggcgccacagaaaacggacacgaggctgtacccgaaggtgaatcaccggcaggcgccggcacaggcgccgcggccggggctgggggcgctactgccgcaccaccctcggggaaccagaacggtgcagaaggagatcagatcaacgcgtctaagaatgaagaagacgctgggaagatgtttgtgggtgggttgtcatgggacacctcgaaaaaggacctgaaggattacttcaccaagtttggggaggtggtggactgtactatcaagatggatcccaacaccgggagatccaggggctttggcttcatcctattcaaggacgctgcttcggtggaaaaagtgctggaccagaaagagcatcggctggatggacgcgtgatcgacccaaaaaaagccatggctatgaaaaaagatccagtgaaaaagatatttgtgggtggcctcaatccagaggccaccgaggagaaaattagggaatattttggtgagttcggcgagatagaagccatcgagttgcccatggaccctaaactgaacaagcgtagaggttttgtctttataaccttcaaggaggaagagcccgtcaaaaaagttttagagaaaaagtttcataccgtcagtggtagtaagtgtgaaattaaggtggcgcagcccaaagaagtctaccagcaacagcagtacggctctggtggtaggggcaaccggaaccgcggaaacagaggatccggcggaggggggggcggtggcggccaggggtcaactaattatggaaagtctcaaaggcggggcggccatcagaacaactacaaaccgtattag

SEQ ID NO: 26452 - DNA, 354 bp, synthetic construct
  source 1..354: mol_type = other DNA; note = Synthetic coding sequence
atggtgcagcggctgacctaccggcggcggctgagctacaacaccgccagcaacaaaactcggctatctcgcactcccggaaacagaatcgtttacttgtacacgaagaaagtggggaaggctccaaagtctgcgtgtggggtgtgtcctggccggcttaggggggtgcgggccgttcgcccaaaggtactgatgcggctctctaagactaaaaagcatgttagcagggcgtacggcggaagtatgtgcgctaagtgtgttcgggatcgcatcaagagggcatttctgattgaagaacagaaaatcgtggtgaaggtgctgaaggctcaagcccagtctcagaaagccaagtag

SEQ ID NO: 26453 - DNA, 7614 bp, synthetic construct
  source 1..7614: mol_type = other DNA; note = Synthetic coding sequence
atggaggacttccggggcatcgccgaggagagcttccccagcttccttaccaatagcctattcggaaactctggcatcctggaaaacgtcaccctgtcctccaatctcggtctgcccgtcgctgtatctactctcgcgagagacagatcatctacggacaatcgttatccagatattcaggcatcttatctggtagagggcagattctctgtgccctctggcagctctccaggaagccagtcagatgccgagcccagagagcggctccagttatcctttcaggatgatgattctatcagtaggaagaaatcctacgtcgagtcccagaggttatctaacgcgctgagcaaacagagcgcccttcaaatggaaaccgcggggccagaagaagaaccagctggggcaacagagagtctccagggacaggacctgttcaatcgggcatcgccactggagcaggcgcaggacagccccatagactttcacctccagagctggatgaacaacaaagaacctaagatagtggtgttggacgccggaaagcactttgaggacaagacactcaaatcagacctgtcccacacatcgctcctggaaaacgaaaagctgatcttgcctactagccttgaagacagctcagatgacgacattgacgacgagatgttctacgacgaccacctggaagcttactttgaacagctggcgatccccgggatgatatatgaagatctcgaaggcccggagccgcctgagaaaggcttcaaactgcctacaaatggtttgaggcaagccaacgagaatggaagtctgaactgcaagtttcagtctgaaaataattccagtctcatctcgctggactcccacagctctgagacaacccacaaggaaagcgaggagagccaagttatctgtttgcccgggacttcgaattccatcgggaccggcgattctcgccgctatacagacggtatgcttcccttctcttcaggcacttggggcaccgaaaaggagattgaaaatctgaaagggatcgtgccagatctcaactcagaatgtgcaagtaaagatgtgttggttaagacactgcgtgctatcgatgtgaaattaaatagcgataattttcatgacgctaatgctaaccgaggagggtttgaccttaccgaccctgtgaaacagggagctgagtgtcctcaccagaataagaccgtcctgcatatggatggctgtctggatactgaaacaccaactgtgtccatccaagagaatgttgatgtggcaagtctgaaaccaatctctgacagcggcataaacttcacagatgccatttggtcaccaacatgcgaaaggaggacatgcgaatgccacgaatctatcgagaagaacaaggacaaaacagacttgccccagagtgtggtataccagaatgaagaggggcgctgggtgaccgatctggcctactacactagcttcaactctaagcagaatctgaatgtcagcctgtctgacgagatgaacgaggatttccgctccggctctgaggcgtttgatcttattgcccaagacgaggaggagtttaataaagagcaccaatttattcaagaggagaatatcgatgcgcacaatacttctgtagccctcggcgacacctcatggggcgctaccatcaactattcactccttcggaagagtaggagtacgtctgatctggataaagatgatgcttcatatctcaggcttagtttgggcgagttctttgcccagcgctccgaggctctcggatgcctcggaggcggcaataacgttaaacgaccatctttcggctatttcatccggagtccagagaaacgagagcctatcgctctcatcagaaagagcgacgtgtcaaggggcaatctggagaaggagatggctcatctgaaccacgatttgtatagtggcgatttaaacgagcagtcccaggcccagctgtctgaaggcagcatcactttgcaagtggaggccgttgagagcacttctcaggtagacgagaacgacgtgaccttgacagccgacaagggaaagaccgaggacaccttttttatgagtaataagccacagcgttacaaagataaactgcccgacagcggagacagcatgctgcgcatctcaacaatagcgtctgccattgccgaggccagtgtcaacaccgatccttcccaactagccgccatgattaaagctctgtcaaacaaaactcgagataagacctttcaggaggatgaaaagcagaaggactattcccatgtgcgccacttcctccccaacgatctcgagaaaagtaatggctccaatgccctggatatggaaaaatatttaaaaaagaccgaggtgtctcgctatgagagcgccctggagaatttttcacgcgccagcatgagcgacacctgggacctgtccctgccaaaggagcaaactacccaggacattcacccagttgatctttcagcaacttccgtttcggtccgggccccagaggagaacaccgctgctatcgtctatgtagagaatggcgagagcgaaaaccaggaaagtttccggaccataaactcctcgaactcggtgactaacagggaaaataactccgcggtcgtcgatgtaaagacttgctccattgataacaagctgcaggacgtgggcaacgacgaaaaggccacctccatctcaactccgtcggacagctattcttcggtccggaaccctcggattacgagcctttgtctgctgaaagattgcgaagagatacgtgacaacagggaaaatcagcggcagaacgaatgtgtatcagagataagtaatagcgagaagcatgttacttttgaaaaccaccggatcgtgtcacccaaaaactctgacctgaaaaatacaagccctgaacatggcggacgcggctctgaagatgagcaagagtcttttcgaccaagcaccagccctctgagtcatagctcaccgtcagagattagcgggacatctagctccgggtgtgccctggaatcattcgggtcagcggcgcagcaacagcagccgccatgtgagcaggaactgtctcctctggtgtgcagtcctgcaggcgtctcacggctgacctatgtgtctgaacccgagagttcgtacccaacaacagcgactgatgatgcccttgaggaccggaagtccgacattaccagcgaactttccacgacaatcattcagggttctccagccgctctggaagaacgggccatggagaagctgcgggaaaaggttccatttcaaaaccgcgggaagggaaccctatcaagtattatacagaataatagcgacacgcggaaggccacagaaaccactagcctatctagcaaacctgaatacgtcaaaccagatttcagatggtcaaaagatccatcctcaaaaagcggcaacttgctcgagactagcgaagtgggctggacgagtaaccccgaggaattggatcccattcgtctcgcgttactcggtaagagtggcctgtcgtgccaggtaggttctgccacttcccaccccgtgagctgtcaggagccaatagatgaggatcagagaatcagccccaaggacaaatccacagccggtcgcgagttcagtgggcaggtctcccatcagaccacgtctgaaaatcagtgtacccccatcccctcgtcaacggtccactctagtgtcgctgatatgcaaaatatgccagcggcagtacatgcactgctcacccagccatccctatccgcggccccatttgctcaacggtacctggggaccctgccttccacggggagcacaacactgccacaatgtcacgcaggaaatgccactgtctgtgggttttccggtggcctgccataccccgccgtcgccggcgaaccggtgcaaaacagcgtggctgtgggcatctgtctcggatccaatataggaagcgggtggatgggtacctcctccttatgtaacccctactctaacacgctcaatcagaatcttctgtcgaccacgaaaccgtttcccgtgccatcagtgggaacgaactgcggtatagagccatgggacagtggtgtaacatcaggcctggggagcgtgcgagtgccagaggaactaaaactgccccacgcatgttgcgtgggaattgcatctcagacactcctgtccgtcctgaatcccactgataggtggctgcaggtgtccatcggagtgctgtcaatctctgttaatggggaaaaagtggatctgtccacctatcgatgtttagtgttcaagaataaggcaatcatccgcccccatgcaaccgaggagataaaggtcctgttcattccctctagtcctggtgtctttcgatgtaccttcagtgtggcgtcctggccttgctcgacggatgcagaaacaattgttcaggcggaagccctggcctcaacagtaacccttaccgctatcgctgaaagcccggtaatcgaggtcgagacagaaaaaaaggatgtgcttgactttggagacctgacttacgggggttggaaggcactcccattgaagctgatcaatcgcacacacgccaccgtaccaatcagactcattataaatgcaaatgcagtagcatggcgttgcttcactttttcaaaggaatccgttagggcacccgtggaggtggctccttgtgccgacgtcgtaaccagactcgcgggaccttccgtggtgaaccacatgatgcctgcctcttatgacggacaggatcctgaatttctgatgatctgggtgctttttcacagtcccaagaagcagattagcagttctgatatccttgactctgcggaggaattcagcgctaaggtcgatatcgaggtcgactcccctaacccgacacctgtgcttcgctctgtcagtctcagggcccgagctgggattgcacggattcatgctccccgggatctccagacaatgcatttcctggccaaagtggcgtcgtctcgcaaacagcacctgccccttaaaaacgcaggaaacattgaggtttacctggatatcaaagtgccggagcaaggctcgcatttttcggtagaccctaagaaccttctgttgaagcccggtgaagaacacgaggtgatcgtatccttcacccctaaagaccccgaagcgtgcgaggagcgcatccttaagatctttgtccagccgttcggcccccagtatgaagttgtgctgaagggagaggtgatctcttccggcagcaagccgctttcacccggaccctgtctagacatcccctcgatcctgtccaacaaacagttcttggcgtggggcggagtgcccctgggtaggacacaactccagaaacttgccttgaggaataactccgcttcaaccacacagcatctacgtttactgatcagaggccaggaccaggactgcttccaactgcagaacaccttcggcagcgaacagcggctaaccagcaactgcgagatccggatccaccccaaggaggatatcttcattagtgtgctgttcgcaccgaccagactgtcttgtatgctagctaggctggaaattaagcagcttggcaaccgctcacaacctgggatcaagtttaccattccactatctggttacgggggaacttcgaacctgattttggagggggtaaaaaagctgtctgacagctatatggtcacagtaaatggcctcgtgcctggtaaagaatcaaagatcgtcttctctgtgcggaatacagggtcccgcgccgcatttgtgaaggcggtgggattcaaggacagtcaaaaaaaggtgcttcttgatcctaaagtgctgcgaatctttcctgacaagtttgtgcttaaggagaggacacaagagaacgttaccctgatctataatccctctgacaggggtattaataataagaccgcaaccgagctgtctaccgtttatctcttcgggggagacgagattagcaggcaacaataccgtcgggctctgctgcacaaacccgaaatgatcaagcaaattctccctgagcactccgtgttacagaacatcaacttcgtcgaagcctttcaggatgagctcttagtgaccgaagtatacgatctccctcaaagacccaatgatgttcagttgttctatggcagcatgtgcaaaatcatactaagcgtcatcggtgagtttcgcgactgcatatcttctcgggagtttctgcagccttccagcaaggccagccttgaaagcacatccgatctgggcgcctcggggaaacatggcggaaatgtgagcctcgacgtgctgccggtcaagggtccccagggcagccctctgctgagtcgagccgcgagacctcctctagaccagctagcctcagaagagccttggaccgtcctgcccgagcaccttattctggtcgccccaagtccatgcgacatggctaagactgggcgttttcaaattgtcaataactccgttaggctgttgagattcgagttgtgttggcctgcacattgtctgaccgtgacaccacagcatgggtgtgtagcgccagagagtaaactacagatattggtcagccctaacagtagcctaagcactaaacagtcaatgtttccctggtcaggtttgatctacatccactgtgatgacgggcagaagaagatcgttaaggtgcaaattagggaggaccttacccaggtagaactgctcacccgcctgaccagcaaacctttcggcattctatctccagtaagtgagccttcggtctctcatctggtgaaaccaatgaccaagcccccttccaccaaggtggaaataaggaataaatctatcacgttcccaacaactgagcccggcgagacatcagaatcgtgtctcgagctggagaatcacggcacaacagacgtaaagtggcacctaagcagcttagcgcccccatacgtgaaaggggttgatgagagcggagatgtgttccgcgccacctacgcagccttcagatgttctccgatctcaggcctcctcgaaagccacggcatccagaaggtgtccatcacatttctgcctcgcggacgaggggactacgctcagttttgggatgtggaatgccaccctttgaaagaacctcatatgaaacacacactcagattccagctgagtgggcagtcaatcgaggccgagaatgagcccgaaaacgcatgcttatctacagactccttaataaagattgaccatttggtgaagcctcggcgccaagcagtgtctgaagccagcgcaaggatcccggagcagctggacgtcactgctcgaggcgtatacgcacccgaggacgtgtaccggttccggccaacgtctgtgggcgaatcgcggacgctgaaagttaacctgagaaataatagtttcatcacgcactcactgaagttcctgtctcccagggagccgttctatgtgaaacattcgaaatacagtctgcgagcccaacactatatcaatatgcccgtccaatttaaacctaaatcagccgggaaattcgaggccctgctggtcatccaaactgatgagggcaaatctattgctatacgcctaatcggggaagcacttggaaaaaattag

SEQ ID NO: 26454 - DNA, 90 bp, synthetic construct
  source 1..90: mol_type = other DNA; note = Synthetic coding sequence
atgctgtgctggggcaacgccagcttcggccagctgggcctgggcggaatagatgaagaaattgttctggagcctcggaaatcagactag

SEQ ID NO: 26455 - DNA, 66 bp, synthetic construct
  source 1..66: mol_type = other DNA; note = Synthetic coding sequence
atggccaagtacaacaccggcggcaaccccaccgaggacgtgagcgtcaacagtaggccattttag

SEQ ID NO: 26456 - DNA, 261 bp, synthetic construct
  source 1..261: mol_type = other DNA; note = Synthetic coding sequence
atggaggccgacatcatcaccaacctgcggtgccggctgaaggaggccgaggaggagaggctgaaagctgctcaatacgggttgcagctggtggaatctcagaacgagctgcaaaatcagctggacaagtgccggaacgagatgatgaccatgaccgagagctatgaacaagagaaatacaccctgcagcgggaagttgagctgaagagtcgcatgctggaatcgctgtcctgtgagtgcgaagctataaagcaacaatag

SEQ ID NO: 26457 - DNA, 1983 bp, synthetic construct
  source 1..1983: mol_type = other DNA; note = Synthetic coding sequence
atggtgaccagcctgaacgaggacaacgagagcgtgaccgtggagtggatcgagaacggggatacgaaagggaaggaaattgacctggaatccattttttctctgaaccccgatcttgtacccgacgaggagattgagcccagtcctgagacgcctccccccccggcaagctccgccaaggttaacaagatcgtgaagaaccgaaggacagtagcaagtataaagaacgacccaccgagccgggataatcgggtggttggaagcgctcgggctcggcccagccagttccccgagcagagcagcagtgcccaacagaacgccaggagaaagtcaaattgtgtaaaagaggtggaaaagctgcaagaaaaacgcgagaagcgtcggcttcagcagcaggaactgcgggaaaagagggcacaggatgtagatgccactaatcccaattatgagattatgtgcatgatcagagactttcgagggagtctggactacagaccccttacaaccgctgaccccattgacgagcacaggatatgtgtttgcgtcaggaaacgtcccctgaacaaaaaggaaacacagatgaaggaccttgatgtcatcacaattcctagtaaggacgtggtgatggtccatgagcctaaacaaaaggttgatttgactaggtacctggagaaccaaacctttagattcgactatgccttcgacgatagtgctcccaatgagatggtataccggttcacggcaagaccactggtggagaccatatttgagagaggtatggctacctgcttcgcttacggccagactggaagcggaaagacgcacactatgggtggcgacttttctggaaaaaatcaagactgttctaaaggcatctacgcactggccgcacgagatgtgttcttaatgttaaagaagcctaactacaaaaagttggagctccaagtgtatgccactttctttgagatctactccgggaaggtgtttgatttactgaaccggaagaccaagctgagggtactcgaagacggcaaacaacaagtgcaggtggtgggcctgcaggagagagaagtgaaatgtgtggaagacgtgctcaaactgattgacattggcaactcctgcagaactagtggtcagacctcagccaatgctcactctagccggagtcacgcagtgttccagatcatcctgcgccgaaaggggaaactccacggcaagttcagtctgatcgacctggcaggcaatgaacggggggcagatacatctagtgctgaccggcagaccaggctggagggggctgaaattaacaagtcacttttggctcttaaggagtgtattcgtgctttgggtagaaacaagccccacacccctttcagagccagtaagctcacgcaagtcctaagagattcctttataggagaaaattctagaacatgcatgatcgcaactatctcgcctggcatggcctcttgtgagaatacactcaacacactccggtacgcaaaccgcgtaaaggaactcacagtggatcccactgccgccggcgatgtccggccaattatgcaccacccacctaaccagatcgacgatctcgagacacaatggggcgtggggagttctccgcagcgcgacgacctgaaactgctctgcgaacaaaatgaagaggaggtgagtccacagttattcacatttcatgaggccgttagccagatggtcgaaatggaggagcaggtcgtggaggaccatcgggccgtatttcaggagagcattcgctggctggaggacgaaaaagctctgctggaaatgactgaggaggtcgactacgacgtggacagttatgctactcagctggaagccatcctggagcagaaaattgacatcctgaccgaactcagggacaaagtcaagtcttttcgagcagctctgcaggaagaggagcaggcctcaaaacaaattaaccctaagcgcccccgggctctctag

SEQ ID NO: 26458 - DNA, 207 bp, synthetic construct
  source 1..207: mol_type = other DNA; note = Synthetic coding sequence
atgagcagcccccgggacttccgggccgagcccgtgaacgactacgaagggaatgacagcgaggctgaagatctcaacttcagagaaaccctaccgtccagcagccaggagaatacaccgaggagcaaggtctttgagaataaagtgaactctgagaaagtaaagctaagtctgcgtaacttccctcacaatgattacgaggattag

SEQ ID NO: 26459 - DNA, 294 bp, synthetic construct
  source 1..294: mol_type = other DNA; note = Synthetic coding sequence
atgaacggccgggccgacttccgggagcccaacgccgaggtgcccaggcctattccccacatcggacccgattatattcccaccgaggaagagcggagggtttttgccgaatgcaatgacgagtccttctggtttagatccgtgcccctcgccgcaacaagcatgctgataacacaggggcttataagcaagggcattctgtccagtcatccaaagtatggtagcattcccaaactcattttggcatgtattatggggtacttcgcaggaaaactgtcctacgtgaaaacctag

SEQ ID NO: 26460 - DNA, 309 bp, synthetic construct
  source 1..309: mol_type = other DNA; note = Synthetic coding sequence
atggtgatggagaagcccagccccctgctggtgggccgggagttcgtgcgtcagtattataccttacttaacaaggcccccgaataccttcatcgattctacggtaggaatagctcatatgtccacggtggtgtggatgcaagcggcaagccacaagaggccgtgtatgggcagaacgacatacaccataaagtgctttccctgaatttcagcgagtgccatacgaagattcgacatgtggacgcccatgccacactcagcgacggggtcgtggtccaggtgatgggcctgctgtcgaactcagggtag

SEQ ID NO: 26461 - DNA, 597 bp, synthetic construct
  source 1..597: mol_type = other DNA; note = Synthetic coding sequence
atgggcaccacctgcctgcacctgggcaccctggagcagagcctggtgttcgaaaataaagtgaactccgaaaaagtgaaactctctctaagaaatttcccgcacaacgactacgaggatgtgtttgaggagccgagtgagagtggttcagacccgagtatgtggacagcgcgcggtcctttccgaagagatcggtggagcagcgaagacgaggaggccgctggaccctcccaggcgttgagtcccttgctatccgacactcggaaaatcgtctctgagggcgagctggaccaactagcgcagatccgccctcttatcttcaacttccacgagcagacagccattaaggattgtttgaagattctggaggagaagacggcagcttacgacatcatgcaggaatttatggcccttgagctgaagaacctgcctggggagttcaacagcgggaaccaacccagcaatagggaaaaaaaccgctatagggacatccttccctttcaacaccacggctactctggacctaacgaacgaacaacattttggcatgggtctaatgagggggctgtgagcctgttgctgaggtattgcgcgtag

SEQ ID NO: 26462 - DNA, 384 bp, synthetic construct
  source 1..384: mol_type = other DNA; note = Synthetic coding sequence
atgcggcccctggacatcgtggagctggccgagcccgaggaggtggaggttctcgagccggaagaagattttgagcagtttttattaccggtgattaacgagatgcgagaagatattgcctccctgacgcgggaacacgggcgtgcctacctgcgcaatagatccaaattgtgggagatggacaatatgcttatccagatcaaaactcaggtggaggcatccgaggaatctgcgctgaaccatctgcagaatcctggtgacgctgcagaggggagagccgccaaaaggtgtgaaaaggcagaagagaaggccaaggagattgcaaaaatggcagaaatgctggttgagctcgtgcgcaggatcgagaaatccgaatctagttag

SEQ ID NO: 26463 - DNA, 426 bp, synthetic construct
  source 1..426: mol_type = other DNA; note = Synthetic coding sequence
atggtgatggagaagcccagccccctgctggtgggccgggagttcgtgaggcagtattatacactcctgaacaaggccccagaatatctccaccgcttttacggacggaactcatcttacgtccacggtggtgttgatgcctcaggaaagccccaggaagccgtgtacggtcagaacgacatccaccacaaggtgctctcactcaacttcagtgaatgtcacaccaaaatacggcatgttgacgcacatgccaccctgtcagatggggtggtggtgcaggtgatgggtctgctctctaactccggccagcccgagaggaagttcatgcagacatttgtgttggcgcctgaaggctccgttccgaacaagttctatgttcataacgacatgtttagatacgaggatgaggttttcggggattcctag

SEQ ID NO: 26464 - DNA, 135 bp, synthetic construct
  source 1..135: mol_type = other DNA; note = Synthetic coding sequence
atgctgctgctggactgcaaccccgaggtggacggcctgaagcaccttctggagacaggcgcgagtgtcaatgctcctcctgatccctgtaagcaatcacctgttcatctagctgctggctccggactcgcgtag

SEQ ID NO: 26465 - DNA, 399 bp, synthetic construct
  source 1..399: mol_type = other DNA; note = Synthetic coding sequence
atgaagcggggccggctgcccagcagcagcgaggacagcgacgacaacggtagcctgtcaaccacttggtcccaaaacagcaggagccagcacagacggtcttcctgttcacgacacgaggaccgtaaaccaagcgaggtgttcaggacagaccttattaccgccatgaagcttcacgatagctaccaactgaatcccgatgagtactacgtccttgccgacccctggagacaagaatgggagaaaggggtgcaggtacccgtgtcaccaggtaccataccacagccggtcgctcgtgtcgtgtccgaggagaaatccctaatgtttatcaggcctaaaaaatacatagtgagcagtggtagcgagccccctgagctcgggtatgtggacattcgttag

SEQ ID NO: 26466 - DNA, 972 bp, synthetic construct
  source 1..972: mol_type = other DNA; note = Synthetic coding sequence
atgcggaccgccgaccgggaggcccggcccggcctgcccagcctgttgctgttgcttttggcaggcgccgggctgagcgcggcctctccccctgccgcacccagattcaacgtatctttggactcagtccctgagctgagatggttgcctgtgctccggcactatgacctggacctggtgcgagccgcaatggcccaggtcatcggggaccgcgtaccaaagtgggtccatgtgctgattgggaaggtggtgttggagcttgagcgcttcctgccacagcccttcacaggagaaattagagggatgtgcgacttcatgaatctgtccctagccgattgcctgctcgtgaatctggcctatgagagctcggtgttttgtacgtccatagtcgctcaggactctaggggccatatctatcatggtcgcaatctcgattaccccttcggtaacgtactgagaaaactgactgtcgatgtccaatttctgaagaacggacagatagccttcactggaacaacttttatagggtacgtgggattgtggaccggccagtcaccccataagttcactgtttccggcgacgaaagagacaagggatggtggtgggaaaatgccattgctgctctgtttcgaagacatatccctgtgtcatggttgatcagggccaccctttccgagtcagagaacttcgaagcagccgtggggaagctggcgaaaactcctctaatcgcagatgtgtattatattgtcggaggcacctccccccgggagggcgtcgttataacaaggaacagagatggtcccgctgatatctggccactcgaccccttgaacggcgcttggtttcgggttgagactaattacgatcattggaagcccgccccaaaggaagacgacagaaggacttccgctatcaaggcactcaacgcgaccggccaggccaacttgtctctcgaggccctcttccagtag

SEQ ID NO: 26467 - DNA, 312 bp, synthetic construct
  source 1..312: mol_type = other DNA; note = Synthetic coding sequence
atggcccagaccgacaagcccacctgcatcccccccgagctgcccaagatgctaaaggaattcgcaaaagcggcaatcagggctcagcctcaggaccttatccaatggggagccgattacttcgaagcattatctaggggtgagaccccccctgtgagagaaaggtctgagagagtggccctttgcaactgggcagagttgacccctgaactgttgaaaatactacatagtcaggtggccggacggttaatcattcgggccgaagagctggcccaaatgtggaaagttgttaacttgcctaccgacctgtag

SEQ ID NO: 26468 - DNA, 540 bp, synthetic construct
  source 1..540: mol_type = other DNA; note = Synthetic coding sequence
atggaggacggcacccccaagcacatcatccagatgaccggcttcaaaatggaggaaaaggaagccttggtgaaactcttgcttaaactcgactgcaccttcattaagtctgagaagtacaagaattgcacccacttgatcgctgagcgcctctgcaaaagcgagaaattcctcgctgcatgtgctgcaggaaagtggattctaacaaaggattatatcattcactccgcgaaaagtgggagatggctcgacgagactacttacgagtggggatacaagatcgagaaggactcacggtacagtccccagatgcaaagcgcgccgaaaagatggcgggaggagttaaagagaaccggggcacccggagcatttcaccgctggaaggtggtgcttcttgttaggactgacaaaagatccgattcccttattagaaaaaagtttaggatgatgaagattcctaagcccattctgttcgggctgaatatagcgatgaagaagcagacgaagatttctgggaagatgcaggacttcctaaagtag

SEQ ID NO: 26469 - DNA, 453 bp, synthetic construct
  source 1..453: mol_type = other DNA; note = Synthetic coding sequence
atggaggccgacatcatcaccaacctgcggtgccggctgaaggaggcggaggaagaacgcctaaaggcagcacagtatggactgcagcttgtggagagtcaaaatgagttacagaatcagctggacaagtgtaggaatgaaatgatgacgatgactgagtcctatgagcaggagaaatataccctgcagagagaggtggagttgaagtccaggatgttagagtcactttcttgcgaatgtgaggccattaaacagcagcagaagatgcacttggagaagctggaggaacagctaagtaggagtcacggccaggaagtgaacgaactgaaaactaaaattgaaaagctgaaggtggagctggacgaagctcgcctgtctgaaaaacagctcaaacaccaggtggaccatcaaaaagaactactgtcctgtaaaagtgaggagctgcgagtgtag

SEQ ID NO: 26470 - DNA, 738 bp, synthetic construct
  source 1..738: mol_type = other DNA; note = Synthetic coding sequence
atgaacggccgggccgacttccgggagcccaacgccgaggtgcccaggcctattccacacatcggtccagactatattccaactgaggaggagcgtagggtgtttgccgagtgcaacgacgaatcattttggttcaggtccgtcccactggctgccacatccatgttgataacacagggactgatttcaaagggtattctttcttcacacccaaagtatggttccatccccaaacttattcttgcctgcataatggggtactttgcaggcaagctgagctacgtaaagacatgccaagagaaatttaaaaagctagagaacagccccttgggcgaggcgctacgttcgggtcaggcccgcaggtcatcaccccctgggcactactatcagaaatcaaagtacgattcttccgttagtggccagtcctccttcgttacatctccagccgctgataatatagagatgttgccccactacgagccgatccctttctcaagctctatgaacgaaagcgctccaaccggcataacggaccacattgtgcagggtcccgatcctaacttggaggagagtcctaaacgcaagaatatcacatatgaagagctcaggaacaagaaccgggaaagttatgaggtgagcttgacacagaaaacagatccgagcgtgcgccctatgcacgaaagggtcccaaagaaagaagtcaaagtaaataagtacggcgatacctgggatgagtag

SEQ ID NO: 26471 - DNA, 180 bp, synthetic construct
  source 1..180: mol_type = other DNA; note = Synthetic coding sequence
atggtgatggagaagcccagccccctgctggtgggccgggagttcgtaagacagtattacacactgctaaataaggcacctgagtacttgcatagattctacggccgtaacagctcatatgttcatggcggtgtggatgctagcggaaaaccccaggaagctgtgtatggccagaactag

SEQ ID NO: 26472 - DNA, 597 bp, synthetic construct
  source 1..597: mol_type = other DNA; note = Synthetic coding sequence
atgggcaccacctgcctgcacctgggcaccctggagcagagcctggtcttcgagaataaggtcaatagcgagaaggtgaagctgagcctgcggaatttccctcacaacgactatgaggacgttttcgaggaacccagcgaatccggttcagatccctctatgtggaccgcccgtggtccattcagaagagatcgatggagcagtgaagatgaggaagccgccggaccttcccaggctctgtcacccctcctatcggatacgaggaagattgtatccgagggtgagctcgatcaattagcccagattaggcccctcatcttcaattttcatgaacagaccgccattaaagactgccttaaaattctcgaggaaaaaactgctgcgtacgacatcatgcaggaattcatggccctagaactgaagaaccttccaggagagttcaacagtggaaatcagccatctaaccgagagaagaataggtatcgggatatactgccatttcaacaccatggctatagcgggccgaatgaacgaacaacattctggcacgggtcaaatgaaggtgctgttagcttattgctgagatactgcgcatag

SEQ ID NO: 26473 - DNA, 465 bp, synthetic construct
  source 1..465: mol_type = other DNA; note = Synthetic coding sequence
atggccagcgccagcgcccggggcaaccaggacaaggacgcccactttcccccaccctccaaacagtctttattgttttgcccgaaatcaaaactgcacattcaccgtgcagaaatatctaaaattatgagggagtgccaggaggagtcattttggaaaagagccctgcccttttccctggttagtatgctggttacccagggcctggtgtatcagggttatctggcagcgaactccagatttgggagccttcccaaggtagccctggctgggctgctcgggtttggcctgggaaaagtgtcctatattggcgtctgccagtctaaattccactttttcgaggaccaattaagaggcgcgggcttcggccctcaacacaaccggcactgtcttctcacttgtgaggagtgcaagatcaaacatgggctgagcgagaaaggtgacagtcaacctagtgcctcttag

SEQ ID NO: 26474 - DNA, 2520 bp, synthetic construct
  source 1..2520: mol_type = other DNA; note = Synthetic coding sequence
atgagcgtggtgggcatcgacctgggcttcctgaactgctacatcgctgtagcccgcagcgggggcatcgagactatcgcaaatgagtactccgacaggtgcacaccagcctgcattagcctcgggagccgcaccagggccatcggcaacgccgccaagagccagattgtaactaatgtgcgaaacacaattcacgggtttaagaagctgcatggaaggtcattcgacgaccctatagtgcagactgaaagaatccgacttccctacgagctacagaaaatgccaaatggaagcgccggggtcaaggtgcgctacctggaggaagagcggccttttgcgattgaacaggtaacgggaatgctgctggcgaagctgaaggagacgtctgaaaacgcgttgaaaaagcccgtggcggattgcgtgatctcgatcccaagcttctttacagacgcagagcgaaggtcagtgatggccgcagcgcaggtcgccggcttgaattgtctgagactgatgaacgagacaaccgccgtggctttggcttatggcatctataagcaagatttaccgccactggatgaaaagcctcgcaatgtggtatttattgatatgggccactcggcatatcaggtcttagtgtgcgctttcaacaagggtaaactaaaagttctggcaacgactttcgatccatacctcgggggccggaacttcgatgaggccctggtcgactatttttgtgatgagttcaagaccaaatacaaaattaacgtgaaggaaaattcacgcgcgttgctgcgcctctatcaggagtgcgaaaaactgaagaaactgatgtccgcgaatgcatctgatttgcccctcaacattgaatgttttatgaatgatcttgacgtgtcttcaaagatgaatagagcccagttcgagcagctctgcgctagcttattggccagggttgagcctccattgaaggctgttatggaacaggcgaatcttcagcgagaggatatttcttctatcgagattgtggggggcgccactcggatcccagccgttaaagagcagataacgaagttcttcctcaaggacatctccacaacacttaacgctgatgaggccgttgcacgtggctgcgccctgcagtgcgccatcctgtcccccgcgttcaaagtgagagagttctctattactgacttggtgccttattcaatcactttgcggtggaagacgagttttgaagatggtagtggggagtgtgaggttttttgtaagaatcaccccgcaccatttagcaaggtcataacctttcataaaaaagagccatttgaactggaggcattctacacaaatctacacgaagtaccctaccccgatgcgagaatcggatccttcactatacaaaacgtattcccccagtccgacggtgactcaagtaaagtgaaggtcaaggttagagtgaacattcatgggattttctctgttgcctctgccagtgtgattgaaaagcagaatctggaaggtgaccattcagatgctcccatggagacagagacttccttcaagaacgagaataaagacaacatggataagatgcaggtggatcaggaagaaggccaccaaaaatgccatgccgagcacaccccggaggaagagatcgatcacactggggccaagacaaaaagtgctgtcagtgacaagcaggaccgactcaaccagactctgaagaaggggaaggtgaaatcaattgatttgcccatacagagtagcctgtgtaggcagctaggccaggatctgcttaacagctacattgagaatgaagggaagatgatcatgcaggacaaattagagaaagagaggaacgacgctaagaacgcagttgaggagtacgtgtacgatttccgggatcggctgggaaccgtgtacgaaaaattcattactccagaggatttgtctaagctgagtgctgtgcttgaggatacagagaactggctttacgaagatggtgaagatcagcccaaacaagtgtacgtagataaactccaggaactaaagaaatacggtcagcccatccagatgaagtatatggagcacgaggagcgtcccaaggctcttaacgaccttggcaaaaagatccagttagtgatgaaagtaattgaagcataccgtaacaaggacgaacgctacgaccatctcgaccctaccgagatggaaaaagtcgagaaatgcatttccgatgccatgagttggctgaactcaaaaatgaatgcgcaaaacaagctcagtctcactcaggacccggtggtgaaggtttccgaaatagtggctaaatcaaaagagctcgacaatttctgcaatcccatcatctataagcccaagccaaaggccgaagtgccagaagataagcctaaggcgaactctgagcataatggacctatggacggacagtcaggcactgagaccaagagcgactccaccaaggattccagtcagcataccaaatcaagcggagaaatggaggtggattag

SEQ ID NO: 26475 - DNA, 54 bp, synthetic construct; identical to SEQ ID NO: 12927
  source 1..54: mol_type = other DNA; note = Synthetic coding sequence

SEQ ID NO: 26476 - DNA, 2394 bp, synthetic construct
  source 1..2394: mol_type = other DNA; note = Synthetic coding sequence
atgggcgtgagccggctgatggacctgctggccgacagccgggaggtgattagaaacgatggtgtactgttacttcaggctctcacccggagcaatggcgcaatccagaaaatcgtggcttttgagaacgccttcgaacggctgttggacatcatttctgaagagggcaactcagatggtggtatcgtggtggaggattgtttgatcctattgcagaatctgctcaagaataacaatagcaatcaaaatttcttcaaagaggggtcttatatccagcggatgaagccctggttcgaagttggagatgaaaactcagggtggtcggctcagaaggtgacaaatctgcacttgatgctgcagttggtgcgagttctggttagtcctaccaatcccccaggggccacatcctcttgccagaaagctatgttccagtgcggcctacttcagcagctttgcaccatcctgatggccacaggcgtgcctgcggacattctgactgaaactatcaataccgtgagcgaggtcattagagggtgccaagtaaatcaggactatttcgcttcagttaatgcgccttcgaacccacctcgccccgctatagtggtcctcttgatgtccatggtgaatgaacgccagccttttgtgttacggtgcgcagtgctctattgctttcaatgcttcttgtacaagaatcagaaagggcagggtgagatcgttagcacactcctgcctagcaccatcgacgccacaggcaactccgtctccgctgggcagctcctctgcggcggactgttctctaccgattctctctcaaactggtgcgctgcggtcgccctggcacacgcactgcaagaaaatgccacacagaaagaacagctactacgcgttcagctggccacttccattggcaatcccccagtgagcctcctgcagcagtgtacaaacatcttgagtcaggggagcaagatccagacacgggttgggctcttaatgctattatgtacctggctcagcaactgccctatcgctgtcacgcacttcttgcataacagtgctaatgtgccctttctgacaggccaaatcgccgagaacctaggagaagaggaacagctcgtgcaggggctctgcgccctgctgctgggaatttccatttatttcaatgataacagcctcgaatcctacatgaaggagaagttaaagcagcttatagaaaaaagaattgggaaggagaattttattgagaaactgggatttatctctaaacatgaactgtatagcagggccagccagaagcctcaaccaaacttcccatcaccagagtacatgatttttgatcacgaatttacgaaattggtcaaagaactggagggcgtgatcactaaagcaatctacaagtcgagtgaagaggataaaaaggaggaggaggttaagaaaacactagagcaacacgataacatcgtaacccactacaagaacatgattcgggagcaggacttgcagctggaggagctacgtcagcaggtgagtaccctgaaatgccagaatgagcagcttcagaccgctgttactcaacaggtttctcagattcagcagcacaaggatcagtacaatttattaaagatccaactgggaaaggataatcagcaccaggggtcctattctgagggcgcccaaatgaatggcatccagccagaggagatcggcaggttgagggaagaaatagaggaactgaaaaggaatcaggaactcttacagagccagctgaccgagaaggactccatgatcgagaacatgaagagtagccagaccagtggcaccaatgaacagtcttccgctattgttagtgcgcgcgacagcgagcaggtggctgaactgaagcaggaacttgcaaccctcaagtcccagctgaactctcagagcgttgagatcacaaaactgcagacagaaaaacaggagctcctgcaaaaaaccgaggccttcgccaagtctgtcgaggtgcaaggtgagactgagacaatcatagccacaaaaacaaccgacgtcgaaggacggctgagtgctctactccaagaaacaaaagagttgaagaacgagataaaggcgctgtccgaggagcgaacagctattaaggagcagctagacagctccaactccacaattgcaattctccagacagagaaagataaactggaactggaaattaccgacagcaagaaagaacaggatgatctgctggttctcctagcagatcaggatcaaaaaattctgagcctcaaaaataaactaaaggaccttgggcatcccgttgaagaagaagatgagttggaaagcggcgaccaggaagacgaggacgatgaatctgaggatcccggcaaagatttagaccacatatag

SEQ ID NO: 26477 - DNA, 441 bp, synthetic construct
  source 1..441: mol_type = other DNA; note = Synthetic coding sequence
tgacggcacctgcgggccacccccaacacccggggcagcgcccggctcctttgcgcagagatgcccaagaaggcaggagctaccacaaaaggcaaatcgcaaagcaaggaacccgaaagaccgctaccccccctgggaccggtcgctgttgatccaaaggggtgtgttaccatcgctatacacgctaagcccggttcgaaacagaacgcagtgaccgaccttaccgctgaggccgttaacgtggctattgccgccccccccagtgagggcgaggccaacgccgaactgtgtcgatacctgagcaaagtgctagagttgcggaagagtgatgtggtcctggataaaaagttgcgtgacctgttgaagatcgtgccgtgtaagctggccacaaggacacagattctcggcttgctggtcgagtgcagcttctctaggctttag

SEQ ID NO: 26478 - DNA, 243 bp, synthetic construct
  source 1..243: mol_type = other DNA; note = Synthetic coding sequence
atgaacggccgggccgacttccgggagcccaacgccgaggtgccccggcctattcctcacatcggtcctgactatattccgaccgaggaggaaagaagagtgttcgcagagtgcaatgacgaaagcttttggttcaggtcagtgcctctcgcggctactagtatgcttatcacacagggactcatcagcaaagggatactgagttcccatcctaagtacgggagcattccgaaattaatttag

SEQ ID NO: 26479 - DNA, 360 bp, synthetic construct
  source 1..360: mol_type = other DNA; note = Synthetic coding sequence
atgaagcggggccggctgcccagcagcagcgaggacagcgacgacaatgggagtctgtccacaacctggagccagaatagcagatcacagcatcgccgcagttcctgctccagacatgaggatcgcaagccttccgaagtctttcggaccgatcttattactgctatgaagctccatgacagctaccaattgaaccccgatgagtattatgtactcgcagatccctggcggcaggagtgggaaaagggtgtccaggtacccgtctcacccggaacaatccctcaacccgtcgctcgcgtggtgtctgaggaaaagtctcttatgtttattcgaccgaaaaaatacatcgttagcagctag

SEQ ID NO: 26480 - DNA, 69 bp, synthetic construct
  source 1..69: mol_type = other DNA; note = Synthetic coding sequence
atggccaagtacaacaccggcggcaaccccaccgaggacgtgagcgtcaactcaagaccattcaggtag

SEQ ID NO: 26481 - DNA, 1059 bp, synthetic construct
  source 1..1059: mol_type = other DNA; note = Synthetic coding sequence
atggccgccgccgtgcggcaggacctggcccagctgatgaacagctctggtagccataaggatctcgcagggaaataccggcagattttagaaaaggcgatccagctgtcaggagcggagcagctcgaagctcttaaggccttcgttgaagccatggtgaacgagaacgtgagtctggtgattagtcggcagttactcaccgacttctgcacccacttgcctaatctgccagattccacggccaaggaaatctatcatttcactttagagaagattcaaccccgggtcatcagcttcgaggagcaagtcgcctcaatccggcagcacttagcttctatttatgaaaaagaagaagactggcgtaatgccgctcaggtgcttgtcggcattccgctggagaccggccagaaacaatataatgttgattataagcttgaaacatacctcaagatcgcaagattatacctggaagatgacgatcctgtacaagctgaggcctacattaaccgggcttccctgctgcagaatgaatctacaaacgagcaattgcagatacattacaaagtgtgctacgcccgagtgctggattacagacgcaagttcatcgaggcagcacagcgttacaatgagctatcttataaaactatcgtgcatgaaagcgagaggctcgaggcactcaaacacgctctccactgtacgatattggcttccgccgggcagcagaggtctcggatgttggcaaccctgttcaaagacgaacggtgccagcagcttgcagcatatggtattctcgaaaagatgtacctagacagaatcatcaggggaaaccaattacaggagttcgctgccatgctgatgcctcaccagaaagctacgaccgctgacgggtcctctatattggaccgcgcagtgattgagcataatttgctctccgcctccaagctgtataacaatataacattcgaagaactgggcgcccttctggagattcctgccgctaagcatgaaaaaccttgccaacgagggattagccggtctaaccatttcgttagtaaatag

SEQ ID NO: 26482 - DNA, 378 bp, synthetic construct
  source 1..378: mol_type = other DNA; note = Synthetic coding sequence
atggtgatggagaagcccagccccctgctggtgggccgggagttcgtccggcagtactacaccttgctgaacaaagcccccgagtatctgcacaggttttacggtcgcaattcctcatatgtgcatggtggagtggacgctagcggaaaaccacaggaggccgtgtacggtcagaacgacatacaccacaaggtcctgtcactcaatttctcagaatgccatactaaaattcgccacgtggatgcccacgcaactctcagcgacggcgtggttgtccaggttatgggactgctgagtaattcagggcagccggagagaaagtttatgcaaacttttgtcctggcccccgaaggctccgttcccaataaattctattag

SEQ ID NO: 26483 - DNA, 657 bp, synthetic construct
  source 1..657: mol_type = other DNA; note = Synthetic coding sequence
atgaacggccgggccgacttccgggagcccaacgccgaggtgccccgacccatcccccccgtacctttggctgcgacgtctatgcttattacacagggactcatctccaagggcatactctcctcccatcccaaatatggatcgataccaaaactgatacttgcttgcattatgggatactttgctggaaaactaagctacgtcaaaacctgccaagagaaatttaagaaactcgagaattcacccctgggagaggcgctgagatccggacaggcccgtcgatcatccccccctggtcattattaccagaagagtaagtacgattctagtgtatccggacagtcaagctttgttactagtccagccgctgacaacattgagatgctgcctcactatgaacctatacccttttcatcaagtatgaacgagagcgcaccaaccggaattacagaccacatagttcaagggccagaccccaacctcgaagagtctcccaaaagaaaaaatataacatacgaggagctgcgtaacaagaatcgagaatcatatgaggtctctctcactcagaaaaccgacccatctgtgagacccatgcacgaaagggtgcccaagaaagaggtcaaagttaataagtatggagacacttgggacgaatag

SEQ ID NO: 26484 - DNA, 243 bp, synthetic construct
  source 1..243: mol_type = other DNA; note = Synthetic coding sequence
atgaacggccgggccgacttccgggagcccaacgccgaggtgccccgacccattcctcatatcggacctgattacatccctacggaggaggagagaagggttttcgctgagtgcaacgatgagagtttctggttcaggagcgtcccgctggcggccacctctatgctgatcactcaggggctgatttctaaagggattttgagctcccacccaaaatatgggagcatcccaaagctaatttag

SEQ ID NO: 26485 - DNA, 654 bp, synthetic construct
  source 1..654: mol_type = other DNA; note = Synthetic coding sequence
atgatcgtgaacgactacgagggcaacgacagcgaggccgaggacctcaacttcagagagacactgcctagtagctcacaggaaaacactccccgctccaaggttttcgaaaacaaggttaattctgagaaggtgaaactctccctccgcaatttcccacacaacgattacgaggacgtttttgaagagcccagcgagtctggctcagatccttctatgtggacagctaggggccccttccgaagggatcggtggtcctccgaagacgaggaggctgccggcccttcacaggcactgagcccactcctctctgatacacgcaaaatcgtgtccgagggggaattggatcaactcgctcagatccgcccattaatctttaacttccacgagcaaaccgccattaaagactgcctcaagatcctcgaagagaagaccgccgcctacgacatcatgcaagagttcatggcccttgagttgaaaaacctccccggcgagttcaactccgggaaccagccgagcaaccgggaaaaaaatcgctacagagacatattacctttccaacaccatggatattccggcccaaacgagcgtaccactttctggcatggcagcaatgagggcgcagtgtcattattgctgagatattgcgcctag

SEQ ID NO: 26486 - DNA, 351 bp, synthetic construct
  source 1..351: mol_type = other DNA; note = Synthetic coding sequence
atgggccggctggacggcaaggtgatcatcctgaccgccgccgcccaggggattgggcaggcggcagctctcgcttttgcacgcgaaggtgcaaaagtaatcgccaccgatataaatgaatcaaagctgcaagaactcgagaagtaccccggtatccaaactagggtattggatgtcactaagaaaaagcagatcgatcagtttgcgaacgaggtggaacgcctggatgtcctctttaatgtggctggcttcgtccatcacggcacagtgctggactgtgaagagaaagactgggatttcagcatgaacctgaacgtgagatccatgtatctgatgattaaggcattctag

SEQ ID NO: 26487 - DNA, 504 bp, synthetic construct
  source 1..504: mol_type = other DNA; note = Synthetic coding sequence
atgaaggccatcaagaagagcctgaccgaggaggagtacctgtacctagacttttcacaccagacggaaggatgcatctttccgctccacacctctgttaccctgtttttgctgtcttattgcgactgtaaaatctttaagatctgcctggtggtgaccaaagaggtgtcccgggacagctccctcctcagagatgacctgatccaggatgtggaaattcagataatttctcggcaagagctgccgcccatcgtccagaactgttgcctcccagctgtcgtggaacgttccgataacttctgccgcgcagggctcgcagtcgtcttacgccacataatccagaaatcgtatgaggcggatccgctcaaaaaagagctgctcgagttgctggggttcaagaaaacttgtctcaaggcctgtgcggaagtgtcgcagtggacacggctctgcgagttgaccatcccattagccatagagaactttctgcgcgagtcaagtgattag

SEQ ID NO: 26488 - DNA, 933 bp, synthetic construct
  source 1..933: mol_type = other DNA; note = Synthetic coding sequence
atgagccagcagctgaagaagcgggccaagacccggcaccagaaggggctcgggggacgagctccttctggtgctaagccccgacagggcaaatcctcccaggatctgcaagctgaaatcgagccggtctccgccgtttgggcgctgtgcgatgggtacgtctgttatgagcccggcccacaggcattgggcggagacgactttagcgactgttacatcgagtgtgttattcggggcgagttttctcagcctatcttagaagaggattcgcttttcgagtctctggagtatctcaagaaaggaagtgaacagcagttatctcagaaggtattcgaagcatcttccttagagtgctctctggagtatatgaaaaagggggtcaagaaagagcttcctcagaaaatcgtgggagagaactccctggaatattcagaatacatgactgggaagaagctcccaccaggcggaatccccggtatcgacctgtccgaccctaaacagctcgcagagttcgcacggaagaagcctcctattaataaggagtatgattcgctttcagccatagcatgtccacagagcggctgtaccaggaagctgcgcaatcgcgcggctttacggaaacatttattgattcacggtcctcgcgatcacgtgtgtgccgagtgcgggaaggccttcgtggagtctagcaaactgaaacggcacttcttagtgcacacgggagagaaaccatttagatgtacctttgaaggatgcggaaaacggttttctttggactttaacctacgcacacacgttagaatacatactggtgagaagcgctttgtatgccctttccagggatgcaatcgtcgttttatccagagtaataacttgaaagctcacatactcacacacgccaatactaacaaaaatgagcaagaaggaaagtag

SEQ ID NO: 26489 - DNA, 237 bp, synthetic construct
  source 1..237: mol_type = other DNA; note = Synthetic coding sequence
atggtgatggagaagcccagccccctgctggtgggccgggagttcgtacgacagtactatacccttctcaataaggctcctgagtacctccataggttttatggtcggaatagctcctacgtccatggcggagttgatgcatccgggaaaccgcaggaagcagtttacggccagaatgatattcatcacaaggttctgagtctgaacttttctgagtgtcacaccaaaattaggtag

SEQ ID NO: 26490 - DNA, 681 bp, synthetic construct
  source 1..681: mol_type = other DNA; note = Synthetic coding sequence
atgagcagcccccgggacttccgggccgagcccgtgaacgactacgagggcaacgactctgaggcggaagatcttaacttccgagagacccttccgtctagctcacaggagaacaccccacgctccaaagtttttgagaataaagtgaatagtgaaaaggtcaagctgtcattacgaaactttccacataacgactatgaagacgtgttcgaagaaccttccgagtcaggcagcgatcctagcatgtggacagcccggggcccttttagacgcgaccgctggagcagtgaggatgaagaggctgccgggccttcgcaggcgctatcgccactactttctgatacgcgtaagatcgtcagtgagggtgaactggatcagctggcccagattcggcctttgattttcaacttccacgagcagacagccattaaagattgcctgaagatcctggaggagaagacggccgcttatgacattatgcaagagttcatggccttggagctgaaaaatctgcccggggagtttaatagtggaaaccagccaagcaaccgagaaaaaaacagataccgggatatcctgccattccagcaccacggatactctgggccaaatgaacgcacaactttttggcatggctctaatgagggcgccgtatctctgcttctgcgatactgtgcctag

SEQ ID NO: 26491 - DNA, 1020 bp, synthetic construct
  source 1..1020: mol_type = other DNA; note = Synthetic coding sequence
atgtggaccgcccggggccccttccggcgggaccggtggagcagcgaagacgaggaagcggcaggccccagccaggccctctcccccctccttagcgacactaggaaaatagtatctgagggtgagctggaccagctggcacagatcaggccacttatcttcaatttccacgagcagaccgcaataaaggattgcctgaagatcttggaggagaagaccgcagcctacgacattatgcaggagttcatggccttggaattgaaaaacctgcctggcgagttcaactcgggtaaccagccttcgaacagggagaaaaataggtatcgcgatatactgccatatgactccacaagagtgcccctggggaaaagcaaggactacatcaatgcctcttatattcgaatcgtaaactgtggggaagagtatttttacatagccacacagggcccattgctctccactatcgacgatttctggcaaatggtgttggaaaataatagtaatgtgatcgccatgattacgagagaaatcgagggtggcatcattaaatgttatcattattggcccatatccctgaagaagcctttggagctgaagcactttcgagtatttttagagaactatcagattctgcaatatttcataattcggatgttccaagtggtcgagaagtccactggaacaagccactccgtgaagcagctgcaatttaccaagtggcccgatcacggcactcccgccagcgccgacagtttcatcaagtatatcaggtatgcacggaagagtcacctcactggaccaatggttgtgcattgctctgccgggataggacgtaccggagtattcctgtgtgttgacgttgtgttttgcgccattgtcaaaaattgttccttcaacatcatggatatagtcgcccagatgcgggaacagagatctggtatggttcagacaaaggagcaataccatttttgctatgatatcgtgctcgaggtcttacggaagctgctaaccttggattag

SEQ ID NO: 26492 - DNA, 1179 bp, synthetic construct
  source 1..1179: mol_type = other DNA; note = Synthetic coding sequence
atgggcaccacctgcctgcacctgggcaccctggagcagagcctggtgtttgagaataaggtgaacagtgagaaggtgaagctgagcctgcgtaacttcccacacaacgactatgaagacgtcttcgaggagccctccgaaagtggcagcgacccaagtatgtggacagctaggggcccttttagacgcgataggtggtcaagcgaggacgaagaggccgcagggccctcgcaggctctctcacctcttctgagcgataccaggaaaatagtgagcgaaggcgaattggatcagttggcccagattcgacccctgatttttaacttccatgaacagaccgctatcaaggactgtctgaaaatcctggaagagaagactgctgcctatgatatcatgcaggaattcatggccttggaactcaagaacctgcccggagaatttaactctggaaatcagcccagcaatcgggaaaaaaacaggtaccgggatatactgccctacgactctacccgagtgcccctcggcaagtcaaaggactacattaatgcctcctatatcaggattgtgaattgtggcgaagaatacttctacatagccacccaaggtcccctgctgtctacaatagatgacttttggcaaatggtgttggaaaacaactcaaacgtgatcgccatgataacccgagagatcgaaggggggatcattaagtgctaccattactggcccatcagtcttaagaagccactggagttgaagcattttcgcgtattcctggaaaactaccagattctgcagtactttatcatacgtatgttccaagtggtggaaaaaagtaccggaacctctcactcggtgaaacaattgcagtttacaaagtggcctgaccatggaacccccgcctcggccgacagttttattaagtacataaggtacgctaggaaatcgcacttgaccgggcctatggttgtgcattgttccgctggtatcggcagaactggggtgttcctctgcgtagacgtggtcttctgtgccatcgtgaaaaattgcagctttaatattatggacattgtggcccagatgcgagagcagcggagcggaatggtgcagaccaaggagcagtatcatttttgttacgatattgtactggaggtgctccgcaagctgctgaccctggactag

SEQ ID NO: 26493 - DNA, 654 bp, synthetic construct
  source 1..654: mol_type = other DNA; note = Synthetic coding sequence
atgatcgtgaacgactacgagggcaacgacagcgaggccgaggacctgaattttcgagaaaccctcccctccagttcgcaggaaaacactccaaggagtaaggtctttgaaaataaggtaaattccgaaaaagtaaagttgtccctccgcaacttccctcacaatgactacgaagacgtatttgaggagccctctgagtctggctcggacccctccatgtggacagctaggggtccctttaggagggatcgctggtcgagtgaggatgaggaggctgctggcccaagccaggccctctctcctctgctgtcggatacacgcaagatagtgtcggagggcgagctggaccaactggcacagattcgccctctcatctttaactttcatgagcagacagccataaaggactgcttaaagattctggaggagaaaacagccgcttatgatatcatgcaggaattcatggcgctggagctgaagaacttgccaggagaattcaactcaggcaaccagccatccaacagagagaaaaatcgctaccgcgatatactaccatttcagcaccatggctactccgggcccaatgaacgaactacattttggcatggcagcaacgaaggagccgtctccctcctcctccggtactgcgcttag

SEQ ID NO: 26494 - DNA, 438 bp, synthetic construct
  source 1..438: mol_type = other DNA; note = Synthetic coding sequence
atgtggaccgcccggggccccttccggcgggaccggtggagcagcgaagatgaggaggctgcagggccaagtcaggcactgtcaccactgctctccgatacgcggaaaatcgtgtcagaaggggaactggaccagctcgcccagataagacccttaattttcaacttccatgagcaaacagcaattaaggattgcctgaagatcctagaagagaagacagcagcgtatgatataatgcaggagtttatggctttagaactaaaaaacctcccaggagaattcaattcagggaatcaaccatccaacagagagaaaaacaggtatagagatattctcccctttcagcatcacgggtactcaggccccaacgagcggacgacattctggcatgggtctaatgaaggtgctgtgtcattacttctgcgatactgcgcctag

SEQ ID NO: 26495 - DNA, 207 bp, synthetic construct
  source 1..207: mol_type = other DNA; note = Synthetic coding sequence
atgagcagcccccgggacttccgggccgagcccgtgaacgactacgaaggtaatgacagtgaggctgaggatctaaatttcagggagactctcccaagttctagccaggagaacacaccccggagcaaggttttcgaaaacaaggtgaatagcgaaaaggtgaaactgtcgctgcgtaacttcccccacaacgactacgaggattag

SEQ ID NO: 26496 - DNA, 525 bp, synthetic construct
  source 1..525: mol_type = other DNA; note = Synthetic coding sequence
atggccaagtacaacaccggcggcaaccccaccgaggacgtgagcgtgaactcccgcccattcagagtcacggggccaaacagcagctctgggatccaggccagaaagaatctatttaacaatcagggaaatgcttcacctccagctggcccatcaaacgttccaaagtttggatcccctaaacctcccgtggctgtcaaaccttcttccgaagaaaagcccgacaaagaaccgaaacctccatttctgaagcctaccggcgccggccagagatttgggacaccagctagtctcacaactcgggaccccgaggccaaagtgggcttcctaaaacctgtgggtccaaagcccattaacctgcctaaagaggatagtaagccaacctttccttggccccctggcaataagccctctcttcactccgtaaaccaggaccatgatctgaagcctctgggcccaaaatccggtcctacaccacccacatctgagaatgaacaaaaacaggcatttcccaaactgacatag

SEQ ID NO: 26497 - DNA, 405 bp, synthetic construct
  source 1..405: mol_type = other DNA; note = Synthetic coding sequence
atgagcgacgacgccggcgacaccctggccaccggcgacaaggccgaggttacagagatgcccaactcggatagcctgccggaggacgctgaagtgcattgcgatagtgccgccgttagccatgaacctactcccgccgatcctcgcggggaagggcacgagaatgctgctgttcagggggctggggcagcggcaattggccctcccgtgcagccccaggacgccaacgctctcgaaccgcctctcaacggcgacgtgaccgaggacacacttgcagagtgcatcgactccgtatccctcgaggctgagcctagaagcgaaatcccccttcaggaacagaattacctcgccgtggattcacccccttcaggtggcggttgggctggttggggctcttggggatag

SEQ ID NO: 26498 - DNA, 432 bp, synthetic construct
  source 1..432: mol_type = other DNA; note = Synthetic coding sequence
atgaagcggggccggctgcccagcagcagcgaggacagcgacgacaacggttctctaagcaccacatggagtcagaattcccgatctcaacatcggcgatcctcatgtagcagacatgaggatcgtaagccctcagaggtgttccggaccgatcttatcactgccatgaagcttcacgattcctatcagctgaaccccgatgagtactacgtccttgcagatccgtggaggcaggaatgggaaaagggcgtacaggttccagtgagccccggtacaataccccaacctgttgcgcgggtggtttctgaagagaaatcactcatgttcatccggcccaagaaatatatcgtgagctccggaagcgaacccccagaattgggatatgtggatattcgcacattagccgatagtgtatgcagatatgacctgtag

SEQ ID NO: 26499 - DNA, 1200 bp, synthetic construct
  source 1..1200: mol_type = other DNA; note = Synthetic coding sequence
atggacttcttcagcagccacctgctggccgacagcagcagccccgcaaccaatagcagtcataccgacgcccatgaaatcttggtgagtgacttcctagttagcgatgaaaacctgcaaaagatggaaaacgttctcgatctttggtctagcggcctgaaaacaaatatcattagcgaactaagtaagtggcgcctcaactttatcgactggcacagaatggaaatgcgcaaggagaaagaaaagcatgcagcccatctcaaacagttatgcaatcagatcaatgagctcaaggaactgcagaaaacctttgaaatatccatcggccgaaaagacgaagtaatttcttccctgtcccacgcaatcggaaaacaaaaagaaaagatcgagctcatgcgaaccttcttccattggcgcatcggtcacgttcgcgcccgacaggatgtctatgaggggaaattagcagaccagtactaccagcgcacactgttgaagaaggtttggaaagtttggagatctgtggttcagaagcaatggaaagacgtcgtcgagcgggcttgccaggctcgggcagaagaggtgtgtattcaaatttcaaatgactacgaggcaaaagtagccatgctgtccggcgcgctagaaaatgccaaggctgaaattcagcgcatgcaacacgagaaggagcacttcgaggactctatgaagaaggcttttatgcgcggtgtctgtgctctgaatctggaggcaatgaccatattccagaaccggaatgatgccggtatagacagtacaaataacaagaaggaggagtacggcccaggtgttcagggaaaagagcactccgcccatctcgacccctcagctcctcccatgccccttcccgtaacatcacccttgctcccctcacctccagctgcggtcggcggggcttccgctacagctgtgccttctgccgcgtccatgacttccacaagggccgcatcagcgagctccgttcacgtgcccgtctccgctttgggagccggctccgcagccacggctgccagtgaagagatgcaaactattccacaagcgacagcagcaaagtacccacggacaatccatcctgagagcagtactagcgctagccggtctctagggacgcgatctgcgcatacacagtcattgacaagtgttcactcaatcaaagtggttgactag

SEQ ID NO: 26500 - DNA, 240 bp, synthetic construct
  source 1..240: mol_type = other DNA; note = Synthetic coding sequence
atggacgagagcgccctgctggacctgctggagtgccccgtgtgcctcgagagactggacgcaagtgctaaagtgctgccatgccagcataccttctgcaagaggtgcctcctgggtatagtgggatcacgaaacgagctgaggtgccccgagtgtcggactctcgtggggagtggagtagaggagcttccttcaaatatcctgctggtgagacttctcgatgggatcaagcagaggtag

SEQ ID NO: 26501 - DNA, 621 bp, synthetic construct
  source 1..621: mol_type = other DNA; note = Synthetic coding sequence
atgagcagcccccgggacttccgggccgagcccgtgaacgactacgagggcaatgattctgaagcggaggaccttaattttcgcgagactctcccctcttcctctcaggaaaatacgccgaggtctaaggtgtttgagaacaaggtgaactccgagaaggtaaagctatcactgcggaactttccccacaacgattacgaagacgtgttcgaggagccaagcgagagcggaagtgatccctccatgtggactgcccgggggccctttcgacgggaccggtggagcagcgaagatgaagaggctgcggggcctagtcaggccctgtctcccctcctgtcagacaccagaaagatcgtttccgagggcgaactggatcagctggctcagatcagacccctgattttcaacttccacgagcaaaccgccatcaaggattgcctcaaaatattggaggaaaaaactgccgcctacgatatcatgcaggagtttatgtttaacatcatggatattgttgcccagatgcgcgagcagcgcagcggaatggtgcaaacaaaggagcagtaccacttctgctacgacatcgttcttgaagtattgagaaaactgctgacactggactag

SEQ ID NO: 26502 - DNA, 501 bp, synthetic construct
  source 1..501: mol_type = other DNA; note = Synthetic coding sequence
atgaaggccatcaagaagagcctgaccgaggaggagtacctgtacttagacttttctcaccaaaccgaaggatgtatatttcctctccatacatctgttactctcttcttacttagctactgtgattgcaaaatttttaaaatttgccttgtcgtaaccaaagaagtaagtagagactcatctcttctaagagacgatctgatccaagacgtggagatacagattatctccagacaagaattgcccccgatcgtacagaattgctgtctacccgctgtggtggagcgctcggacaatttttgccgggcagggctggccgtggtacttaggcacattatccagaagtcctacgaagcagatcccctcaagaaagagctgctcgagctgctcgggttcaaaaagacatgtctgaaggcgtgtgcagaggtaagtcagtggacgagactgtgcgaacttaccattccactcgctattgagaacttcctgcgcgagagctcttag

SEQ ID NO: 26503 - DNA, 363 bp, synthetic construct
  source 1..363: mol_type = other DNA; note = Synthetic coding sequence
atgtggaaggtggtgaacctgcccaccgacctgttcaacagcgtgatgaatgtcgggcggtttactgaggagattgaatggcttaagtttttagctttagcatgttcggccttgggtgtcaccatcacaaaaacacttaagatcgtctgcgaagtactctcctgcgaccacaacggaggacttcctcgtatccccttctccactttccagttcctctacacatacattgccgaggtcgacggagagatctgcgcttcccacgtcagccgaatgcttaactacatcgagcaggaagttatcggtcccgacggtctgataactgtgaacgactttactcagaacccacgagtgtggcttgagtag

SEQ ID NO: 26504 - DNA, 351 bp, synthetic construct
  source 1..351: mol_type = other DNA; note = Synthetic coding sequence
atggtgatggagaagcccagccccctgctggtgggccgggagttcgttcgacagtactataccctacttaacaaggcgcctgagtacctgcatcgcttttacggtcggaactccagctacgtgcacggcggcgtcgacgcaagcgggaagcctcaggaagcggtttatggacaaaacgatatacaccacaaggtgctctccctgaacttttctgagtgtcatactaagattagacacgttgacgctcatgctaccctgagtgacggagtggtggtccaagtcatgggactgctgtcgaattccggccagcccgagaggaaatttatgcagaccttcgtgctcgccccctag

SEQ ID NO: 26505 - DNA, 480 bp, synthetic construct
  source 1..480: mol_type = other DNA; note = Synthetic coding sequence
atgagcgaccaccggtacggcgacggcggcagcaccttccagagcaccacgggacattgcgtccacatgagaggccttccataccgcgccactgagaatgatatttacaacttcttctcgccccttaaccccgtcagagtgcacatcgagattgggcccgatggccgtgtgacaggcgaggctgacgttgagtttgctacccacgaagacgcagtggcggcaatgtccaaagacaaagctaacatgcagcaccgttacgtggaacttttcctgaactccacagctggggccagcggaggagcttacggatcgcagatgctggggggcatgggattgtcaaaccaaagtagctacggggggcccgcatctcagcagctcagtggcggttacggaggagggtacgggggacagtcatcaatgtcgggctatgatcaggtccttcaggagaactcttccgacttccagtccaacatagcatag

SEQ ID NO: 26506 - DNA, 411 bp, synthetic construct
  source 1..411: mol_type = other DNA; note = Synthetic coding sequence
atgatcgtgaacgactacgagggcaacgacagcgaggccgaggacctaaatttccgcgagaccctgcccagctcctctcaggaaaatacccccagaagtaaagtgttcgagaataaagtgaatagcgaaaaggttaagctgtctttacgaaatttcccacataatgattacgaagacgtattcgaagaacctagcgagtccggaagcgatccgtcgatgtggacagcccgtgggccctttagacgggacagatggagcagcgaggacgaagaagccgcaggcccgagccaggcactaagccctctgttaagcgtgcagcatcatggatattctggccccaatgaaagaacaactttctggcacggttccaatgaaggagcggtctctctcctcctccgatactgtgcctag

SEQ ID NO: 26507 - DNA, 462 bp, synthetic construct
  source 1..462: mol_type = other DNA; note = Synthetic coding sequence
atgaagctgaccagcgagaagctgcccaagaaccccttctacgccagcgtcagccagtatgcggctaaaaatcagaaatttttccagtggaagaaagagaaaacagactatacccacgcgaatttggtcgataaagccctgcagttacttaaggaaaggattctcaagggggataccctcgcctatttcctcaggggtcagctgtattttgaggagggatggtatgaagaggccctcgagcagtttgaagagatcaaggagaaagatcaccaggccacctatcaactgggcgtgatgtattacgatggcctgggcaccaccctcgacgcagaaaaaggggtcgattacatgaagaaaattttggactccccatgcccaaaagcaagacatttgaagtttgccgcagcgtacaatctgggacgtgcttactacgagggtaagggcgtgaaacggagtaactag

SEQ ID NO: 26508 - DNA, 489 bp, synthetic construct
  source 1..489: mol_type = other DNA; note = Synthetic coding sequence
atggaggccctgctggagggcatccagaaccggggccacggcggcggttttctcacatcatgtgaggccgagcttcaggagctgatgaagcagatcgatattatggtcgcccacaaaaagtccgagtgggaaggccggactcatgcactagagacatgcctcaagatccgcgagcaggagctgaagtctctgcgttctcagctcgacgttacacacaaagaagtcggaatgttgcatcagcaggtggaagagcatgaaaaaatcaaacaagagatgacaatggaatataaacaggaactgaaaaagctgcacgaagagctatgcatactgaaaaggagctacgagaaattgcaaaagaagcagatgagggagtttcggggcaatactaaaaaccaccgcgaggatcgttctgagatcgaacgcctcactgccaagatcgaggaattccgccagaagtctctcgattgggaaaaacagagactgatatag

SEQ ID NO: 26509 - DNA, 1530 bp, synthetic construct
  source 1..1530: mol_type = other DNA; note = Synthetic coding sequence
atgaagcggggccggctgcccagcagcagcgaggacagcgacgacaatggcagtttaagcaccacctggagccagaattccagatcccagcacaggaggagctcttgcagtcgacatgaagatcgcaaaccgagcgaagtattcaggactgatctcatcaccgctatgaaactccacgattcataccagttaaaccccgacgaatactacgtgctcgcagacccctggcgacaggagtgggagaagggggtgcaggtccccgttagcccagggaccattccacagccagtcgccagagtggtgtccgaagagaagagtttgatgttcattcgacccaaaaagtatattgtgtcaagtggtagcgagccccctgagctgggatacgtggacatccgcaccctggcagattctgtttgtaggtacgatctgaacgacatggacgctgcttggctggagctgactaacgaggagttcaaggagatgggtatgccggagcttgatgaatacacaatggaacgggtgctggaggaatttgagcaaagatgctatgacaatatgaaccatgctattgaaacggaagagggtcttgggatagagtatgacgaagacgtcgtgtgtgatgtatgccagtctccagacggggaagatggcaatgagatggtgttttgcgacaagtgtaacatctgcgtgcaccaggcctgttatggtatcctgaaggtaccagaaggatcttggttgtgccggacttgtgctttgggggtccagcctaaatgtctgctttgtcccaagaagggcggcgcaatgaagccgacccggtctggtaccaaatgggtgcacgtttcctgtgcactctggatcccagaagtgtcaattggatcgccagaaaagatggaacccattaccaaggtctcacatatccccagcagccgatgggccctggtttgttcgttgtgcaatgagaaattcggtgcctctatacagtgttctgtgaagaactgccgtactgctttccacgtcacctgcgctttcgacagaggactcgagatgaagaccatcctggcagagaatgatgaggtcaagtttaaatcttattgccccaagcattcctctcacagaaaacccgaggagagtctcggtaagggtgccgcccaggaaaatggcgccccggagtgtagtcctaggaatccgttagagccattcgcttcattggagcagaacagagaggaggcacatagagtcagcgtgcggaagcagaagttgcagcaattagaagacgaattttacacttttgttaatctgcttgacgtcgctagggccctcaggctccccgaagaagtggtggactttttgtatcaatattggaagctaaaacgaaaggtcaatttcaataaacccctcatcaccccaaagaaagatgaagaggacaatctggctaagagagagcaagatgttttgttccgcagactgcagctgttcacccacctcagacaagatttggagagagtgatgattgacaccgacacgctatag

SEQ ID NO: 26510 - DNA, 90 bp, synthetic construct
  source 1..90: mol_type = other DNA; note = Synthetic coding sequence
atgaacggccgggccgacttccgggagcccaacgccgaggtgcccaggcccataccacatatcggacccgattacatccccacagaatag

SEQ ID NO: 26511 - DNA, 1236 bp, synthetic construct
  source 1..1236: mol_type = other DNA; note = Synthetic coding sequence
atgatcgtgaacgactacgagggcaacgacagcgaggccgaggacctgaattttcgagaaaccctaccaagtagttcccaggaaaatacaccaaggagcaaagtattcgaaaacaaggtgaactcggaaaaagtgaagcttagcctccgaaattttccacataacgattacgaagacgttttcgaggagccgtcagaaagtggttccgacccctccatgtggaccgcaagaggtccatttaggagggaccgctggtcgtccgaggacgaagaagccgccggcccctctcaagcactgagccccctcctaagcgatacccggaagattgtgtctgagggagaacttgatcaattggcacaaattagaccactcatctttaactttcacgaacagacggccatcaaggattgccttaaaattctggaagagaaaaccgcggcttatgatatcatgcaagagttcatggcccttgaactgaagaacctccccggagaattcaactcagggaaccagccatccaaccgcgaaaagaatcggtatcgtgacatactgccctatgacagtacccgggtaccacttggcaagagtaaggattatattaatgccagttacatccggatagtgaactgcggcgaggaatatttttacatagctacccaaggtcctcttctttccacgatcgacgacttctggcagatggttctcgagaacaattcgaacgtgatcgcgatgataacgagagagattgaaggaggcatcattaaatgctaccactactggcccataagcctgaaaaagccattagaattgaaacactttcgggtgttcctagagaattaccagatactacagtactttatcataaggatgtttcaggtcgttgaaaaaagtaccggtacgtcccatagcgtaaagcagttgcagtttactaagtggccggatcacggcactcccgctagcgctgacagtttcatcaagtacatccgatatgcccgaaagtcccatctgacgggcccgatggtcgtgcattgttctgctggcataggtagaacgggtgtgttcctgtgtgtagacgtggtgttttgtgccatagtaaaaaactgcagctttaacatcatggacattgtcgcccaaatgagagaacagagatccggtatggttcagaccaaagagcaataccacttctgctacgatatcgtgcttgaggtcctgaggaaactgctgacgcttgactag

SEQ ID NO: 26512 - DNA, 300 bp, synthetic construct
  source 1..300: mol_type = other DNA; note = Synthetic coding sequence
atggtgatggagaagcccagccccctgctggtgggccgggagttcgtgagacagtactacaccctgttgaataaggctcccgagtatctgcaccgattctatggcaggaactcttcctacgtgcacgggggcgttgacgccagtggtaagccccaggaggccgtgtacggccaaaatgacattcatcataaagtcctgtcactgaatttttctgagtgccatactaagattcgccatgtcgacgcacatgcgactctgagcgacggggtcgtggtgcaagttatgggtcttctctcctag

SEQ ID NO: 26513 - DNA, 705 bp, synthetic construct
  source 1..705: mol_type = other DNA; note = Synthetic coding sequence
atggccagcagcgccaagagcgccgagatgcccaccatcagcaagacagttaacccaacgccagaccctcaccaagaatatttggatcctagaataacaatcgcactattcgagatcggatcacactccccctctagctggggctcactgcctttcttaaagaattcctcgcaccaagtcaccgaacagcaaactgcgcagaagtttaacaacttgctcaaagagattaaagacatcttaaagaatatggccggcttcgaggaaaagattaccgaagccaaagagctcttcgaggaaacgaatattaccgaagacgtctccgcacacaaggagaacattcggggtctggacaagatcaatgagatgctctcaactaatctgcctgtgtcactcgcaccagaaaaggaggataatgagaaaaagcaggagatgattctggaaaccaacataacagaggacgtaagcgcacataaggagaacattcgcgggctggataagatcaacgagatgctctctactaatcttccggttagcctggcccccgaaaaagaggacaacgagaagaaacaacaaatgattatggagaaccagaactcagagaacacagcccaggtgttcgcaagggacctcgtcaaccggctggaagagaaaaaagtgttgaatgagacccagcagtcacaagagaaggctaagaataggctgtag

SEQ ID NO: 26514 - DNA, 1095 bp, synthetic construct
  source 1..1095: mol_type = other DNA; note = Synthetic coding sequence
atgtacttctgctggggcgccgacagccgggagctgcagcggcggcgcacagcagggtctccaggtgctgagttgctgcaggctgcttccggagagcgacattccctgctcctgcttacaaaccaccgggtgctcagctgcggggacaactctcgcggtcagctgggaaggcgtggcgcccagcgtggcgagcttccggagcccatccaggcactggaaacactaattgtggatctcgttagctgtggcaaggaacacagtctggctgtttgccacaaaggacgcgtcttcgcctggggtgctggaagtgaagggcagttgggcataggggagttcaaagaaatttcatttacgcctaagaagattatgaccctgaatgatattaaaattattcaagtgtcctgcggccattatcacagcctagcactatctaaggacagccaagtgttctcatggggcaagaattcccatggtcagttaggactgggcaaagaatttccttcccaggctagccctcagcgcgtgcgttcactggaaggaataccacttgcacaggtggctgcaggaggtgcccattcttttgcactatctttgtgcgggaccagctttgggtggggttctaactctgccggtcagctcgccctgtcaggccgcaacgtcccagttcagtctaataagcccctgtcagttggagccctgaagaatctgggagtcgtttacatttcatgtggcgatgcccataccgctgtgcttacacaggacggtaaggtgttcacctttggcgacaaccgaagtgggcaactgggctactcccccacaccggagaagaggggccctcagctggttgaaagaatcgatggcctcgtcagtcagatcgactgcggctcttatcatacactcgcttatgtgcacacaacaggtcaagtggtgagcttcgggcatggcccaagtgacacttccaaacctacacacccagaggcattaacagagaactttgacataagctgcctaatttccgccgaagacttcgtggacgtacaagtgaaacacatcttcgccgggacttacgccaacttcgttaccacgcaccagtag

SEQ ID NO: 26515 - DNA, 348 bp, synthetic construct
  source 1..348: mol_type = other DNA; note = Synthetic coding sequence
atggccaagtacaacaccggcggcaaccccaccgaggacgtgagcgtgaacagccggcctttccgggtgacgggacccaatagctccagtggtatacaagccagaaagaacttatttaataaccagggtaatgcttccccgcctgctgggcctagtaacgtgcccaaattcggctctcccaagccgcctgttgccgtcaagccaagcagtgaggagaagcccgataaggagccaaagcccccattcctcaagccaaccggcgccgggcagcgttttggaactccagcatctctgaccacaagagatcccgaggccaaggtggggtttcttaagcctgtaggaccctag

SEQ ID NO: 26516 - DNA, 486 bp, synthetic construct
  source 1..486: mol_type = other DNA; note = Synthetic coding sequence
atggccggcatcctgcggctggtggtgcagtggccccccggccggctgcagaccgttactaaaggtgttgagtcccttatctgtacagattggatccggcataagtttactcggagcaggatcccagaaaaggttttccaggcgtcccccgaggaccacgaaaagtacggaggcgaccctcagaacccacacaaactgcatattgtgaccaggattaagtccactcgccgccgtccttactgggagaaggacattatcaaaatgctgggactggagaaggcacataccccgcaggtacataagaacataccctccgttaatgcgaaacttaaagttgtgaaacaccttatcagaatcaagcccttgaaattgccgcagggtttgccagctgaggagaacatgtccaatacatgtttaaaatccaccggagagctggtggtgcagtggcacttgaagcctgtggagcagaaggctcacgagtcctag

SEQ ID NO: 26517 - DNA, 516 bp, synthetic construct
  source 1..516: mol_type = other DNA; note = Synthetic coding sequence
atgaacggccgggccgacttccgggagcccaacgccgaggtgccccgacctatcccccatatcggcccggactacatcccaaccgaggaggaacgcagagtgtttgcggagtgtaatgatgagtcgttctggttcaggtctgtgcccctggctgcaacttcaatgttaattacccagggcctgatttccaaaggaattttgtccagccaccctaagtacggctcaattccaaagttaatccttgcgtgtatcatgggctattttgctggaaagttgtcctacgtgaagacatgtcaggagaaattcaagaagcttgagaactccccactcggcgaggccctgagatccggtcaagcacggcggagcagtccgcctggacactattatcagaagagtaagtatgattctagcgtgtctggacaatcatcctttgtgacttctcccgctgctgacaacatcgaaatgctgcctcactatgagcctattccattctcctcttctatgaatgagtcgtag

SEQ ID NO: 26518 - DNA, 438 bp, synthetic construct
  source 1..438: mol_type = other DNA; note = Synthetic coding sequence
atgagcagcccccgggacttccgggccgagcccgtgaacgactacgaaggcaacgattccgaggccgaggacctcaacttccgggagacattgccatccagctcacaggaaaatacacctaggtcaaaagtctttgaaaataaggtaaactcagaaaaggtcaagctgagcctgagaaattttccacataatgactatgaggacgtgttcgaagagccttcagagtcaggctctgatccctccatgtggactgctaggggccccttccggcgtgacagatggagttccgaggacgaggaggctgccggccctagtcaggctctgtcccctctcctgtccgtgcaacatcacggatattccggtcctaatgaacggaccacgttctggcacggtagcaacgaaggagccgtctcattgttactgcgctattgtgcctag

SEQ ID NO: 26519 - DNA, 243 bp, synthetic construct
  source 1..243: mol_type = other DNA; note = Synthetic coding sequence
atggtgaccagcctgaacgaggacaacgagagcgtgaccgtggagtggattgaaaacggagacactaaggggaaggagatcgatttggagagtatctttagcctgaacccggacctcgtacctgacgaggagattgaacccagccctgaaaccccgccaccgcctgcaagcagtgcaaaggtgaataagatcgtcaaaaaccgcaggactgtagcctccattaagaacgacccaccatcatag

SEQ ID NO: 26520 - DNA, 123 bp, synthetic construct
  source 1..123: mol_type = other DNA; note = Synthetic coding sequence
atgaaggccatcaagaagagcctgaccgaggaggagtacctgtaccttgatttcagccatcagacagagggatgtatttttcccttgcatacaagcgtaaccctgtttctgctgagttattag

SEQ ID NO: 26521 - DNA, 192 bp, synthetic construct
  source 1..192: mol_type = other DNA; note = Synthetic coding sequence
atggaggccctgctggagggcatccagaaccggggccacggcggcgggtttctgactagctgtgaggccgagcttcaagaactgatgaagcagatcgacatcatggtggcccacaaaaaatcagaatgggaagggagaacccacgctttggaaacttgcctcaaaattagagaacaagagttaaagtcttag

SEQ ID NO: 26522 - DNA, 594 bp, synthetic construct
  source 1..594: mol_type = other DNA; note = Synthetic coding sequence
atgtggaccgcccggggccccttccggcgggaccggtggagcagcgaagacgaggaggcagcgggacccagccaagcccttagccctctgctttccgacactaggaaaatagtttctgagggggagctcgaccagctggcccagattcgccctttaatcttcaatttccatgagcaaactgccatcaaggactgtttgaaaatattggaggaaaagacagctgcgtacgacatcatgcaagagttcatgaccggaacctcccactccgttaaacagttgcagttcactaagtggcctgatcatggaacgcccgcatcagctgactcattcatcaagtatatacgctatgcccgcaaatcacacctcacgggtcccatggtggtgcattgttccgccggcattgggaggacgggcgttttcctgtgtgttgacgttgtgttctgcgctatcgtgaagaactgctctttcaatatcatggacattgtggctcagatgagagagcagagatctggaatggtgcagaccaaggaacaataccacttttgttatgatattgtccttgaagtgctgcggaagctactcactctcgattag

SEQ ID NO: 26523 - DNA, 2529 bp, synthetic construct
  source 1..2529: mol_type = other DNA; note = Synthetic coding sequence
atgaagcggggccggctgcccagcagcagcgaggacagcgacgacaacggttcgctttctacaacttggtctcagaattccaggagtcagcaccggcgaagcagctgctctcgacacgaggacaggaaaccttccgaagtgttccgcactgacctgattacagcaatgaaactccatgacagctatcaactgaaccctgatgaatattatgttctagctgatccttggcggcaggagtgggagaagggcgtacaggtcccagtctcccctggaacaattccacaacccgtcgcccgggtggttagcgaggaaaaaagtctcatgtttatacggcccaagaagtacatcgtgtcatctggatccgaaccgcccgaattgggctacgtggacattcgcactcttgcagacagtgtgtgcaggtatgatttaaacgacatggacgctgcttggctggagctgacaaatgaggagtttaaggagatgggaatgcctgaactggatgagtacacgatggagcgggttctggaggagtttgaacagaggtgctacgataatatgaaccacgctattgaaactgaggagggactcgggatagagtacgacgaagatgtcgtgtgcgatgtctgccagtcccccgacggcgaggatgggaacgagatggtgttttgcgataagtgcaatatttgcgtgcaccaggcttgctatggaatactgaaagtgccagagggttcttggctctgtcgcacatgcgcattaggggtgcagcctaagtgtctcctgtgtccaaaaaaaggcggcgccatgaagcctacccgatctgggactaaatgggtccacgtcagttgcgctctttggatccccgaggtctctatcggttcgcccgaaaagatggagccaattaccaaggtgagccatattcccagttctcggtgggcactggtctgctcactgtgtaatgagaagttcggagcctctatccagtgtagcgttaaaaactgtagaacagcatttcacgtgacttgtgctttcgatcgaggacttgaaatgaagacaattctggcggagaacgatgaagtgaaatttaagagttactgtccaaaacacagctcgcaccggaagcctgaagagtccctgggcaagggagccgcgcaggagaatggggccccagaatgcagtccgcggaatccgctagagccctttgcaagcctggaacaaaacagggaggaggcacatcgagttagcgtccgtaagcagaaactgcagcagttagaggatgagttttacacctttgtcaacctgctggacgtcgctcgcgctttaagacttccagaggaagtcgtggattttctctaccagtactggaaattgaaaaggaaggtcaacttcaataaacccctgatcacccccaagaaagacgaagaagacaacctggctaagagggaacaggacgtgttgttcagacgcttgcagctcttcactcacctgcgccaggatttggagagagtcagaaatctgacttatatggtgacccggagggaaaaaataaagagatcggtttgcaaggtgcaagagcagatcttcaatctgtacacaaaattactggagcaggagagagtcagcggcgttccctccagttgttccagctctagtctggagaacatgctgctgttcaacagcccctctgttggacccgatgcaccgaaaatcgaggatttaaagtggcactctgccttctttaggaagcagatgggaacatcactggtccattcattaaaaaagccccacaaaagggaccctcttcagaatagcccgggttcggaaggcaagaccttgctgaagcaacccgacttgtgtgggcgtagggagggaatggtggtgcctgagagtttcctagggctggagaaaacattcgctgaggcccggctgatctccgctcagcagaagaacggggtcgttatgccggaccatggcaaacggcgagacaataggttccactgcgatctcataaaaggcgatcttaaagataaatctttcaaacaaagtcacaagcctctgcggagtactgacgtttcccagaggcacctcgataatacccgcgccgctaccagccccggagtgggtcagtcagctccagggacacgaaaagaaattgtgcccaagtgcaacgggtctttaattaaagtgaactataaccagactgctgtcaaggtccccaccactccagcgtcaccggtgaaaaactgggggggattccggattccaaaaaagggtgagcgccagcagcagggagaggcacatgatggagcgtgtcaccagcacagtgattatccttatcttggcttaggccgggtccccgcaaaagaacgcgccaaaagcaaactgaagtccgacaatgagaacgacggatacgtgccggacgtggagatgtctgacagtgagtccgaagccagtgaaaagaaatgcatccacacaagcagcaccatctcccgaagaactgacatcattagacggtccatccttgcatcatag

SEQ ID NO: 26524 - DNA, 2490 bp, synthetic construct
  source 1..2490: mol_type = other DNA; note = Synthetic coding sequence
atggccaagtacaacaccggcggcaaccccaccgaggacgtgagcgtcaattcaagaccttttcgtgtgacaggccctaacagttcctccggcatccaggcaaggaaaaatttgttcaacaatcagggcaacgcgagccctccagctggaccttccaacgttccaaaattcggctcccccaagccacccgtggcggtcaaaccctctagcgaggaaaaacctgacaaagagcccaagcctccattccttaaacctactggagcaggacaacgttttggaacccctgcatccctgaccaccagggaccctgaagcgaaggttggcttccttaagcccgtgggccccaaacccatcaacctgcctaaagaggatagcaagcccacatttccctggcctcctggaaataagccatcattgcacagcgtgaatcaggaccatgacttaaagccacttgggcccaagagtgggcccaccccccccacctcagaaaatgagcagaagcaggcctttcccaaactcaccggagtgaaggggaagtttatgtcagcaagccaggatctggaacctaaacctctgttcccgaagccggcatttgggcagaaacccccactcagcacagaaaactcacacgaagacgaatccccaatgaaaaacgtttcatcttccaaaggctctcccgctccactgggcgtccgcagcaagagtggtcctctgaagccagcacgagaagactctgaaaataaagatcatgctggagagatttcatctctccccttccctggagtcgttctgaaacccgccgcaagccgcgggggaccaggactcagcaagaacggagaggagaagaaagaagaccggaagatcgacgctgccaagaatacttttcaaagcaaaataaaccaggaggagctggcgagtggaacccctcccgcccgttttccaaaggcccccagcaagctcaccgttggaggtccgtggggccagtcccaggaaaaggagaagggggataagaactccgcaacccccaagcaaaaaccccttcctcccctgttcacgctgggcccacctccgccaaaaccaaaccgcccgcccaatgtggacctcaccaaattccataaaacgtctagcgggaatagcactagtaaaggacagacatcctatagcaccaccagtttacctcctccgcctcctagccatcctgcttcccaacccccattaccagcgtcgcacccctcacagcccccagttccctctctacctccgagaaacatcaaaccccccttcgatctgaagagtccagtcaatgaggacaaccaggacggagtcacccactcagacggggcgggcaacttagacgaggagcaggacagtgagggtgagacctacgaggacattgaagcttcaaaggaacgagagaagaagcgggaaaaagaggagaaaaagagactggaattagaaaagaaggagcaaaaagaaaaagagaagaaagagcaggaaatcaagaagaagttcaaactcactgggccgatccaagtcattcatcttgctaaggcttgctgcgacgtcaagggcgggaaaaatgaactgtccttcaaacagggggagcaaattgagattatacgaatcaccgacaatcctgaaggcaagtggctggggcgtaccgctcgcgggtcttacggctatattaagaccaccgctgtggagatcgactacgactcactgaaactcaagaaagattctcttggagcaccttcaagacccatcgaggatgatcaagaagtgtatgatgacgtcgccgagcaggatgacattagctcccactcacaatctggcagcggaggcatattccccccaccccctgatgacgacatctacgatggtatcgaggaggaggacgcggacgacggaagcaccctccaggtgcaagaaaagtccaacacttggagctggggcatcttgaaaatgctgaagggcaaggatgatagaaagaagtctatcagagagaaaccgaaggtcagcgatagcgacaacaacgagggaagtagtttcccagccccccccaaacaattggacatgggtgatgaagtgtacgatgatgtggacaccagtgactttcccgtaagttccgcggagatgagccaaggaacaaacgttggaaaggccaaaacagaggagaaggaccttaagaaactcaagaaacaagaaaaagaagagaaagactttcgcaaaaagtttaagtacgacggagagatcagagttttgtacagcaccaaagttactacatctataacatcaaagaaatggggtacgcgcgatctgcaagtgaaacctggcgaatccctagaggtcattcagacaacagatgacactaaagttctttgccggaacgaagaaggaaaatacggctacgtgctgaggtcgtatttggcggataacgatggcgagatatatgatgacattgccgacggctgcatctatgacaacgactag

SEQ ID NO: 26525 - DNA, 810 bp, synthetic construct
  source 1..810: mol_type = other DNA; note = Synthetic coding sequence
atgatcgtgaacgactacgagggcaacgacagcgaggccgaggacctgaattttagggagacactaccgtcctcgtcccaggagaataccccacgttccaaagtgtttgagaataaggtgaatagcgagaaggtgaagttatcactgcgcaactttccacacaacgattatgaggacgtgttcgaagaaccaagtgagtctgggtctgatccctcaatgtggactgctcgtggcccattccgcagagataggtggtcttcagaagacgaggaggctgccgggcctagtcaggccctgagcccacttctctccgacaccaggaaaattgtgtccgagggagagttggatcagttggctcagatacggcccctgatcttcaacttccacgagcagaccgctataaaagattgtttaaagattttggaggagaagactgcagcttatgatattatgcaagagtttatgacaggcacaagtcactccgtaaagcagcttcagtttaccaagtggcctgaccatgggactccagcatctgcggattcttttatcaaatacatcagatacgcaaggaagtcccacttgacgggaccgatggtggttcattgtagcgcgggcattgggcgcaccggcgtgttcctctgcgtcgatgtggtcttttgtgctatcgtcaagaattgtagttttaacatcatggatattgtagcccagatgagagagcagcgctctggcatggttcaaacaaaagagcagtaccacttttgctatgacatcgtgctagaagtactccgcaagctgttaactctcgactag

SEQ ID NO: 26526 - DNA, 492 bp, synthetic construct
  source 1..492: mol_type = other DNA; note = Synthetic coding sequence
atgatgctgggcaccgagggcggcgagggcttcgtggtgaaggtgcgggggcttccgtggtcatgctctgccgacgaggtgcagcgattcttctctgattgtaagatccagaacggcgcacagggcatacgattcatctatacccgcgaaggtaggccatcaggcgaggcgtttgtcgaactggaatctgaagacgaagtcaagctggcattgaaaaaagatagagaaacaatgggacacagatatgtggaagtgtttaagtcaaataatgtggagatggattgggtgctaaagcatacaggaccaaactcacccgacaccgccaacgacggcttcgtacggttaaggggcttgccgttcggttgttcaaaggaagagatcgtgcagttcttctctggcctggaaatcgtcccgaatggaataacgctgccagtagatttccaaggaagaagtaccggcgaagcgttcgtgcagttcgcctcacaggagtag

SEQ ID NO: 26527 - DNA, 759 bp, synthetic construct
  source 1..759: mol_type = other DNA; note = Synthetic coding sequence
atggccgccaccgcccgggaggacggcgccagcggccaggagcggggacagcggggctgtgaacattatgacagaggatgccttctcaaagccccttgttgtgacaaattgtacacatgtaggttgtgccacgataataacgaggaccaccagcttgaccgtttcaaggtgaaggaagtgcaatgcatcaattgcgagaaaattcagcatgcacagcagacttgcgaagagtgttccacgctcttcggcgagtactattgcgacatatgtcacctgtttgacaaggataagaagcagtatcattgcgagaactgcggcatttgccgaataggaccgaaggaggatttcttccattgccttaagtgtaacctctgtttggcaatgaatcttcagggtcgccacaaatgtatcgaaaatgtaagtcggcagaactgccccatctgtctagaagacattcatacttctcgagttgtcgcacatgtattgccatgtggccatctcttgcaccgtgggtaccgttgtccgctctgcatgcatagcgctctggatatgaccagatattggagacagctggatgatgaagtcgcacagacacccatgccgagcgaatatcagaacatgaccgttgacattctgtgtaacgattgtaatggccggagtacagtgcaattccatatactgggcatgaaatgtaagatttgcgaatcctacaacacggcgcaagccggcggaaggaggattagcctggaccagcaatag

SEQ ID NO: 26528 - DNA, 594 bp, synthetic construct
  source 1..594: mol_type = other DNA; note = Synthetic coding sequence
atgtggaccgcccggggccccttccggcgggaccggtggagcagcgaggacgaagaggcggcagggccttcccaagccttatcccccctgctgagcgacaccaggaagatcgtgagcgaaggggagctggaccaattggcgcaaatcaggcctctcatctttaactttcacgaacagacagctataaaggattgtctgaagatcttagaggaaaaaaccgcagcatatgatatcatgcaggaatttatgaccggcacttcacactcagtgaaacagttgcagttcacaaagtggccggaccacgggactccagcatcagctgacagctttatcaagtacattaggtatgctcgaaagagtcacttaactggcccaatggtggtccactgctcagccgggatcggaagaaccggggtatttctctgcgtggatgtggttttttgcgcgattgttaaaaactgtagcttcaatatcatggatattgtcgcgcagatgcgcgagcaacggagcggtatggtgcagacaaaagagcagtaccatttctgctacgatatcgtcctggaagtcctgaggaagctcctgaccctggactag

SEQ ID NO: 26529 - DNA, 4203 bp, synthetic construct
  source 1..4203: mol_type = other DNA; note = Synthetic coding sequence
tgacccccccccccccccccccccatgtggaaccccatgatccccgcttttgatttgtttcagggcaatcatggttttgtggcacctgtcgtcactacagccgcacactggcgcagcgtgaattatacttttcccccttcagttatcagtcacacctccccaacgaaggtatggcggaacaaggacggaacctccgcatatcaggtccaggagacacccgtgtctcaagttgtccgtaaaaaaacttcctatgtgggacttgtgctggtcctgcttcgaggtttgcccgggtccgggaagagcttcctggctcggactctccaggaagataatccgtcaggcgtgattctgtctacagatgactatttctacattaatggtcaataccaattcgacgtcaagtaccttggcgaggcccacgagtggaatcagaaccgcgcaaaggaagcttttgagaaaaaaatttcccctatcattatcgacaacaccaatctgcaagcctgggaaatgaagccatacgtcgcactgagtcagaaacacaaatataaggtgttgttcagagagcccgacacatggtggaaatttaaaccaaaagagctcgcacgccgcaatattcatggagtgagcaaggagaaaataactcggatgcttgaacactaccagaggttcgtttctgtccccattattatgagcagtagtgtgcccgagaagatcgagaggatagagctgtgtgcttatagttgtgaggatcgcagcacttctccccgggacgatgaggatattatcagcgagaaagaagaaaatattctgtcactatccttgaagcacctggagttcacagaggagaaaaatttagatgttacaaaggagaccatgttgcctgagaacgtggcctacctgagtaacgcagatctcaacaagcgccgcaaagaaataagcgatatgaatccaagcatccagtctgccctgatactggagacccctcatatgtacttttcagactctgaaagcaaactccaggctaccgacaaatccgaaaacgagcagatcgaaatggttgccgtgaagggctatagtaaaactgacaccgattcctcaatggaaagggtcagcccttcgacttgttgcagcgagaacaatcaagaggactgcgacctggctaacagcggcccactgcagaacgagaaatccagtccaggcgagattgtggaggagcgggcaacagtcacgaagaaagcattcggtaagcagaaaagcaagagcaccctggagaaatttccccgacatgaactgtccaattttgtgggggactggcctgttgacaaaacaattggccagagaactaagcgaaaccgaaagaccgaaaaaacttcgtctgtacagagtgacaagaaatataactatccccagtcccacaaactggttaactctgtctctgttaacactgactgcgtgcagcagcggggcagccctcatgaatctgtcgaagacggccgcaaatctcagtgcgacgatgccagcgaacctctgaactcctataagtatgatgcctataaaaatatcgacaagaatagcttcaacattatgggcgattggccaagcagcgactcactggctcagagagagcataggagccggatgcccaagacaggtctgagcgaaccaaatctggaaattgggacaaatgataagatgaatgagatcagcctcagcacagcacatgaagcctgttggggaacaagttcacaaaaactgaagacattaggaagctcaaacctcggatccagtgaaatgctcctatctgagatgacctgcgagtcccaaacctgcttgtccaagaaaagccatggccagcacacctccctgcctctgacattcactaactctgcaccaacggtatcaggggtggttgaaccccagacacttgccgaatgccaggaacagatgccaaagcgtgaccccggaaaagaagtgggtatgtgcacacaaacggagccccaagatttcgccctcttgtggaagatcgagaagaataagattagcatcagtgactcaattaaagttcttacgggacgccttgatggctttaagcccaaggtattcaatattaacaccaaatcagacgtgcaggaggcaattccctatcgcgtcatgtacgacaaatctactttcgttgaggagtctgagttgactagcgcagacgagtcggagaatctcaatatcctgtgcaagctctttggaagtttttccctcgaagcactaaaagatctatacgagaggtgtaacaaagacatcatttgggcaacgagcctccttttggacagtgagactaagctctgtgaagataccgaatttgaaaatttccagaagtcctgcgacggatcccaaataggtcctttcagcctggggctcaatctaaaagagatcattagccagcggggaaccctcgagaatagcaactcccccgtgccagaattctcacacggaattgggatctcaaacgccgacagtcagtctacatgtgacgccgagagaggcaactctgagcaggccgagatgcgggcagttactcctgagaatcatgaaagcatgaccagtatcttccccagtgcagcagtgggcctaaagaacaataacgatatccttcccaacagccaagaagaactactctactccagtaagcagtcttttccgggaatcctcaaggcaactaccccgaaggatatgagcgaaaccgaaaaaaacttagtggttacagagaccggggacaatatccactctccctcacacttcagcgacatttttaactttgtgtcgagcaccagcaacctcgagctcaatgaggagatttattttacagacagtcttgagattaaaaggaacgagaactttccaaaagactacgttaaatttagcgatgaggaggagtttatgaacgaagatgaaaaggaaatgaaagagatcctgatggcaggatcctcactgtctgctggagtgagtggggaggacaaaactgagatcctcaaccccactccagctatggcgaaatccctgaccatagactgcctggagttagctcttccaccagaactggcctttcagctgaatgaactgttcggcccagtcggaatagacagtgggtctcttactgtcgaggactgtgtggtgcatatcgacctaaatctggcaaaggtgatccacgagaaatggaaagaaagcgtaatggagagacaacgacaggaggaagtttcctgcggcaagttcatgcaagacccctcattggtggggcacaccggattggataatccagaacagaaaagtagtcagcgcactggaaagaaactcttgaagacgctgaccgcatctgaaatgctgcctctgctggatcattggaatacgcaaactaaaaaagtctcgttacgcgagatcatgtccgaggaaatagctttgcaggagaagcataacctgaaacgtgagaccctgatgttcgaaaaggattgtgccactaaactgaaagagaagcagttattcaagatctttcctgcaatcaaccagaacttcctggtggatattttcaaagatcataattacagtctcgaacacacagtgcaattcctgaactgcgtacttgaaggagatcctgtgaaaaccgttgtggcccaggagttcgtccatcagaatgaaaatgtcactagtcacactggacaaaagtctaaagaaaaaaaagacttcgagtatcccgactacgatgactatcgcgctgaagcgtttctgcaccaacagaagaggatggaatgctactcaaaggcaaaagaggcctaccgaattgggaagaagaatgtggctactttttacgctcagcagggcaccctccacgaacagaagatgaaagaagcaaaccacctggctgccatagaaatctttgaaaaggttaatgcttctctgctgcctcaaaatgtgctggacctccatggtctgcacgtcgacgaggctttggaacacctgatgcgggtgctggagaaaaagaccgaggagttcaagcagaacgggggaaagccctacctttctgtcatcaccgggaggggcaatcatagtcaggggggagtggcccggatcaaaccagccgtgataaaatacctgatctcccattcatttcgattcagcgaaatcaaaccaggttgcctgaaagtgatgttaaaatag

SEQ ID NO: 26530 - DNA, 237 bp, synthetic construct
  source 1..237: mol_type = other DNA; note = Synthetic coding sequence
atgctgtgctggggctactggagcctgggccagcccggcatcagcaccaatctgcaaggaattgtggccgagccacaagtatgtggtttcatcagcgacagatctgtaaaggaagtcgcctgcggcggcaaccatagcgtgtttttgctagaggacggtgaggtctatacatgcggcttgaatactaagggacagttaggtcatgaaagagaggggaacaagccagaacaaatttag

SEQ ID NO: 26531 - DNA, 738 bp, synthetic construct
  source 1..738: mol_type = other DNA; note = Synthetic coding sequence
atgaacggccgggccgacttccgggagcccaacgccgaggtgccccggcctatcccccacataggacccgactatatccccacagaagaagaaagaagagtcttcgccgagtgcaatgacgagagtttttggttccgatctgtgccactcgctgccacaagtatgctgatcacgcaggggctgatcagcaaaggtatactgtccagccaccccaagtacggtagcattcctaagcttattctggcatgcatcatgggatatttcgcaggtaaactttcatacgtaaagacatgtcaggagaagttcaagaagctggagaattccccattgggggaagccctgcgcagtggacaggcaaggcggtcaagtcctccaggacactattatcaaaagagcaagtatgatagttccgtgagcggccagtcttccttcgtgaccagccccgcggcagacaatatcgagatgctcccccattacgaacctattccattctcatcatcaatgaacgagtccgcccctaccgggatcaccgatcacattgtccaaggcccagaccccaatcttgaggagagccccaaacgtaagaatatcacttatgaagaactgagaaataagaaccgagaaagctacgaagtatcactgacccagaaaacagacccttcggtgcgcccaatgcacgagagagtccccaagaaggaggttaaggtaaataagtatggcgatacttgggacgagtag

SEQ ID NO: 26532 - DNA, 2112 bp, synthetic construct
  source 1..2112: mol_type = other DNA; note = Synthetic coding sequence
atggaggccctgctggagggcatccagaaccggggccacggcggcgggtttctgacctcatgcgaagccgaactccaggagctgatgaaacaaattgatatcatggtcgcccataaaaagagcgagtgggaaggcagaacacacgccctggaaacctgcctgaagattagggagcaggaactgaaatcactgcggagtcagttagacgtcacacataaggaagtgggcatgctgcaccagcaggtggaggaacatgaaaagattaagcaggaaatgaccatggagtataagcaggaactaaaaaaattgcacgaggagttatgcattctgaaacggtcctacgaaaagctgcagaaaaagcaaatgcgcgagtttcgcggtaacacgaagaaccatagggaggataggtccgagatcgaaaggctgactgccaagatcgaggagtttaggcagaagtctctggattgggaaaaacaacgcctgatctatcaacagcaagtctcgtcccttgaggcacagcgtaaagcactggctgagcagagtgagatcatccaggcccagctcgttaaccgtaaacagaaacttgagagcgtagaactgagttcccagtctgaaatccagcacttgtcttcaaaactcgagcgtgcaaacgataccatctgcgctaatgagctcgagatcgaaaggctgaccatgagagtcaatgacctcgtgggtacatccatgaccgtgcttcaggaacaacagcagaaagaagagaaactccgggaaagcgaaaagctgttagaagcactccaagaggaaaaacgggaattgaaggccgctcttcagtctcaggaaaatctgattcacgaggcccgcattcagaaagagaaactgcaagaaaaggtcaaggctaccaatactcagcatgcagtggaggccatccggccacgtgaagaatcactggcggagaaaaagtatacctcacagggccagggtgatctcgatagcgtcctgtcacagttgaactttactcacacctcagaggacctcctacaagcagaggtgacttgtctggagggcagcctggaatcggttagtgcgacttgcaagcaacttagccaagagttgatggagaagtacgaggagctcaagcgcatggaagcgcataacaacgaatataaggccgagataaaaaaattaaaagaacagattttgcaaggagaacaatcttattcttccgccctcgaaggaatgaagatggagatcagccacctgactcaagagttacaccaaagagacattacaatcgcgtctactaaggggtctagtagtgatatggaaaaaagactgagagccgagatgcagaaagctgaagacaaagctgtggagcataaagaaattctagaccagcttgaatctctgaagctggaaaatcgacatctgagcgagatggtaatgaagttggagctgggcctgcacgaggccaaagagataagtttggcagatcttcaggagaactacattgaagcacttaataagctcgtttcagaaaatcagcagttgcagaaagacctcatgaacaccaaaagtcagttagagataagcacccagatgtgtaagaaacagaacgacaggatttttaagccaactcattctcggacaactgagttcaaaaacaccgagtttaaacccacacacggacagcacaggcacgatggcattaaaacggagcattacaagactgatttgcactccccaagagggcaagcctccgattctatcaacccaatgtcccgagtgctgtctccgttgtcacctcagatttccccctgcagctccacccgctcgcttacttcttactcactctgcaagacccattcacttcccagcgctcttgacaccaacgaggcgaatttctctgacacaatgagcgagtctatgaacgatcaggaggagtttataagctcgtgctctttgccggtgagcccactggggtcaatcgcgacccgctttctggaagaagaggaactccgctcacaccacatccttgaaagattggatgcccatatcgaagagctaaagcgagagtccgagaaaacagtaaggcaatttaccgcactgaagtag

SEQ ID NO: 26533 - DNA, 573 bp, synthetic construct
  source 1..573: mol_type = other DNA; note = Synthetic coding sequence
atggccggcaccgcccggcacgaccgggagatggccatccaggccaagaagaagttgaccacagctaccgatcccattgagagactcagacttcagtgcctcgcccgggggagtgccggcatcaagggacttggcagagtctttaggatcatggatgacgataataaccggacccttgatttcaaggagtttatgaaggggctgaacgattacgctgtcgtgatggaaaaagaagaggttgaggaactattccgaagatttgataaagacggaaatggaacaatcgactttaatgagttcctcctgaccctacgtccccctatgagccgcgcaagaaaggaagtgattatgcaagcttttagaaagctggacaaaaccggagacggagtgatcactattgaagatcttcgcgaagtgtacaacgccaagcaccaccctaagtatcaaaacggagaatggtctgaagagcaggtgttcaggaagttcctcgacaactttgatagtccatacgataaagacggactggtgacccccgaagagttcatgaactactatgcaggagtgagcgcctag

SEQ ID NO: 26534 - DNA, 231 bp, synthetic construct
  source 1..231: mol_type = other DNA; note = Synthetic coding sequence
atgacccccccccagcagcccccccccctgcggagcgagcccggcactttgggctcggccgcttcctcatattccccactgggccttaatggagtacctggtagtatttgggatttcgtgagtggctcattttctccgtcaccctctccaatcctgagcgccgggcccccgtcctcaagtagcgcttctccaaatggggcagaactcgctcgagtgaggcgccagctttag

SEQ ID NO: 26535 - DNA, 108 bp, synthetic construct
  source 1..108: mol_type = other DNA; note = Synthetic coding sequence
atggccaccctggtggtgaacaagctgggcgccggcgtggacagcggtagacagggctcccgaggtacggcggtcgtgaaagtgctagagtgcggagtctgcgaatag

SEQ ID NO: 26536 - DNA, 477 bp, synthetic construct
  source 1..477: mol_type = other DNA; note = Synthetic coding sequence
atggaggccgacatcatcaccaacctgcggtgccggctgaaggaggccgaagaagagaggctgaaggcagctcagtacgggctacagctcgtggagtctcagaacgaactccagaaccagttggataaatgtcgcaacgagatgatgacaatgaccgagagttatgagcaggaaaaatacaccttgcagagagaagtagaacttaaatcacggatgttagaaagtctgtcctgcgaatgcgaagcaatcaaacagcaacagaaaatgcaccttgagaagttggaggaacagttgagccgctctcacgggcaggaggtcaacgagttgaagacaaaaatcgagaagctcaaagttgaactcgatgaggcaaggctgagtgaaaagcagctaaagcaccaggtggaccaccaaaaagagttactttcctgtaaatctgaggagctgcgggtcatgtcagaacgggtgcaagaaagttag

SEQ ID NO: 26537 - DNA, 393 bp, synthetic construct
  source 1..393: mol_type = other DNA; note = Synthetic coding sequence
atggcccagaccgacaagcccacctgcatcccccccgagctgcccaagatgctcaaagagtttgcgaaggccgccattagggcacagccacaagacctgatccagtggggagccgattactttgaggcactcagcagaggtgagacccctcctgtgcgggaaaggagcgagagagtcgcactctgtaactgggctgaacttactccagagttattgaaaatcttgcactcacaggtggctggtcggctcattatacgcgcagaggagctggcccagatgtggaaagtagtcaatcttccaacagatctctttaacagcgtcatgaacgttggccgcttcaccgaggagatcgaatggctcaagttcctggccctggcttgttccgcactttag

SEQ ID NO: 26538 - DNA, 693 bp, synthetic construct
  source 1..693: mol_type = other DNA; note = Synthetic coding sequence
atggaggccgacatcatcaccaacctgcggtgccggctgaaggaggctgaggaagagcggttgaaagcagcgcaatatggcttgcaactggttgagtcccaaaatgagctgcaaaaccagctggataagtgccgaaatgagatgatgactatgactgagtcatatgagcaagagaagtacactctgcagcgcgaagtggagttgaagagtagaatgttagagagcctctcgtgtgaatgtgaagctattaagcaacagcagaagatgcacctggagaagctcgaagagcagttgagtcgcagccacggccaagaggtgaacgagctgaaaacaaagatcgagaagttgaaggtggaactggacgaggcacgcctctcagagaaacagctgaaacaccaggtggatcatcagaaggaactcctcagttgcaaatccgaggaactccgtgtaatgtcagagcgggtacaggagagtatgtctagtgaaatgctggctcttcagatcgaactgacggagatggaaagcatgaagacaactctaaaagaagaggttaacgagttacagtatagacaggaacaactggaactcttgatcacaaacctgatgcggcaggtggatcggttaaaagaggagaaagaggagcgtgagaaggaggctgtgagttattacaacgcactggagaaagctaggtag

SEQ ID NO: 26539 - DNA, 639 bp, synthetic construct
  source 1..639: mol_type = other DNA; note = Synthetic coding sequence
atggcccagaccgacaagcccacctgcatcccccccgagctgcccaagatgttgaaggaattcgcgaaggctgcaataagggctcagccacaggacttgatccagtggggggccgactactttgaagccctgagcagaggtgaaacgccccccgtgcgggaaaggagtgaacgcgttgctctctgtaactgggcagagttgacccctgagctactcaaaatcctgcatagccaggttgcaggcaggctcattattcgtgccgaggagctggcccaaatgtggaaagtggttaatctgcccactgacctcttcaacagtgttatgaatgtcggtcggtttacggaggagattgaatggctgaagttcctggccctggcgtgctctgctctgggagtaactatcacgaagactctcaaaatcgtgtgtgaggtgctgtcgtgcgatcacaacggcggattaccccgcatccccttttccacattccagtttctctacacttacatagcggaggtcgacggagaaatttgcgcctcacacgtcagcagaatgcttaattatattgaacaggaggtcatcggaccagatggtcttatcacagtcaacgatttcactcagaacccacgggtctggctggaatag

SEQ ID NO: 26540 - DNA, 2844 bp, synthetic construct
  source 1..2844: mol_type = other DNA; note = Synthetic coding sequence
atgaacttcctgcggggcgtgatgggcggccagagcgccggcccccagcatactgaggccgagactgttcgcggcgctgctgaccccaaagttacatccagctgcggcctaaaatttcggcactcattccgtctggtgaaacacatactgtatcacgtgaccatcaacgtatattccgatagtgaaatcattggctatgcactggacaccctgtacaatatcattagtaatgaagaggaggaggaagtggaggagaatagtacgcggcagtcagaagatctcggctctcagttcaccgagattttcataaagcagcaagaaaatgtaactcttctgctctccctccttgaagaatttgacttccacgtgcggtggcctggggtcaaactgctcacttccctactcaagcagctgggccctcaagtccagcagatcatcctggtgtctccaatgggagtgtcccggttgatggaccttctcgcggacagtagagaggtcataaggaatgacggagtgctcctgttgcaggccctgaccagatcaaacggtgctattcagaagattgtcgcgtttgaaaatgcttttgagcgcttgcttgatatcatcagcgaggaaggcaacagcgacggaggtatcgtagttgaagactgtcttattttgcttcagaacctgctgaaaaataataactccaaccagaatttcttcaaagaaggaagctatattcaacgcatgaagccttggtttgaggttggcgatgagaactctggctggtcagctcagaaggtgactaatctgcatctgatgctccaactggtcagggtgttggtctcacctacaaatccccctggcgcaacttcttcctgccaaaaggctatgtttcagtgcggccttctccagcagctgtgcactatattgatggccactggggtccctgcagatatcctcaccgaaacaattaataccgtgtccgaggttatccgcggctgccaagtgaaccaagattatttcgcaagcgttaacgcaccctctaacccaccgcggccagccattgtggtgttgttaatgtcaatggtgaatgaacgccagccgtttgtgctgagatgcgccgtgctctattgcttccagtgttttctttacaaaaatcagaaaggtcagggagagatcgtcagcaccctcctccctagtacgatcgacgccactgggaactctgtcagcgccggacagctgctctgcgggggccttttctccaccgactcactatccaactggtgcgctgccgttgcactggctcacgctctccaggaaaatgcaactcagaaggaacagctcctgcgggtgcaactggctactagcatagggaatcctcccgtcagtctactccagcaatgtactaacattttgtcccagggatctaaaatacagaccagggttgggctgcttatgctgttgtgcacttggctgagtaattgcccaatcgctgtgacccactttctgcacaactccgcaaatgtacctttcttgaccggccaaattgccgagaatctgggcgaagaggaacagctcgtccagggtctctgcgccttgttgttagggatctctatatatttcaatgataattctttggagtcttatatgaaagaaaaactcaaacagcttattgagaaaaggatcgggaaggagaatttcatcgagaagctggggtttatctcaaagcacgagctttattctagagccagccagaaacctcagcctaatttcccttcgcccgagtatatgatctttgaccatgaattcacaaagctggtgaaggaactagagggcgttatcaccaaagccatttataagtcgagcgaggaggacaaaaaagaggaagaagtaaaaaagacacttgagcagcatgataacatcgtgactcattataagaatatgatccgcgaacaggacctgcaactggaggaactgaggcaacaggtttcaactttgaagtgtcagaatgagcaattacagacagctgtaacccagcaggtatcacagattcagcagcataaggatcagtataacctgctgaagatccagcttggaaaagataaccagcaccagggttcttacagcgagggagctcagatgaacggaatccagcccgaagaaattggccgccttagggaagagatcgaggaacttaaacggaatcaggaactgcttcaaagtcagcttactgagaaggatagcatgatcgaaaacatgaagtcatctcaaacctcaggcaccaacgagcaatcgagcgccatcgtgtccgctagagattccgagcaggtggctgaacttaagcaggagttagctactcttaagtcgcaactaaactcccagagcgtggagattaccaaattgcaaacggagaagcaagagctcctccagaagactgaagcctttgctaaatccgtggaggtgcagggagagaccgaaaccattatcgctaccaagacgaccgatgtggaggggagacttagcgcacttttgcaggagacgaaggagctgaaaaacgagattaaggccctgagtgaagaacggactgccattaaggagcaattggacagctcaaactccaccattgcgatcctccagaccgagaaggacaaattggagctcgagatcaccgacagtaagaaggagcaggacgatctcctggttttgttagccgaccaggaccagaagatcctgtcactaaagaataagctgaaggatctggggcatccggttgaggaggaagatgaactagaatctggcgaccaggaagacgaggatgatgagagcgaggatcctgggaaggatcttgaccacatctag

SEQ ID NO: 26541 - DNA, 1095 bp, synthetic construct
  source 1..1095: mol_type = other DNA; note = Synthetic coding sequence
atggtgaagctgttcatcggcaacctgccccgggaggccaccgagcaagagatccgatcactgtttgagcagtacggcaaggtgctggagtgcgatattattaagaactatggcttcgtgcacattgaggacaagacagccgccgaagatgcaataagaaatctgcatcattacaagctccatggcgtgaatatcaacgtagaagcctccaaaaataagtccaaaacgtcaacaaagctgcacgtgggcaatatcagcccgacttgcacgaacaaagaactgcgcgccaaattcgaggagtatgggccggtaatcgaatgtgatatcgtgaaagactatgctttcgtgcacatggagcgggccgaggacgccgtggaggccatccgggggctggataacacggagttccagggtaagaggatgcacgtgcaactctctaccagtcggctgcgaacagcccccggtatgggtgaccagtcagggtgttaccgctgtggaaaagagggacattggtcgaaagagtgcccgatcgataggtctggccgggtggcggacctcacagagcaatacaacgaacaatacggtgccgtgcgaacgccctatacgatgtcttacggggacagcctctattacaacaatgcctatggcgctttggatgcctattacaaaagatgtcgggcggcacgttcctatgaggctgtagccgccgccgcagcatccgtctacaattacgccgagcagactctgagtcaactccctcaagtccagaacacagctatggccagtcatctaactagtacctctctagacccatacgaccgacatctgctgcctacatcaggcgcggctgctacagctgccgcagccgccgcggcagccgcagccgtgaccgccgccagcacaagctattacgggcgggataggagccctctgagacgtgcaacagcgcctgtccctacagtcggcgaggggtatggctatggccacgaaagcgagcttagccaagcctccgccgctgcccgaaattctctttatgacatggcaaggtacgagcgggagcagtacgccgatcgggctagatacagcgctttctag

SEQ ID NO: 26542 - DNA, 1236 bp, synthetic construct
  source 1..1236: mol_type = other DNA; note = Synthetic coding sequence
atgatcgtgaacgactacgagggcaacgacagcgaggccgaggacctgaattttcgggaaacgctccccagttctagccaagagaacacaccacgaagtaaggtcttcgagaacaaggtgaatagcgaaaaggtcaaactctccctgagaaacttcccacataacgactatgaggatgtgttcgaagagccgtccgagtcaggaagcgatccttctatgtggaccgcacgaggcccatttcggcgcgaccgctggagcagcgaggacgaggaggccgctggcccgtcacaagctctgagcccactgctgagcgacacaaggaaaatcgtctccgaaggcgaactggatcagctggcacagattaggccccttatttttaacttccacgaacaaactgccatcaaggattgcctgaagatccttgaagaaaagacagcggcgtatgatattatgcaggaatttatggccctcgaacttaagaatctgcctggcgaattcaacagtgggaaccagccttcaaatcgtgagaagaacagatatcgcgatattttgccctacgactccaccagggtccccctagggaaatccaaggactacatcaacgccagctacatccgcatcgtcaattgtggagaggaatatttctacatcgcaacccagggtcccctgcttagcaccatcgatgacttttggcagatggttcttgagaataattcaaatgtgatcgcgatgatcacaagagagatcgaaggcggtatcatcaaatgttaccactactggcccattagcctcaaaaaacccctggagctcaagcactttcgtgtgtttttggagaactatcaaatcctacagtattttattatccgaatgtttcaggttgtggaaaagagcacaggcacgagccatagcgtgaaacaattgcaattcacaaaatggccagatcacgggacgccggcctctgccgactctttcattaagtacatccggtatgctaggaagtcacacctgactggtccaatggtggtgcattgttccgcgggtattgggagaacgggagtgttcctgtgtgtagatgtagtcttttgcgctattgtgaagaactgcagttttaatattatggatattgttgcacagatgcgtgagcagcggagcgggatggtacaaaccaaggaacaataccacttctgttatgatattgttttggaggtcctgaggaaattattgacattagactag

SEQ ID NO: 26543 - DNA, 810 bp, synthetic construct
  source 1..810: mol_type = other DNA; note = Synthetic coding sequence
atgatcgtgaacgactacgagggcaacgacagcgaggccgaggacttaaatttccgtgaaaccttaccttcaagctctcaggagaatacacccagatcaaaagtctttgagaacaaggtgaatagcgaaaaagtgaagctgagcctccgaaacttcccacacaacgactatgaagacgtgttcgaagagccgtcagaatccggaagcgatccctccatgtggaccgccagagggcctttcaggcgcgatcgatggtcatccgaagacgaagaagccgctggcccgtcacaagccctgtccccattactgtctgacaccaggaagatcgtgtcagaaggcgagctcgaccagttggcccagattcggcctctgatatttaatttccacgagcagacagctatcaaagattgcctgaaaattcttgaagaaaagactgcagcgtacgacattatgcaggaattcatgacaggtaccagtcactctgttaaacagttgcaattcacgaagtggccagatcacgggaccccagccagcgctgactctttcattaaatacatcaggtatgcccggaagtcacacttgaccggacccatggtagtccactgcagcgctggcatagggaggaccggggtgttcctgtgtgtggacgtggtcttttgtgctatcgtcaaaaactgtagtttcaatatcatggacattgtggcccagatgcgggagcaacgctcaggcatggttcagactaaagagcagtaccatttttgctacgacatagtgctggaagtactacgcaaactcttgacactggattag

SEQ ID NO: 26544 - DNA, 360 bp, synthetic construct
  source 1..360: mol_type = other DNA; note = Synthetic coding sequence
atggccagccagctgcaggtgttcagcccccccagcgtgagcagctccgcattttgttccgctaagaagcttaaaatcgagccatccggatgggacgtctcgggacaatcatcaaatgataaatattatacacactctaaaacccttcctgcaactcagggacaggctaatagctcccaccaggtggccaattttaacatcccagcttacgatcaagggcttttgctgccggcacccgctgttgagcatattgtggttacggccgctgattcctcaggatcagcggctacctccaccttccaaagcagccaaacgctcacacataggagcaatgtcagcctcctagagccctatcagtag

SEQ ID NO: 26545 - DNA, 339 bp, synthetic construct
  source 1..339: mol_type = other DNA; note = Synthetic coding sequence
atggccaccggcgacctgaagcggagcctgcggaacctggagcaggtactgagattactgaactatcctgaggaggttgactgtgtgggcctgatcaagggggatcctgcagccagcctccccatcatcagctactctttcacgtcttactccccttatgtaactgagctgatcatggaatctaatgtagagctcatcgcgaaaaacgatcttaggttcatcgacgctgtttacaagctgctgcgtgaccaattcaactataagcccatactgaccaagaagcagttcattcagtgtggcttcgccgagtggaagatccagattgtgtgcgatatttag

SEQ ID NO: 26546 - DNA, 54 bp, synthetic construct
  source 1..54: mol_type = other DNA; note = Synthetic coding sequence
atgaagcggggccggctgcccagcagcagcgaggacagcgacgacaatgggtag

SEQ ID NO: 26547 - DNA, 810 bp, synthetic construct
  source 1..810: mol_type = other DNA; note = Synthetic coding sequence
atgaaccaggaggacctggaccccgacagcaccaccgacgtgggcgatgtgactaacacagaagaggagctgatcagggagtgtgaagagatgtggaaggacatggaggaatgccagaacaaactgtccctgatcggcaccgagacccttacagacagtaacgctcaactgagtttactgattatgcaagttaaatgtctgacagcagagctgtcacagtggcagaagaagaccccagagacaatacctctcacagaggacgtgttaatcaccctggggaaagaggaatttcagaagctccggcaggacttggaaatggttttgtctactaaggaaagcaaaaatgaaaagctaaaagaggatctcgagcgggagcagcggtggctggacgaacaacagcagatcatggaatcactcaacgtgttgcactcggagctaaagaacaaggttgaaacttttagtgagtcccgaattttcaacgagctcaaaactaagatgttaaacattaaagaatataaagagaaactcctgtcaaccctgggcgagtttctggaggatcatttccccctcccagacagatccgtaaaaaagaagaaaaagaacatccaggagagcagcgtgaatctgataacgctacatgaaatgctggagattctcatcaacagactgttcgacgtgcctcatgacccctacgtgaagatcagcgacagcttctggccgccatatgtcgagctgttgttgcgtaacgggatagctcttcggcaccccgaggaccctacgcggatacgcctggaggcctttcatcagtag

SEQ ID NO: 26548 - DNA, 339 bp, synthetic construct
  source 1..339: mol_type = other DNA; note = Synthetic coding sequence
atgaacggccgggccgacttccgggagcccaacgccgaggtgcccaggcctattccacatattggaccagattacatccctaccgaggaagaaaggagggtatttgctgaatgcaatgacgaatccttctggtttcgttcagttccactggctgccacaagcatgctcatcacgcaaggtttgatatccaaagggatcctcagcagtcaccctaaatatggctctatccctaagttgatcctcgcatgcatcatgggttacttcgcagggaagctgtcatatgttaagacatgtcaggagaaattcaagaagttagaaaactctccactaggggaatag

SEQ ID NO: 26549 - DNA, 687 bp, synthetic construct
  source 1..687: mol_type = other DNA; note = Synthetic coding sequence
atggaggagcagccccagatgcaggacgccgacgagcccgccgactccgggggggaaggcagagcaggaggcccaccccaggtggccggagctcaggcggcttgttcagaggatcgcatgacactcctgttgcggctgcgggcccagactaagcaacagttactcgagtacaagtcaatggtggatgccagtgaagaaaaaacgccagagcaaatcatgcaggagaagcagatcgaagcaaagattgaggacctggaaaacgagatcgaagaggtcaaagtagccttcgaaatcaaaaagttagcactagactccgtgctgatggacaatatgaaacacttgctggagctgaataagctgataatgaagagccagcaggagtcctgggacctggaagaaaagctgctcgatattcggaagaaacggctgcaacttaagcaggcctcagagtctaagctgcttgaaatccagacagaaaagaataagcagaaaatcgatctggacagcatggaaaatagcgaacggatcaaaattattcgacaaaacttgcagatggaaattaagatcacaaccgtgattcaacatgtgtttcaaaacctgattcttggaagtaaagtgaactgggcagaagatcctgctctcaaggagatagttctccagctggaaaagaatgttgacatgatgtag
